United States Patent Application Publication US 2006/0134663 A1 - sequence listing, part 93

SEQ ID NO: 265177 - DNA, 923 bp, Homo Sapiens
tattataggagtgagccactgcactgcacacagcctcaattcatctatttttttattaataaaggtagtttaaaaatatgtatccaggaagtttccagttaatataacctacttttggttacatatgatcaacacctggctaatctgttattccatggccttgtacatttggaaggaacagtaattccaatccattaccctcttccctgggttcttaaaatttcagctacttagagagtcctcaaccctttggtgcttacctgcatttgggaaccaataactgtgttattacaggccaattcagtcttattaatagtgtctaaaatagtaggtttgcccacaaattccttgctagaatgtaggtgttgttcaagcgcgttctgtacatctgcactgtactgattagtgaaagcttcttcatactggtcagtccatagtcttatccgattttcccagccctcagttgtattctcatctaaattctgtgcttcagagggagaattctgtagaaaacaaattcagggaggttagtaaagtccatgcataaatagagggttgggaatgggggtggggacaagccggggttcccagagaaaatttatcacttggcaattgatgtggcataaaagagtaatggactgggagtcagaggatctggcttcctatcatgcttttgttaccaatgagaggtgagaccttgaataacttctttaaatggggaagctcagtttctccatttataaagtaagaaattaatctggatcatagtttcatcccatcactgtgattttatgaccattttaaagtcataaaaatcaattttctaatcaaaggactgacatcaagttcataagaaaatcttcatacaaatgaacagtagagacctcaaatttatcactgcttaaattttctcgtgccgaatt

SEQ ID NO: 265178 - DNA, 737 bp, Homo Sapiens
  misc_feature (311)..(367): n is a, c, g, or t
cgaagtgagaacttctaaaatcacttacatcttttgcaatatcatctcagatattgtaagaaacatttaataaatagtcatgacttaatgatatcaaccctggattaaatgactctaattctgtgtcacttttgtgtaatgtaaagataccgattgtgaatataagactcaaatatgggaaaactgccagatacaaaaatacagccgctaagcaatatttctgttcatcaccgaggaatctcatttccaaagtgccccagtttttaggaggaagaacaccagagtcagacagacccatagcagctgagtcnnnnnnnnnnnnnnnnnnnnnnnnnnnnnnnnnnnnnnnnnnnnnnnnnnnnnnnnngtcattcaatgaaggaatgcatacaacatgcttagcataacacctgtcacatggtaagtgctccagggtcaccacctatcattgtttccagcatacagttatcaccccaccgacatgtagcccctccctcatgagctcaagagcccccagcacgtgttctactcacacacgcacaagcttcagtgtcccttaagatgttatctcctggaaagtaggaacagaaagagaatattttcaggtagtttggaacagaatgaataacattcacattccttgcccaagtcagtacagattaatttccatcatttccaactcatactttatacatttcccataagaggaaaatcatgctggttttcagtagcatatg

SEQ ID NO: 265179 - DNA, 318 bp, Homo Sapiens
  misc_feature (23)..(23): n is a, c, g, or t
  misc_feature (69)..(69): n is a, c, g, or t
ggtccccaaacaaagatgttttncccaagaacctagaaaaaagaggagtggtttggtgacaagcggaancccaaatggcattcgagtggctccagttcctctctataattctttcccatgatgtttataaatttcccaatctgctcacttctatacttgactctgcagaaacaaaaaattagcagtgttttctagaacaacttaagcaaattatactgaaagctgctgtggttatttcagtattattcgatttttaattattgaaagtatgtcaccattgaccacatgtaactaacaataaataatataccttaaaaa

SEQ ID NO: 265180 - DNA, 531 bp, Homo Sapiens
tttttggccctaaaaccccagttttcggcacgagccctagctctagcccagcctggattccagggatcccacccctagccctgtccctattcagttggcacaggctgcctgaccctggggccttgatttgatctcaaataagccatagaggagagaggtcttgaggggtgggagcaggtgtgtactgacaattcccctccacatgtcttgagctgggacctcgtcatctgagacttccccatgccccaacaaatgcaaatgcacacaaacccatgcatacacaagcacacacacacaggcatctccccgtctggttgggggagcatgggagggggcacttcacagggagaagataaatagttccacacctgaagaccctccaacagcttctgcctccctcctcatcacttcctctctccaccccctctccaacactggccccttcccctaattaattccctggtgaggacagccagaggagctgcgacttggtattttttggaataaatagacattttcctgaaaattatt

SEQ ID NO: 265181 - DNA, 404 bp, Homo Sapiens
  misc_feature (162)..(162): n is a, c, g, or t
ggaaaatgaatgaaggaagggaaggcaaaaaactgttgggagggtccttcaaggtgtgggaaactaagttaaccttctcccctgtgaaagtgcccccctccccatgcctccccccaacccagacggggaaaatgccctgtgtgtgtgtgccttgtgtaatgncatgggtttgtgtgcatttgcatttgttggggcatggggaagtctcaagatgacgaggtcccagctcaagacatgtggaggggaattgtcagtacacacctgctcccacccctcaagacctctctcctctatggcttatttgagatcaaatcaaggccccagggtcaggcagcctgtgccaactgaatagggacagggctaggggtgggatccctggaatccaggctgggctagagctagtg

SEQ ID NO: 265182 - DNA, 689 bp, Homo Sapiens
atgccctggcatgggagaagaccacgagtgaggatgaaaagtggaagacagggaaaattcagttgtatcaaggaactgatgctatcaaaagcatcatttttgaagcagaacgtggcaagggcaaaaccggcgaaatcgcagtggatggcgtcttgcttgtttcaggcttatgtccagactagccttttatctgtggatgactgaatgttactatctttatatttgactttgtatgtcagttccctggtttttttgatattgcatcataggacctctggcattttagaattactagctgaaaaattgtaatgtaccaacagaaatattattgtaagatgcctttcttgtataagatatgccaatatttgctttaaatatcatatcactgtatcttctcagtcatttctgaatctttccacattatattataaaatatggaaatgtcagtttatctcccctcctcagtatatctgatttgtataagtaagttgatgagcttctctctacaacatttctagaaaatagaaaaaaaagcacagagaaatgtttaactgtttgactcttatgatacttcttggaaactatgacatcaaagatagacttttgcctaagtggcttagctgggtctttcatagccaaacttgtatatttaaattctttgtaataataatatccaaatcatcaaaaaa

SEQ ID NO: 265183 - DNA, 477 bp, Homo Sapiens
  misc_feature (77)..(77): n is a, c, g, or t
  misc_feature (110)..(110): n is a, c, g, or t
  misc_feature (117)..(117): n is a, c, g, or t
  misc_feature (256)..(256): n is a, c, g, or t
ccctggaattttaatttccctgtaagagataggcattccctcctggtccggaagcctgaaagggaatccccaccccnagaagttcctgtagccaccccgccgtgcagccnccccccngaagccccccagactcccatcctgggggaggggaccttgtttaccaagcagttcctgacccacccttagtggtgtacctgttttcctaggcaaaaaatatcctgtcctgttgtacctgtatagccctttaaaatgcagncccaggaatgagactcttttaagaaacacatcctgcttctgcaattcccagagagtgctgggggaaaaaaagggataaaaattcctacctactcatcagtgtttgaaagatggagctgaatagcttttcttgttcctggactaggcaatgaataagcaacaatgtatcttttctgtgttcaaaataaatacataatatcaataaaatgtagcaagaagtaa

SEQ ID NO: 265184 - DNA, 430 bp, Homo Sapiens
  misc_feature (79)..(79): n is a, c, g, or t
  misc_feature (236)..(236): n is a, c, g, or t
  misc_feature (282)..(282): n is a, c, g, or t
  misc_feature (326)..(326): n is a, c, g, or t
  misc_feature (396)..(396): n is a, c, g, or t
agtgattcctgaagacccagcccacagagggtggcagccaagcatctctgagcagtgtccctgctagcatcgccagcgncattcactctgcctccctcccacctcttgtccctcgtcgttaaaaaacagcaccctatcctgcttccccacatttctgttcctccaatgaagggctaagactatttagtaatctctttcttaaggcagagggagtgggcaaggatgggcaatcttgnaattttattttctgtaggaggataggcatttcttctgggtgcggantgtaaagggaatccacccaggaagttctgtaggcatcctgcgtngcagccttccggggagccccaggactccatctgggggggaggggatttgtttttacaaggcagttttggnaccaccttagtgggtgttaattgtttttttaggg

SEQ ID NO: 265185 - DNA, 269 bp, Homo Sapiens
ttaatttggacaggtcaggttcccagagctaagccactctcagggaagttctgctcctgaatctcagtgaccatttagtgactctttagctcagtcccagttctggaggctgagccagagctctgaggagaaccaccacgtgttccatgccattggaagactcagggaagcaggcctgagacacggggaaaatcatgctgtatctcactgatcctaagacaccaatgattgtaaaacttccacttattttatgtattaggggagaaagg

SEQ ID NO: 265186 - DNA, 416 bp, Homo Sapiens
  misc_feature (52)..(52): n is a, c, g, or t
  misc_feature (58)..(58): n is a, c, g, or t
  misc_feature (74)..(74): n is a, c, g, or t
  misc_feature (133)..(133): n is a, c, g, or t
  misc_feature (156)..(156): n is a, c, g, or t
  misc_feature (158)..(158): n is a, c, g, or t
gtattgttatttttattatttttaatttaaacttgatgacttgaacagcatntttccnaccgggaagagcggcntgctgccttccctcttgcggggtgggggtgggacatgaccccagtggggccagggccanactcagcgcagtgtgggctggancngcctctgtgctccaggggctggcctggtcttcgggggcgccggcttcccaccactcgccgccccacccctgcactccgtgacctctgagaacccagctggcccctcgttagccccagggtctgccgtctagagggagcccaccggcctccggacactgtcttcccgctagagccccgtcctcctctgcggggctctccggacccccttccccctcacctccaggcagggacagaataaatgtttgtatggaacaaaaa

SEQ ID NO: 265187 - DNA, 810 bp, Homo Sapiens
  misc_feature (73)..(127): n is a, c, g, or t
  misc_feature (708)..(708): n is a, c, g, or t
tggccggtcgggctggaagggcggggatgagggatgggacgcatccccgggggatctgcctccaaagcttttnnnnnnnnnnnnnnnnnnnnnnnnnnnnnnnnnnnnnnnnnnnnnnnnnnnnnnngtctcactctattgtctaggctcgaatgcagtgacgtgatcatggatcactgcagtcctcaacttactgggctcaggatgaaaggcttcctagcacaaacaccacccctgggagttcccggtacatcaataccagcctggggatcacgttctcatcaagagttggaagagggaaagcttgaaccagcttaggaggacctcatctggtactcttgatgaatgaaacagcaatctgaatgggctgaaaaaggatggacccagcactccagggagaaaacttggcattctttgggaatctaacaggatgcagtgaacccaagccttttgaaagagctcacccaatcagactgccccttgtctatcccatgagcagatgtttgatagtattgcggaggccctctagtgggtatgctgccaagcaactggagtggcacttgggctctaatccagttgtctatccctttcacccctggcatttcatcagccaaacaaaaaccaactaactcagaaaaaaaggaaagcccctcaagggtcctttgaccccgatatctacatagatgctatcggggtccctgaggggtnccaaacgaattcaaagctcgaaatcaaatagctgctggattcaagtctgtccttttcttgtggtctactataaataaaaatgtagactggataaattacaaa

SEQ ID NO: 265188 - DNA, 410 bp, Homo Sapiens
  misc_feature (388)..(388): n is a, c, g, or t
ttcacaagatgtttgcatagccaacagccatggcagatggagctagtgcctctctcaggagcaaggggcaggcacacttactgcccattataaaaactccagtttcactaaacccaggattctttcttgtaccacaatgcactacatgtgccagtattgctctgtaggaattggggctcagggagacagtgcagatgtcaatactgtggcttctgctgttgccatgagtaataaagtcctttgtctctgatccagggagactcatatcttctgcccaacatcttgaagctatgggcaggctaatttgttagtttgcaaggaggggtaaaatttcagggcccttcacagagtttgacagttttaggtgatgaggtatgggggatgcttnacagaggattttaggctttcct

SEQ ID NO: 265189 - DNA, 270 bp, Homo Sapiens
  misc_feature (254)..(254): n is a, c, g, or t
gtgaagacagggtctcactatgttgcccaggctgatcttgaactcctgggctaagtgatcctcctgcgttggcctcccaagaaaaaataacaggttaaaatcagttaatatagtcatctcagttttgaaactcagtaaatgtggtttttaaaagttactttcatttctggataaatttagcctttttgaggccacaatttgggcttttcttctctagtgggggacaaatcctgacagctggttctttacccctngctgggttgggtttcc

SEQ ID NO: 265190 - DNA, 501 bp, Homo Sapiens
  misc_feature (24)..(24): n is a, c, g, or t
  misc_feature (371)..(371): n is a, c, g, or t
  misc_feature (419)..(419): n is a, c, g, or t
  misc_feature (438)..(438): n is a, c, g, or t
  misc_feature (477)..(477): n is a, c, g, or t
  misc_feature (491)..(491): n is a, c, g, or t
tcacttactggccctgaaggctancaagaaaccggagctacttgctagactccagaaagatggtgtcaatcaaaaagacaagaactccctgggagcaattctgcaacaggtagccaatctgaattctaaggacctctcatataccttaaaggattatgtttttaaagagcttcaaagagactggcctgggatacagtgaaatagacagacggtcattggagtcagtgctctctagaaaactaaatccgtctcagaatgctacaggcaccagcctttcagaatctcctgtatgttctagtaggagatgctgtatcttctcctcaggaaacggcttttgggtttcaggagtttatttgatccctttaatgganttaaaaaaggccccgattattcttcacctggacggaacagagttaccncccaacattaatgggtccntttggattcccaccagtggaaaattgggtggcgggcttncccattgcccctgngggtggtggc

SEQ ID NO: 265191 - DNA, 808 bp, Homo Sapiens
  misc_feature (85)..(85): n is a, c, g, or t
  misc_feature (176)..(177): n is a, c, g, or t
  misc_feature (737)..(737): n is a, c, g, or t
  misc_feature (739)..(739): n is a, c, g, or t
  misc_feature (757)..(757): n is a, c, g, or t
taaggatccaattaaaaagaaaaccatggaaaccatgccatcatttttgtttatttgttgattgtaaatccattttccccccaanaatattcttctggaacatgttgacagacaaaattaagtatcttcaattttccatataatctgataattgtttgggactgggtaagtcttcnnggttagtgaccaaattggaaagtagataatcttacaacaaaatgtaaactttaaaaatggaaagcaaggtagacattaagtactctgacaagcagtgctgtgtagtggagaaagttctgggctggaagccaagacctaaattctaggctaagctcagccataaccagatggctttgggcaggcaagctgtccagcttctccgggtctcatttccttcacttatacatcagaggacctgattagaggcccctaatatctatgtcaggtctataattctatgtttatgacatacctgaggagaagatacagcatctctactagaacatacaggagattctgaacggctggtgcctgtagcattctgagacggatttagttttctagagagcacatgactccaatgaccgtctgtctatttcactgtatccaggccagtctctttgaagctctttaaaaacataatccagttaaggtatatgagaggtccttagaattcagattggctacctagtatgaggtataaaaacagagcattaggtatttttactatcatctcctancntaaaacaggcaacctttnggatttacactgaaaataattacatcaattggcccaaagggactgctagtt

SEQ ID NO: 265192 - DNA, 876 bp, Homo Sapiens
  misc_feature (156)..(237): n is a, c, g, or t
  misc_feature (363)..(363): n is a, c, g, or t
gcggcccaagtaattcggcacgaggttggatagagaaagtagtagcagtgttgtagctgttctgctttttttctatagtgccctagagtttcggtttcttctaggaggcagtataacatagtacctaaggggacaagctttagattttaaaaagannnnnnnnnnnnnnnnnnnnnnnnnnnnnnnnnnnnnnnnnnnnnnnnnnnnnnnnnnnnnnnnnnnnnnnnnnnnnnnnnngtttctttatctacaaactagggatgatggtattaacccctcatagttcttaagattaaataggaagggaaatgtgtaaagcactaagcattccttggcacgtaccaaacatgcaaatgttacccnctgaattgccacccgggggtgggggacaagggaagtagtaacggaaagataaataagaaaccttggccctgagcctgttccttaagcaaacctattgcctaatatttatatttatgcctctcctaggacagacatggtggttctgattgcctgggagatagcccaaatgcctacagcctctctggcagaacccctagctttccccagcaacctgcttcccctgttctgtcaccacgtggacaaacaattggttcagcagctggaggccaggatggagtttgcctggatttactgatctgtttgttctggaatacgtgtatgtgggaagttgaatcatcagacactagctacatagactatgtttacagggatccagagagtctgaagacatttcttatgcctttatatattggagaacccttcccctttttcatatcctttcttcaaaaatctaaatgatgtgcctaaaaataagacatggcataataaggtataattaaagagataatagaa

SEQ ID NO: 265193 - DNA, 423 bp, Homo Sapiens
  misc_feature (402)..(402): n is a, c, g, or t
tagccgccgccccggagccggtgtgggcgtgacctgcaggcgtccaccctgcggctacgggagaagtcttagtagcttgtatctggagtcttgagaaacacaaaccttacaaatgcatctttcttttgtcataaaattggaattacaattttcaactgggaaacagaaacacatttcttagcgtgctcagattttatatatcaccttatcaattttttccaaaacatgatttaaagcaacatctgtcctagtataattgttgcattttaaataacaatttattgaaaaatgttaagttttaccagcctaaaaaaagtaacaaaccaatttaagtgtactttgggggggcagggagggagtccttggattttggaattattccgggggtttttgttgggtccngttttcgcctttcttgaggca

SEQ ID NO: 265194 - DNA, 759 bp, Homo Sapiens
ggcacgaggcttttacaggtcttagccgccgccccggaggccggtgtgggcgtgacctgcaggcgtccaccctgcggctacgggagaagtcttagtagcttgtatctggagtcttgagaaacacaaaccttacaaatgcatctttcttttgtcataaaattggaattacaattttcaactgggaaacagaaacacatttcttagcgtgctcagattttatatatcaccttatcaattttttccaaaacatgatttaaagcaacatctgtcctagtataattgttgcattttaaataacaatttattgaaaaatgttaagttttaccagcctaaaaaaagtaacaaaccaattaagtgtactttgggggccagggaggagtccttgatttgaataatccaggagttttgttggtccagtttcgccttctgagcagttcttctgtatcccggggaaaagtacgctcggccccaaactggtatttgtcagacgatacatgtaaaagtttgtccttgaacgtggaacaagacttgtgtaaagtctgagacgggaactagtgatcactagctcaagaactgcaaatgagacaggaagctgttcactgtgaaacagtctcttgcttgtcgtgtatttttcgagtacttctgaagtgtgaagtaaaaaaatctggctaatttatttgtacaaatacactttgataattttttatattttcataaacttttacagatgtaaaattaaagaacttcacttgttaaaaa

SEQ ID NO: 265195 - DNA, 662 bp, Homo Sapiens
agacttcccagacgggaatcagaaccacttctcctgtccacccacaagacctgggctgtggtgtgtgggtcttggcctgtgtttctctgcagctggggtccaccttcccaagcctccagagagttctccctccacgattgtgaaaacaaatgaaaacaaaattagagcaaagctgtacctgggagccctcagggagcaaaacatcatctccacctgactcctagccactgctttctcctctgtgccatcaactcccaccaccaggttgttttgggcctgaggagcagccctgcctgctgctcttcccccaccatttggatcacaggaagtggaggagccagaggtgcctttgtggaggacagcagtggctgctgggagagggctgtggaggaaggagcttctcggagccccctctcagccttacctgggcccctcctctagagaagagctcaactctctcccaacctcaccatggaaagaaaataattatgaatgccactgaggcactgaggccctacctcatgccaaacaaagggttcaaggctgggtctagcgaggatgctgaaggaagggaggtatgagccgtaggtcaaaagcaccatcctcgtactgttgtcactatgagcttaagaaatttgataccataaaatggtaaagacttg

SEQ ID NO: 265196 - DNA, 466 bp, Homo Sapiens
  misc_feature (28)..(28): n is a, c, g, or t
  misc_feature (310)..(310): n is a, c, g, or t
gtttcccctggttgccattgaagccccnggggcagaagttttgtcccccaaaaattcatttatgcctgcaaagcccgtaaatcccatatccgtggaatgctgaagtactgaagcccatgacagcccaagatgcaatggttgtgagattgaccaacagacctgaaaaaatcatcataaacacaaaacagatggtcatgagaagtgttgctacagaaaccacactctgacctgctgctatggccagtgccatggaactggctgaataagccaccatcataagggtaaacatcataacgaagaaggcatgctnctttggcttcaatcctaacatgaagtacactatacaggtaaatataatacttggtaacatcctcatgggtaataaatcagataacagttttccaaggaaataagatgacactctgtagtatccgctgatgtattcatgtatgaagagcttcttctc

SEQ ID NO: 265197 - DNA, 393 bp, Homo Sapiens
gggggaaaaggtccgccacaatcttgtggggatgaaggcccagtggaaaatagaagctttcctcctacatccaaaaacagggaagctgaaggcctaaatgaccccactgtctccacaaaaggcactgagtactatggtctcataaagtgtttttaaaacattttgataacttattttaaaaagaaaaagaggaaactgtggattatgtgagtttttgcagcaatctagtgattccttccagcaggcccctgcttcccaggtctatgagcaactactgcctggccaggccctggctctcaagggccgagtctcagtttaaggccagattaagggggaaaattcgtccgagtagacctggacgaggaaaatttggtatctgtagcttttaaaggc

SEQ ID NO: 265198 - DNA, 378 bp, Homo Sapiens
  misc_feature (171)..(191): n is a, c, g, or t
tcctttcctactgtggggaaaaatttcctaaaaatgaacatcccctcctcactctagcccccctcccaatgccctaaaacctgtgaatatgaacaaggtgcccacacccttgagtatgtcgtcaagtatgtcgtcgtgtaccacagcagaccttaagaaaggggatcatcnnnnnnnnnnnnnnnnnnnnncggtgctctctcagtctaattagcatcacatcacctcctggaagcagagcgccttctccagcaggtggcaggagagaaaatcagagagattcaaatcacagggagatctgacactcctttcctggctcgaaggtggagggggcaccgtgagaaggaatgcaggggtcggggccagggggaagcttaa

SEQ ID NO: 265199 - DNA, 538 bp, Homo Sapiens
aggatttgctgtaagtcttcaagtcattttgtccaatccaaaagctgtatttaagcgtcgtggatcccagccagggatgcaagaatctgactttctcaaacagataacaacagtcgaagaactggaaccgaaagcaaataactgcactaaggtattcattacacttgtgctgcccgacctcgagtgtcaccatgaagagtgcgctacccaagctatttccttccccttcaggttctcgtgtggcacactcggacagagaaggttaatctagccaacgagccaaagtaccacctgggacacagtggaaaattgaggtataaattgaagcagcaactgggtgcagtttgtcccagccagtgggatccatatggaagagggatgtttgggagtttagggctacagagcattcaggtattgtttgttttacttcagtacagcagcctttcttgtcatctgatgggacatctgtttaaatggagcttgtcagttaacataagctaattggatggttggtacaaaatgtatgttttgtcttcat

SEQ ID NO: 265200 - DNA, 892 bp, Homo Sapiens
  misc_feature (286)..(286): n is a, c, g, or t
  misc_feature (455)..(490): n is a, c, g, or t
  misc_feature (600)..(600): n is a, c, g, or t
aacaaaatcaccatcaccaatgacaaaggtcgtctgagcaaggacgacattgaccggatggtgcaggaggcggagcggttacaaatcggaagatgaggcgaatcgcgaccgagtcgacaccaaaaacgccctggagtcctatacctacaacatcaagcagacggtggaagacgagaaactgaggggcaagattagcgagcaggacaaaaacaagatcctcgacaagtgtcaggaggtgatcaactggctcgaccgaaaccagatgggcagagaaagatgagtatgnaacacaagcaggaaagagctcgaaagagttttgcaaccccatcatcagcaaactttaccaaggtggtcctggcggcggcagcggcggcggcggttcaggagcctccgggggacccaccatcgaagaagtggactaagcttgcactcaagtcagcgtaaacctctttgcnnnnnnnnnnnnnnnnnnnnnnnnnnnnnnnnnnnngaaatgtccttgtgccaagtacgagatctattgttggaagtctttggtatatggcaaatgaaaggagagggtgcaacaacttagtttaattataaaagttccaaagtttngctttttaaaaacattattcgaggtttctctttaatgcattttgcgtgtttgctgacttgagcatttttgattagttcgtgcatggagatttgtttgagatgagaaaccttaagtttgcacacctgttctgtagaagcttggaaacagtaaaatatataggagcttaaattgtttatttttatgtactactttaaaactaaactgaacattgcagtaatgttaaggacaggtatactttttgcaaacaaatgcataaatgcaaatgtaaagtaaagctgaaattgatctcaa

SEQ ID NO: 265201 - DNA, 958 bp, Homo Sapiens
  misc_feature (25)..(25): n is a, c, g, or t
  misc_feature (34)..(34): n is a, c, g, or t
aaccccttgaaaaatgtccaattcnaaaaagaangcctcaaatttggaacaacgttgttttcaaatgaaagcccaaaccatcctcctaacctcctcggagggtccagcaagctgcctggccgaagggtaatatgatcctgaacacttccatcaagttccttcccaaacaagagaggtaagattttgaagatggctgctgcagagggtggcccaatgtactgcttgatgtcagccctgtcccacgaaggccacgtcgatcttctcggtgatgttagaagtggtcagaatcacaacattggaatgccttttaatctgatcaatttgggtcaagacagcattgaccacgcggatggcatctgatggctcggtgcccgccctgcaggcatttcgggcggctatgagactctccacctcatcaatcagcacgaacaccagggcgtctttatcatcaatcaaatcctgaatcttctgaaacatcttggttaccagcttgccactttccgaaaaccacttagaaaagaggctgtggctgtttatttcaattaattggccatatcggtacctgcttgaaagtctaattgtcaatttctgggctaacgctttacacagggatgtttttccagtgccaggaggaccgtggagcagcaccacccggttccaggtgatgaggttgctgttgacgttcttgtctgaaaacagtaaagttgtcatcacataaatcgaggagatgggatttgacttccacatcgtataccaagctgtcccaaagcccatggaattcagctgcaggtagaacccagtgatttgctgcaattatgttttctgtctcttcctccagattttcactgctggggccatcttcattcagctggaaaatgtgaagtgcaacagtgcatgcactcaaatcgatgggctgtgagtcttcaacctttaattctgtgtcaataatagacacaga

SEQ ID NO: 265202 - DNA, 302 bp, Homo Sapiens
ccatcacagggccagccagtaaaactgtttgccaaacactgtgatcctttagagagaaaaggttttacctacaaccccaatgtaaaaatatgcagaggtcctagatctactgttaactgcagttgagcgttcatgttcttgctcaagtgataaatctgctagagttttcagatcaatacgagaaaactttgtgacaattagagctagtgaaaaaaggacatggctttctcagtatgtagtagcaagcctctatctctagaaatatttaggcaaaggttagatgaggatttgtcaaggagaca

SEQ ID NO: 265203 - DNA, 460 bp, Homo Sapiens
  misc_feature (349)..(349): n is a, c, g, or t
  misc_feature (377)..(377): n is a, c, g, or t
accatggtacagaacaccaaagccgaactcacgcactcccgggagaaggtccgtcaattggaatccaatcttcttcccaagcaccaaaaacatctaaacccatcaggtaccatgaatcccacagagcaagaaaaattgagcttaaagagagagtgtgatcagtttcagaaagaacaatctcctgctaacaggaaggtcagtcagatgaattcccttgaacaagaattagaaacaattcatttggaaaatgaaggcctgaaaaagaaacaagtaaaactggatgagcagctcatgggagatgcaggcacctgaggtccactgcgacgcctagcccgtcccctcatgcttngggatttgcagctgctccagcagaaagncctgttccgatgggtgcccggggagcagttttttgcaggtttcaacgccagctggcttgcagggcggatagggttaaaccagc

SEQ ID NO: 265204 - DNA, 384 bp, Homo Sapiens
ccctgggcaaacaggcccccctggttggcccgaaagacaattagcccacccccactgccccactcccaacgaaagggaaattgactctctgctgtccactctgctttaaaatacatcggcccaaactaggcctcctcctttcgctcctgaagtcagaagcgcccacctttggctctcaaaattgggagcgatttggtggagaggatggggtagggaggatgggagaacagcgcctttatctgggacagacagaaggcctggagatgggaagggagaaggagatcagagtccagagagatgaagaggcacagacacaaaatcaggaccctctagtcccccgctcgtgctggccattcttttgtagaactgctcagtcactctggg

SEQ ID NO: 265205 - DNA, 387 bp, Homo Sapiens
  misc_feature (20)..(20): n is a, c, g, or t
  misc_feature (32)..(32): n is a, c, g, or t
ccccccatcccaccaatggnataaaaggttgnaacccccttttaattgtgtgcccaagcatttccccctaggcactgaagataaagtgatgaacaagacaaaaatgctatgcaaatgtgtcctataattcaagcaaagaaacaagacaatacaaagagtaaaccaataaatatgcccattagagagtggtaagtgctcataatgataagcccagtatgctggggcttaagaagagaggaagagtaggaaatcaggtagacagatgggggcagatcacatattaccctatgggccccagttaagaacgctgggttttattctaagtacacagtagctactgggtagtttaggtagggaagtaacatgatttgatgtgtatttagaaaa

SEQ ID NO: 265206 - DNA, 467 bp, Homo Sapiens
  misc_feature (84)..(251): n is a, c, g, or t
gagacaaggtcttgctttgtcctccaggctggagtgcagtggtgcaatagttcactgcagcctcaacctcctaagctcaacaannnnnnnnnnnnnnnnnnnnnnnnnnnnnnnnnnnnnnnnnnnnnnnnnnnnnnnnnnnnnnnnnnnnnnnnnnnnnnnnnnnnnnnnnnnnnnnnnnnnnnnnnnnnnnnnnnnnnnnnnnnnnnnnnnnnnnnnnnnnnnnnnnnnnnnnnnnnnnnnnnnnnnnnatgagccactgcacctgggcaagaaataaggtttaatttattggtgacagctgtctgtccagttggccttgcagagagctgctgatgtgagtgggttcagggccaggttgagaagccgtgatccttacgagctcctctgcacctccaccttctggaaaagggcagggtccccacagtcagactctttgccggctctcggtgggacctgactcaaca

SEQ ID NO: 265207 - DNA, 803 bp, Homo Sapiens
  misc_feature (97)..(157): n is a, c, g, or t
  misc_feature (292)..(390): n is a, c, g, or t
  misc_feature (759)..(759): n is a, c, g, or t
  misc_feature (789)..(789): n is a, c, g, or t
cttcatattcctggagaattaagagcattttcaaaatgttttacataagtgttgcttacctctaagttcactgcaaaggtaaatactactgcaaagnnnnnnnnnnnnnnnnnnnnnnnnnnnnnnnnnnnnnnnnnnnnnnnnnnnnnnnnnnnnngcaggaaaaggaagtaatgaaggagaggatagaacaaaaagaaggcccacctgatgggggatggaagtatcgcagagaaaccattagctttctcagagccaggcacctgcacggtgcagagccaaggctatgggnnnnnnnnnnnnnnnnnnnnnnnnnnnnnnnnnnnnnnnnnnnnnnnnnnnnnnnnnnnnnnnnnnnnnnnnnnnnnnnnnnnnnnnnnnnnnnnnnnnaaatgcgggaaacagcaagagctacacttgctgagcactcaccatgtgtcagcacgctccactgaaattcccactccaccctgtgtgatatgtggaattatcaccctcatctgacagatgagggagctagccgaaggatgtggttagcatttgttcaaagtcacagagctgggcttaccccgcagacctggctctgaagctcacactgactactgcaggaggagggggagatgggagctgtggatgggcccacacagcacctgccctctacatgtgggtacttacgctccctttctttctcttttgctcttctcttatctcctgttatccaggtggtgggacttaattttctagaaatttccatctggntagatggaactttctaacctaggaaaaaancccagcgcagcctc

SEQ ID NO: 265208 - DNA, 587 bp, Homo Sapiens
ggagtgaaaaccttgttcaatccagcccctgccattgctaacctgggatccccagttctacaccctctcagatgtgttctgctgcaatgaaagtgaggctgagattttaactggcctcacggtgggcagcgctgcagatgctggggaggctgcattagtgctcttgaaaaggggctgccaggtggtaatcattaaccttaggggctgaaggatgtgtggtgctgtcacagacagaacctgagccaaagcacattcccacagagaaagtcaaggctgtggataccacgggtgctggtgacagctttgtgggagctctggccttctacctggcttactatccaaatctgtccttggaagacatgctcaacagatccaatttcattgcagcagtcagtgtccaggctgcaggaacacagtcatcttacccttacaaaaaagaccttccgcttactctgttttgattgctattagtcccaaaataaatatacctgggaataaaatgtacttgggggtggctgctcctggctaatgcttattagaaaatgtcctcgtcccctttctttgcaaatattagttcttttacgaaa

SEQ ID NO: 265209 - DNA, 763 bp, Homo Sapiens
  misc_feature (17)..(17): n is a, c, g, or t
  misc_feature (24)..(24): n is a, c, g, or t
ccccctcaaaatccccntgccccnccccactgtgagggtagggtataatagtattaccccccatttgcccagcctagagaaaacctgatgccaaatgtagaggcaattggataacttgttcaagatcactgagcaaactgctgcctggagtcaaaaattctaacttctgtacaacagggacataatttctcttttggctattatacatttcttttaaaaagcaagtgattggtaggaatttggcaaaagttgaataagttacaagaacaggcttttattcatttgctatttggtttttatgtttcttgtttacttcgtttgatttgtttctcaaaactcactcagtgggattacctgtctgtcatgtagcagctttttaaaaaactggactgtgcagtgtggttctgagtgcagtctttataaagcccagtgctgtactggtaaatataaacattttataacgtgaaaagcacaacgacacaatatgtccccttaatagctggaaaaaccaatataagccctcccactccctactaccactgattgccaccaaacaaataaacaaaatgcccaccccacccaacaacaacaataacacatcaagggggaaaatgtcatatttcctggacctaccacaatgtacagaaaataacagacagtgttatcaaatcccactctatgtcttctagggaaatctttatgtttgtgtctacctactgagtctgtagaataaacaatttcctttaggaaacataaaaatagg

SEQ ID NO: 265210 - DNA, 428 bp, Homo Sapiens
aattcggcacgagcggcacgagcctacccctctctgttgtctccatgatacttgggtgatctctggataatgtctgtgtgtttctgcaggcaaaaacaacaacaacaaataagccacattgcagaatagagaatagatcctgtttctgttatggattgagaagggtattttatatcatcctgttaatgatacttaaccaaatgcttttaacatttctagttgattgtaggatattcaacaaacattggcagtgttggggaatgaccaacttccctggttgaaacccagtaatagccgttgccagagcattaaattaaaaatattaatttaccccaatctagaaatagttttatgctttttttaaataatagtccccgcacaaacaaacatacagacagcactggagagggccttataaaatgagcttc

SEQ ID NO: 265211 - DNA, 656 bp, Homo Sapiens
  misc_feature (42)..(85): n is a, c, g, or t
  misc_feature (377)..(386): n is a, c, g, or t
  misc_feature (534)..(566): n is a, c, g, or t
  misc_feature (622)..(622): n is a, c, g, or t
cttaggaggggcagggagtcgtgtggaagggccctgcagccnnnnnnnnnnnnnnnnnnnnnnnnnnnnnnnnnnnnnnnnnnnngcctctgcccttctcttctgttgttggttttgcagagtcattaagggagtttactgcagactgtcccccatataagtgtcctgtggcccctgagcctttgcctcagcctctctctctccctgcagtgccctggggaggaatcaactgacagccctttcagtcttcccacagtccagccagttaaatcaaggtgttccccttttatagaggagtctcctagagccaaccgcagcatccctgcctttgggagccacctggaatgtgccagctgcagtagccgttccttccacgnnnnnnnnnnatgctgtctgtggggcttgccactgagtgctccatctccccatgtgctccatcccccggcatctgctgccattggtcctgcctgttgcgttacttctctgtgccctggagcccctcaagcacagaggcctcgaaaggttgatcagacnnnnnnnnnnnnnnnnnnnnnnnnnnnnnnnnnagacgggaatgaacggccaaccctagaagttcaccccacaagacctgcagggcggnggcctgagtgtccaagaagcctcttgggaaggga

SEQ ID NO: 265212 - DNA, 414 bp, Homo Sapiens
atgtgctccatcccccggcatctgctgccattggtcctgcctgttgcgttacttctctgtgccctggagcccctcaagcacagaggcctcgaaaggttgatcagacatcctcagcacctggagcggggcctggcacacaagacggcaatgaacggcccaacccctagaagttcaccccccacaagaccctgcagggcgggggctgagtgtcccaagaagcctcttgggaagggatggtcttagaccctagtggtgtcttcccattctgcagaggcctagggatgtccccaggtccccagagtgggaggggaagggtcagaagtccatggaaataaaacacagggccagctacaaaatttgtggggcccagtgcaaaatgaagatgcaagttcccttgttcaaaaagcagtaaaa

SEQ ID NO: 265213 - DNA, 586 bp, Homo Sapiens
  misc_feature (338)..(338): n is a, c, g, or t
aggctcagggaagtccacgtgccgaaaaggttaggtcccaaaacccagcccgcccctaagtaagccaagaatctaagaaacctgaaggaagctggtgcagtgtccatcaaatcaagtttccacaaagctactccccgtctgcagctcagtttctgtgagacttgcccgaggtcttttagaggcttaaaatggttggctggtgtcggattccctgagaagcagcagttaggaaagcgtggttccctcccagcacttagatggttttctgaaattgcctcaagtatttcttcataatcatgttcatcatcatctagatcctgcctttggggctttaaggnctgtggcccttcctgtgggcaggaatcttgctgtacgtactggagccatccttgatgaactctggcaaggtcttcgccttgggtttgggcagccgagcgtgttgctgcaatcctaagacttgagaagacttgacgcctccctcactgctgtgtctcctctgcttgctgaggccctgatttttagggggcctgggtgggggggcttggatctcacaggctggtaacttccgaagacgataatagaaggt

SEQ ID NO: 265214 - DNA, 709 bp, Homo Sapiens
  misc_feature (202)..(202): n is a, c, g, or t
  misc_feature (271)..(271): n is a, c, g, or t
  misc_feature (585)..(585): n is a, c, g, or t
  misc_feature (670)..(670): n is a, c, g, or t
  misc_feature (691)..(691): n is a, c, g, or t
cgaccacctcccagctccccaagctgctggtttactctgcgcacgacactaccctggttgccctgcaaatggcactggatgtctacaatggtgaacaagccccctacgcctcctgccacatatttgaactgtaccaggaagattctgggaatttctcagtggagatgtactttcggaacgaggagtgacaaggccccctggncactcagcctgcctggctgccctcaccgctgcccactgcaggacttccttcgcctcacagagcccgtcngtgcccaaggattggcagcaggagtgccagctggaagcggtcctgcagacacagaggtgattgtggccttggtcgtatgtggctccatcctcttcctcctcatagtgctgctcctcaccgtcctcttccggatgcaggcccagctcctggctaccgcacgtcgcagatggggaggaccacgcctgacaaccactcagcccccttccctccacctcctaggggaagtgggcttgggccttcggctcctgactgttgctgctccccagcccatggacaggagattctgggttgggcctccctctgatgaccccagncagatgagcgagttggggctagcgtggcccatggtgcctgtcaatcagcattccatggctgatgtttacaagttgtgtgttgganatggctttttcaaaaagattngctcctcaaggtccctaa

SEQ ID NO: 265215 - DNA, 474 bp, Homo Sapiens
gctggaaaaggatctccctagcagaactcgtggttcaggacaatgctgagagctaaaagagccagcctaatatcagactggagccagaagtagacatctccccacctctaccctatcaggactttcaaaacccccctgggaaggtgatggtgctcagcttcttgacacccccccacccacttcccctaccaggtggaagagtctgactccatgtgttatgcctaggaccaatggcagtgctgggttcacccactcctcccctttttcatctgcacaaagttgagggaaacgggagaatctgtgctgagaagactcagacccaggagcccctttcacaggcccctagttgggaagactggatgagagtggagcctccgtttcttttccctcttctatccttgttacttgaacaatctcagtctctaagtggtgggtggggacatgaagaggtgtgggtccaggttaggcaggaga

SEQ ID NO: 265216 - DNA, 420 bp, Homo Sapiens
cccaggctggtctcgaaactccctggccttaaagccaaccctcttgcctccagccctcccaaagtgttgggattaacaggcatgagccaacacacctggctaaaactgcatttagaaaacaattttgtcagattgggcatggttcctaacacattgtgtaaattttatattccttaggaaggtttttgtctttctctttcccagctgtatcctatggaaaaggaacctattttgctgtggatgcccagttattctgcccaaggatacctactccaagccagacagcaatgggagaaagcacatgtacgttgtgcgagtacttactggagtcttcacaaagggacgtgcaggattagtcacccctccacccaagaatcctcacaatcccacagatctctttgactcagtgacaaacaatac

SEQ ID NO: 265217 - DNA, 426 bp, Homo Sapiens
  misc_feature (17)..(17): n is a, c, g, or t
  misc_feature (37)..(37): n is a, c, g, or t
  misc_feature (81)..(81): n is a, c, g, or t
  misc_feature (195)..(195): n is a, c, g, or t
aaaatatatttatggtnaaggtaaaattccccctttnagatggaccctagccttgggttggcctgaccatggccaagaggnccctgtgggtcggggtacccctttgtaaataagtccccaagaattacagttgtccagggcaacccacttgacctatgtcccccttccctagcaaaaaatgcagtataggaaaanccttatggcagctctcttattaatttaaaaattaagctgcaatcactgagagaattaatttctagtagccaaaatgcaataaatgtaggaaatgcacattaaaaccacacgttatgtgtaaactagcacaactactttggaaaattatttggtgttcaccaataaggcagaatacatgtattccagcaacttcactcctaggtatacacccaacagaaatgcatacgtata

SEQ ID NO: 265218 - DNA, 601 bp, Homo Sapiens
agatgggtgaaagtcgatgccttctagtctcagtgaatttaacctgtgattttatgtctacgtatattgttcctttactgaacccaccacatgcgggccataaaatgagtgaaatcacagtgcaccctgttctcttatttttgaagtgtttcacgatttccagcatgtccatcagatgggggggattgctaacttctctcttactcatgtacttacattctgtagttctcattgcatcactttggatgtttactttggaaaagcagaaactgtctctttaaacttggccctcaatgtcattttgcgtatctctgagaacaatagctatgtcccaccccagtttgtatttccgttggttgttggcacttttttctcattcccccatctcattaccttgtctgttttctggcactcactataatcagccttgcactagagctgtttgtggacttggcttcaccccctcctcctcagccctcccccacccattaaattgtgagctcttagaagacaggggtggcctttcatgtctgatcccctaccaaatctagcacagtgccttgcatcaagtagatttcaataaatatatgttaaatggcaa

SEQ ID NO: 265219 - DNA, 562 bp, Homo Sapiens
  misc_feature (146)..(146): n is a, c, g, or t
cccccaaaatgccgtgaaattaactcagggaatggagtgtgaatggcttgggatgggacatcccggaaggcctcgcaacggcaatggcgactggcaggacgaacggaagctactcaagtcctcccaggacggatgggcgaacacgnatgggcctcttcttggcccagcgggagaagaccgccttctcagtgatgaagcggtggcgcttcggggcgcctgctcgtgtgccaggtacatctgacactcatctagccggcccttctcaaagtagtggtaaggcactgaggggtggctcttctccctgcaagtaatgtcgctgaccatccccatagaccacgatctcctcacacagctccagcgcgaggatcatggtgaaaccagccggtgctgaggaaggagcccgactgctccggttcttgcccgtctcgtcctggaagatctggtcgcagtagggcatcatgcgctccgtgaaggtgtacacctgcaggccggggtacatcctggtgagctgcagcagcgtgcggtaggtgcggccgccgagcacccggtccatgtgcctgct

SEQ ID NO: 265220 - DNA, 422 bp, Homo Sapiens
  misc_feature (142)..(142): n is a, c, g, or t
  misc_feature (370)..(370): n is a, c, g, or t
gatttcggcacagctggcccagagtcatccagcttgcaagaggcagagcagtgaactcgaaccctggctctcgggatctgctactcccctatgtgtcttggcctccccagggatcaggcgtgggtcttcacgagcccatggnctggcgaggggtggtcaaggtaggcggcagggtgtggccggagagttggggttctgtcccaccccagccctgttccccaccccgcagaggaagagccacccctcagtgccttaccactactttgagaagggccggctagatgagtgtcagatgtacctgggcacacgagcaggcgccccgaagccccaaccgctttcattcattgagaaggcggtctttttcccgttnggccaaagaagaggcccattcgtttttcgcccattccttcctgggaagattt

SEQ ID NO: 265221 - DNA, 477 bp, Homo Sapiens
tttccagaaaacacacgtttacccgtacgttcctgatacggccccggcagtcacaactccaaggccccttcaccaatgaaccccaggctctcggctgccccaaccagggcggccagctgagaagtgtggcaccaaaaggtggtaggagcggctggggagggaggaccaggactggcacaaggtcatgatgctggtgagttgggggccatcagcccaagggacaaaggccacttgacagacctggaggtggggtgagcccccaaatgccgtgaattactcagggagtggagtgtgatggcttgggatgggacatccggaggcctcgcaacggcatggcgactggcaggacgacggaagctactcagtcctccaggacggatgggcgaacacgatgggactcttcttggcccagcggaagaagaccgccttctcagtgatgaagcggtgggcgcttgcggggcctgactcgtgtgccag

SEQ ID NO: 265222 - DNA, 381 bp, Homo Sapiens
  misc_feature (295)..(295): n is a, c, g, or t
  misc_feature (327)..(327): n is a, c, g, or t
ccttcctgatgtttctggattccctctttcattatttcctttctgtggtaagaacatcctttagctactcttttaggactggtctgctgggaacggattcttttagttttctttcacttgagaatgtctttattttcccatcatcctgaagggtatttctgattgatatggaattcttggtagacaatacttatctttcagcacttgaaaaatgctgccttttcattttctgggcctctgtagttcctgatgaaaaatccaatatcatttgttcttcccctgtaaggttaggggngttatatctttttcactgcacacaagactttntttgtctttggttttcaaaagtttgattatgatatatgtagatgtggattcttt

SEQ ID NO: 265223 - DNA, 915 bp, Homo Sapiens
  misc_feature (536)..(573): n is a, c, g, or t
ttacaagtaagcgtctatgcaggcatcacaaactttggcggatacagtagatatgtatttctttgatgctgaaaggtcagtccctaagacaaaatcaaatgtctcaaagaattaaaagcaaaatgcatgtgtcttcctggcaaaggtttccatttgcaatgtaatctgcatttctacaaatactcaatgtccaaggccactagagggtgaaaaaccagggcagcgtcttccagcaggagtcagggcaaacccagagccaaaactccatcctcagcccaaccttggaggcccagcagctggggctgagaagtggggcccaggcaacgccaggccctcactgcccgccaccctctgttgtgctgggtgcttggggccaggggatgggcctgcctcttcctgagccccgggacaggctgctgccgggtctgctcaccttctctgacccaagtcgaagacagcaggcaagaattggcatggggagactcagtgctgtttctgagtttcaagtatgtctgaggtgtaggggagtgagtgannnnnnnnnnnnnnnnnnnnnnnnnnnnnnnnnnnnnnttacatgctcgtgcaccttatggaggggaaggcccagattctgaggctctgaactttttgcagtgtttaaaatagactcaggatttatttattttctttttagctttatagcaattaattggctattgattggttggaatgttcaactctccatttcctcaaatacaataaaatagtttcattaaaatgtattcatgcttgaaaagaagggcgccattaaatggtttcctttctgttccactccaagggaaatgcgccgtttgtaaatcaaaaatccatcatccaaaatcacttgttcttaatgatgattttggagaagatgagggacgggccacaggcatg

SEQ ID NO: 265224 - DNA, 412 bp, Homo Sapiens
  misc_feature (16)..(16): n is a, c, g, or t
tggtggctgccccacnggatttatcacttggcactggtgcttgtgccctgacattggaagatctgtaggtggacctgccctagtctggcccccattcatcttgtcccccacaacccctagggctgagcagagttcagagcactctgcactgcatgaatcagtccattgcctgagagaacagagagtttctaccagtaaacaaggatgaaatatatatgcagccacattagctgtagctagctagctcttacctacaagcaccatctactggcttgtaggtctaactataaaacctgctaagagaagtgcatagaactatagaagcaaagccaaaagacagcccatacccagcattctctgcagtcacaccccctagggagggggagaaaaggaaagggaaattaaacaaacc

SEQ ID NO: 265225 - DNA, 605 bp, Homo Sapiens
cttgatgataggcattggttgattcagagagatatcacatttggtcatagccttctggaagtccagagggagagaagaaaaggtggggtcatgggcttaatgaatccaatgcaagagagcccagcctgtgtgctggacaattcttatctgactgaatgctgtgggaatccattagaagggagatgagtaagggtagggttacttggaggaggaggaacttgaactaggaggaggaagaagggcaaagaagaagtaatttgagagttgttcttctaaggcatgcttaactatccagcacctcaccttcattccccagctccttcatcaagcgacaactcttgatccgaggaaaacgggatcacagaatttgtataagaagggaaattaagtgtttaccttagtctagcccctcatattttacggagggagaaattgagttctgtggagattaaataaataatacaagaattggaggtagagccagaactggaacccatctttctttttttcagttcatatccttctgcaaattcctctagagcagagaataccatttttacttctttgagcgccctcaaaaatggagacattggccggggggtggt

SEQ ID NO: 265226 - DNA, 687 bp, Homo Sapiens
gcctgaccatggtggcgtatgggcttgtggagtgcgtggagtccaagaacccgatcagaccccacgctccaggacaggtcaaccaggcagaggatgaagaaatacaaacaaaaatgtgagagcagtgaggtccgaggaggatgaactcagaaagcaccagccagagaattttcttagaagatgcctcaggacatagagcggctcctcatcaccatctcagcacaatttggccattctgaagagatcatgttatttcactctttatgtattttttttctattctaacaaatttttcgtccaccatcttaacagagatcaagtgtatacatgaaggtatcagttcatttaattttagatgcaaaagaaaaaggtctaacgtacaatcagccaattagaatttgcctgaaatcatagactcaccctagttttattgctgtagttgtttttaagaattggaagcctgcttaaaaaatgtagttgagccccataattttacaaatgggcgaacttttaaacttctaactctacttggatcaaaacctcatacattttacaaaggggtcctgacaagtcagctgactcaacctcacagagtcagggggtgacaaagccagactggggctcaggattcctgaaacgtgtggggtctgcgtttctaaataaagacgggttattttaatgggaaaa

SEQ ID NO: 265227 - DNA, 477 bp, Homo Sapiens
  misc_feature (327)..(327): n is a, c, g, or t
  misc_feature (374)..(374): n is a, c, g, or t
  misc_feature (449)..(449): n is a, c, g, or t
  misc_feature (455)..(455): n is a, c, g, or t
cctgaatatgtcactggtgtttaatggaaaggtatcctattagtccttggttaagataaggcagtaagagtatcactaatactatgtttttgcttagaatgaggctgatccttccactggcgtcttcacgggcaattagttccctctcttttgctcctagaaacacaggtaggagctgtctgccccctattgctgttgcattttctgagtgtgttgaaggctcatctagtctcatcacagcagcttccccagtggggatggagcgctgtatattgcattgtagcatctctccaggggagtgcacggggccccacagagggaaaacanagggcatctttctttctgactccctcttctgtttctcttaggggacnggggcccataaatggattcccttcacatggatccaatcaggaatgcgagacactgttgacttaaaacataaagcnagtagnccctgatttcagagggaatggg

SEQ ID NO: 265228 - DNA, 320 bp, Homo Sapiens
  misc_feature (248)..(248): n is a, c, g, or t
gcatttttattttgttcacatagtagtaaatgtgagcaaagattttactctggaagaaatgtttgtataacatagacaatgccctgtacataagatatctgaatgtttccatgttttgaattaaactcatcaaaatccctcataattatctttaaacactcactgcacccatgttgccatccccaagttaaaatgaacaattctaaggaggccaaggctgaaggatcacttggggcctaggagtatgngaatagcctaggcaacataaggggggacccgtctctacaaaaaattttaaaatttagcccagacaccggggg

SEQ ID NO: 265229 - DNA, 494 bp, Homo Sapiens
aagacctgcattcctgggacccccaggagaacccaaggctgtgcacgaagactgctttgtgatgcatatatgtgcatgtacccagagtccaacaatgagtttgtacaaataactggggtcatcgggaaaggcaaagaaactgaaggcagagtcctaacgttgcatcttattcgagctggcagttctgttcacgtccattgccggcaatggatgtccttgtggtgatgatccttcagaaaaggatgcctctgtttaaaaacaaattgcttttgtgtccctgaagtatttaataagaagcattttgcactctagaaagtatgtttgtgttggttttttaagaagtctaaatgaagttattaatacctgaagctttaagttaagtgcattgatcatatgatatttttggaagcatacaattttaattgtggaagtttaaagcctcttttagtccattgagaatgtaaataaatgtgtcttctttatggaccaaggat

SEQ ID NO: 265230 - DNA, 395 bp, Homo Sapiens
  misc_feature (383)..(383): n is a, c, g, or t
gagagctcttcaatacctgaaagaatactcaccctcttcaacagtcagcaggttacccaattctgctgatgaatgatactggactggctcagagctcttcacatttgccagtggagggaaggggtcataatccgtggatgacaagtcagccagggtcagtatgtagtgactctgttgggtgtacgtgcttgagccacacacacagcagtgcaaaacctgtgaaaacagaggccatgtgcaccacggatgctactcaccgcgtgtgcccctgacaatctgttcaaactactgcagcacttggcagctaggactcctgcttggtactagctgggaaatggaatgaccactctttaaatatcttctttgctattaggcaaattttntttttggttcct

SEQ ID NO: 265231 - DNA, 1196 bp, Homo Sapiens
  misc_feature (47)..(47): n is a, c, g, or t
  misc_feature (115)..(127): n is a, c, g, or t
  misc_feature (203)..(275): n is a, c, g, or t
  misc_feature (484)..(484): n is a, c, g, or t
  misc_feature (496)..(496): n is a, c, g, or t
ataacccccaaacacttaggtggggaagccccaaggccaagatgaancccttgaaaccctagttgcctcaagacccaccctaagccaaaataggaaagaaccccttcctcctacnnnnnnnnnnnnntaagctgaaccgttgtggtacgcatctgtaatccccagctacttggaaggctgaggtgggaggatcacttgagccnnnnnnnnnnnnnnnnnnnnnnnnnnnnnnnnnnnnnnnnnnnnnnnnnnnnnnnnnnnnnnnnnnnnnnnnntcttaaaacataaacataacagaaaagtaaaaagatcattttacacagataaagtggcacaagttttgtagtattatattaaacctcatatttgaggtgttttcaaaatcttatccatgccaattttctaatgcttttcctaaagaagaactatattatagatttgtggactaatttcaaattgaaaatggcagcttttcccacagganacagggcaaganaaaatacaaagaatttaacaatccgtatgtttatttttgtagttaaaaaaataatgatgatgttttgtttgtttcatcttggtctaaggagttacagtaaattaaaaagtacagaaattcttttttcattctatttgttgaggaaaaatgaagtggacagataccttgaagaaaaaacctaatgaagcaaaattccaaatgtaaaattacttccaattacttaagctacatatccctaatgtaactagaacaagaattcacctgttctatgtaaggtaggtattactatatccatttttctgaagaaaactccttggctcagagtgtgtgaatgatgtctaaaatcacatagctatagtcagcaacagaactcaggtttgaacttgggctcatctggttttaaagcccagaacttttattatacttcattgactcccaacacggtaaaattaagatatttagttaaagaggtgggggctgagaagctgaaaaattaacaaagagatcaactaaaaaccaaaagcagtattttcctagcctgggcaacaaagggagatcctgtctctataaaaaatttttagaaatcagctggatgtagttgcgcacacttgtagtcccagctattcaggaggctgaggtgggagaaagcttgtgcccaggagtttgagattgcagcgagctatgattgtgtcactgcatt

SEQ ID NO: 265232 - DNA, 356 bp, Homo Sapiens
  misc_feature (34)..(34): n is a, c, g, or t
  misc_feature (71)..(71): n is a, c, g, or t
  misc_feature (243)..(243): n is a, c, g, or t
  misc_feature (317)..(317): n is a, c, g, or t
ccctgctcttcccatggggaagatgtgccttgtntccccccttcaacctttccgcctatgattgtaaagtncccctgaaggcctccccagccatgccgtccctgttaagcctgcggaactgtgagtgacttaaacctctttcttcataaattacccaatctcaggtagttctttacagcagtgtgaaatggattaagacatccctgtaggaaattgtttaagagtgccagttaggacagcagnaagatgcctgccacccacggcaagacggaaggggttcctggggaaaggtgggaagagctggatactctggtatnaattaaatttactcgtttgtaagttgggagagcagttta

SEQ ID NO: 265233 - DNA, 533 bp, Homo Sapiens
  misc_feature (251)..(251): n is a, c, g, or t
  misc_feature (267)..(267): n is a, c, g, or t
  misc_feature (356)..(356): n is a, c, g, or t
  misc_feature (381)..(381): n is a, c, g, or t
  misc_feature (389)..(389): n is a, c, g, or t
  misc_feature (439)..(439): n is a, c, g, or t
  misc_feature (472)..(472): n is a, c, g, or t
  misc_feature (484)..(484): n is a, c, g, or t
  misc_feature (509)..(509): n is a, c, g, or t
  misc_feature (518)..(518): n is a, c, g, or t
taaactgctctcccaacttacaaacgagtaaatttaattgataccagagtatccagctcttcccacctttccccaggaaccccttccgtcttgccgtgggtggcaggcatcttgctgctgtcctaactggcactcttaaacaatttcctacagggatgtcttaatccatttcacactgctgtaaagaactacctgagattgggtaatttatgaagaaagaggtttaagtcactcacagttccgcagcttanacaggacgcatggctngggaggcctcaggaaacttacaatcatagcgaaaggtgaaggggaaacaagcacatcttcccatggcagagcaaggagagatgagagangggggaaagtgccacacactttcanacaaccangatctcctgagaactcactgtcacgggaacagcaaggggggaaatccacncccctgaattcagtcatctgccaacaaggcctnttcccctcaganatggggattattatacaattcgggntgagatttngggtgggacacagag

SEQ ID NO: 265234 - DNA, 217 bp, Homo Sapiens
cccccttttaaaatcaacaggaaatgtttcaaaggagggatgaaatgcttcttggcttcctcagcacttgggcaaggtagacctcataggcaaccttgaattatgactttctttagtctctaggctatggcactatttaagtgcctcttggggtagaggtagagttaagtattggagtggccagtcttgacgtccgtatggcctcagtttttcttca

SEQ ID NO: 265235 - DNA, 388 bp, Homo Sapiens
  misc_feature (13)..(13): n is a, c, g, or t
  misc_feature (27)..(27): n is a, c, g, or t
  misc_feature (57)..(57): n is a, c, g, or t
  misc_feature (76)..(76): n is a, c, g, or t
tccccagtggggncgcggctcccttcncctctgttctctcccgggtctggggtcccnacaccccgtggtgccgagnccgtagatgaagtcaggtgggaggggagggagaagccttcactgtcccagggtcaggacgtgcacgggacactcacgaacgaatggcatgctgaggtcacgaggttgctctcgggagcccgggctcggcggctcctagcccatgaagcaagccggccccacttcaaatccaaatttctgtgacgcttcaccgaagtcattgaacatgatgtccacgatgggcacctgctccactttgggggtgtcgatctccagaaccgtcttctggtagcctttcttggtagcacagccgtccaccagggcgcggatgtag

SEQ ID NO: 265236 - DNA, 510 bp, Homo Sapiens
  misc_feature (50)..(50): n is a, c, g, or t
gttaaacaataattgccagtctgtgttcctaaaggtttcaaattgttttntcctctagtcccatttggatcattgtctctggtgaagcggatataggaatattaatttggcatagagatcttccttcctagctcccagttctcctgtctctcgaactaaaaaaatatctgtgcacaacttcaaaattcgatccacatttggaagctcttcaaacatgatggagtgagaaatcccactgaagaattcacggacaaatttcccaatcacaaggacaactgaagcatataatcccataataccatagccagccaggaaccccagacttgggggactgactttgtcattgaagaccaccagttccagggcctgagagttcggattgtatattctgtttccagtcaggttgagaacccaccactcactgttatatttagttgtattgtctctggacaaaatgatggtaatatccatgaaattattttcagataaaagttgctttataggttttga

SEQ ID NO: 265237 - DNA, 453 bp, Homo Sapiens
  misc_feature (53)..(53): n is a, c, g, or t
  misc_feature (99)..(99): n is a, c, g, or t
accccaacctaatttgccctctgaaacccctgcctttcccatttgaaagatcncctgaaatgttttccaaaagcacccgccccgggaaccaaaactcantaactggggggaaaaacattttaatccccaacgtaacaagatggtggaacctgccaggtaaccgcccacattggaggtccacagagtggaaagacagttcctggtttccctgactgctctgtaagttaagtttgggcctgagcaaggatgaacgactgagaaaacagtgtgcatggaatgaatccaactgccctggggtgtgcgatccttaaggaaggagggagcttattaaagggaagtcagggggtaaattacaacccacatcaggcagctatgaagggaaggacaaaggacgaatatgtgggagacaagttcaggtcccagcatgacctctaacttgccaggtgacctgag

SEQ ID NO: 265238 - DNA, 637 bp, Homo Sapiens
  misc_feature (358)..(358): n is a, c, g, or t
  misc_feature (435)..(435): n is a, c, g, or t
  misc_feature (541)..(541): n is a, c, g, or t
  misc_feature (575)..(575): n is a, c, g, or t
  misc_feature (622)..(622): n is a, c, g, or t
cattcaggaactggtgacccaatttgggagaggcttaggatacttttcttatttccttgtttgtctttggttgttgtacacttctaacatcttaggtttcttcttttagtttatattgaaaactttaaaagttaacatagtatgtattagaaaattaaactgtaaatatacagttattactgttgtctttttaaataattcttatcctcagtggtatcacttatacttgaatatcttttgcttaacgctggagaaaaactgtgaccagtttttaccaattaaaatcacatctcattacaatttcagtcttgtattaaatttgaggcagtgtgttataatgtaattaattgttggagcnggtaccggccaaccctggaattccaaggtccaggccaggtggttttttccttctggtaaaaattggtggataattangtcatagggcaaattcccttattacctgggtaaagaaagcttctctttctggaatcctggttttcccctaaaaccagaaattataatttttaaataatttttttcnatagagacagggtctcactctgtcacctagggcnggaatacagtgacaggatcatacctcattgcagcctcagccttccanggctaaaggtaatcc

SEQ ID NO: 265239 - DNA, 374 bp, Homo Sapiens
  misc_feature (244)..(244): n is a, c, g, or t
  misc_feature (255)..(255): n is a, c, g, or t
  misc_feature (313)..(313): n is a, c, g, or t
  misc_feature (320)..(320): n is a, c, g, or t
  misc_feature (328)..(328): n is a, c, g, or t
  misc_feature (350)..(350): n is a, c, g, or t
  misc_feature (355)..(355): n is a, c, g, or t
aattacaaaagacagtataatgacatatttcttcactgttctctcaactcatttaaaagcaaatgcatacagcaatttgtgtataattgtatttaggccctatgacttattagaatgtaatgtatatgatgataacagcagaaaggaggtgcatggcaacaaagctctattggagtgagtaagaaaaggacaccagatggtaaactaaattcacaagatgaaatgaagaaaaccagaaatggtnaaattaagganggatttaattattaattaaactcttttaaatgcttgtaggtcctaggctacttggggngggctgnggccgggnggattcgcttggaacctggggnggccngaggtttgcagtgaggccc

SEQ ID NO: 265240 - DNA, 516 bp, Homo Sapiens
  misc_feature (17)..(17): n is a, c, g, or t
  misc_feature (29)..(29): n is a, c, g, or t
  misc_feature (40)..(40): n is a, c, g, or t
  misc_feature (48)..(48): n is a, c, g, or t
  misc_feature (65)..(65): n is a, c, g, or t
  misc_feature (122)..(122): n is a, c, g, or t
cccagcccgaaataagnagccaacgttangaactctgccntcagtttnctttgccctttcccgangaccccagttaattggtacaaactccatgttggactctggtacaggcacatatatgncatcaacaaagcagtcttcgtgcacagcccttggattctccctggagtcccaaggaatgcaggtctccccagagacacctcaaagtactctccctactcctggggcatggggtgacttgaggaatgttgaaagccattctgaccacctatggcacagaggaagaactctttaatagggcagtcaagttctaaacccttttgccagtgattttataatcctatcatttccaaaaagctaatttcaggctctaaaagcctttattttacttctgatttctggaagtgaaagcctcctttaacccttgacatattctcatttcttggtttctgaaaggattctggggccaacagtgaataaacctggtaaaaggacacgaattctgaggtaagcccc

SEQ ID NO: 265241 - DNA, 459 bp, Homo Sapiens
aaccaattgagtgttctaagcaggacaggtaagatctgcgtctgacacagtcagccaggtctccttaccctctgctgccctttctgcctgtgactgaatgggcatgtcagggtctagtaggggatccaggaggaggaagcctcattaacttctattctgcagcaattgatggccacccaacttgaacagtgggggcttatcacctcatgtactaggaccagagatagctgatgccaaggttggctaaattagtagcttgagatgctaggtttttcatttgaggtttctatgctgctattgtcttctgctcttggtcacagaggctgccacaatctgcatgtcaagtcctcatgtgacaatatccagagacagcaaggaagaggtacagtgtattcctgcatgtttcttaaaaaaatgtttttttatataaaaaacacatttctaccatatatatatatt

SEQ ID NO: 265242 - DNA, 391 bp, Homo Sapiens
  misc_feature (27)..(27): n is a, c, g, or t
  misc_feature (51)..(74): n is a, c, g, or t
  misc_feature (253)..(267): n is a, c, g, or t
cactcccagcccgggcgacagaggganactcctgtcctcaaataataatannnnnnnnnnnnnnnnnnnnnnnnctaggaaacaaaaattattatatacttttctacctgaaaagttaggaaaaaggtaatgttagtgagcatggaaagagaagtgcgttcttatgcactgcaggtaggagaataaatcagtacatttccaggaagcagtttggtgatacatataaagaatctccaaaactatactgtgaccnnnnnnnnnnnnnnnttataatcctaagaatctatccttaaaacattattaggacttagaactcagatgttggattctgacaccattccctagtaaagagcctttcttcaaaggctcttggacgaaatgggtgggccag

SEQ ID NO: 265243 - DNA, 259 bp, Homo Sapiens
gttatctgttcatattgtgcctacttttatcagagcttacagttttatatctgtatgaagtgttcttatatttgggacaatgattttgctagcttatttacatttaaattttctttgtacttttactttacattcaagtatttgatgtttatattgagtcaaatctgtccatcctttcctttgtgatttttttcccattgctgtaatgcttagggtatatttttatagagcaataataaatattttagtgttaattata

SEQ ID NO: 265244 - DNA, 981 bp, Homo Sapiens
tcgggacaagacaactttctcctcaccatggtggctgagttctggaggctgtaatttcgtggatttctgtggagctggcagagctcatgtctgcagggctctgagaggaggaagcctgggcaggacctgcaccagtggccgctgggcacagcatggagcaccccagcaagatggaattcttccagaagctgggctatgaccgggagatgtgctccgggtgttgggcaagctgggcaagggcgctgggtcaacgacgtgctgcaggagcttatccgcacgggcagtcgcccgggtgccctggagcacccggctgcacccaggctagtgcctcggggctcctgtggggtcccggactctgcccagcgtggcccggggacagccctggaagaggacttcagaaccctggccagttctctgcgacccatagtgattgatggcagcaacgtggcgatgagccatggaaataaagaaaccttctcttgccggggaatcaagctggctgttgactggttcagggacagaggacacacctacatcaaagtttttgttccatcctggaggaaggacccaccaagagctgacacccctatcagagggatagggatgggaaatgagtggaggtccattctcctgggagcagctgccagggagtagctcagctcacctgttagtcatcccgattttgcccgacttccactccatctccaccaccagaagtgctccaagactgcagggcaatggctcccacctccactcccagccttctgcgcataatctgggctgtggttccctccatgctgcacaatcaatacaatcctctctgctttctgtcttcccaaagtatgtcaaaaccctgggtttgctgctgtccccaaacctacttttaacatgattatagatctccccccacctttcattacattggaactatgagaaagagggaatataaatacttgtgttcagttccctgtcatgaaaaaa

SEQ ID NO: 265245 - DNA, 374 bp, Homo Sapiens
gcggccagccccccgcgtgcatgcggggcagcatttatttgcacttgtgcacatagtagcctgtgaggtagcccaggatgaagatgatccagaagagggccacgccgcccagcaccttcatggcgatgcccagcttgcccgtgcacagcctctgggagatcctgcggcagcgtgaggcctcttctgtgctggacacagcccctaggctgaactccgtccctgctgccgtcctcccacctactatagtgggacgtggctctcctgggggctgcatgctgtggggctgcagcgggaggggcggggccttctcggtggggagatcaagacaggtggccaggctgtggcttcaccggagaaccttgcctgagggctgg

SEQ ID NO: 265246 - DNA, 1197 bp, Homo Sapiens
  misc_feature (173)..(173): n is a, c, g, or t
  misc_feature (1139)..(1139): n is a, c, g, or t
  misc_feature (1156)..(1156): n is a, c, g, or t
  misc_feature (1172)..(1172): n is a, c, g, or t
  misc_feature (1177)..(1177): n is a, c, g, or t
aaatacggatgcagtgctgagatagtttatgagacttgtaccatttcacaaactctgaaattgggttccatattggcaaggctgccacagttgttaagaataatcctctatgtttcttcctcacaaaaccatatctcatttatatccagaccattacttcactataattacanggacaaattattagcaagaaataagaatagtattagaagaattgatcctattttgaacccctctccagtatcttcacactcttgtcaactctccaggcctctctcttgccctgagttatcagcctgtgtggtgttaactaccttagaaggtacaagctaagaaatgtaacagtatcaaccctcccagttgcttaattatacccataggtaatacaaaaagctctgaagacccaaagatgacattactaatgatgtgatttcaggagccacagaagaaccttaccagcttccctcaaatcagtccttatcctctttctatcttcactcccatcatcatctattttcacactatccagctaagcaaagattcctggaggctgacttgtatcttcagactcacagagtgaattcagctcttctgaatcaagacccacccagtctctttcattcagacctgttgctaacaaatttatatttgccaaggatattaggcaaaagaggctacttgattggtggccaacctcgtgcccacatggaaggtatctttaatagggtcttttcaaaccttagtggaggagggtcagctcaatttgggcaatgcatttgttcccagtttcattttcttcctgggaattaactcgtcatttcattccttcagtcatcttctgtgtaggtgaccggagcactgagaggcagctctgatgcactattgtgtgtcagcagctcaaaggccctaaaacactgaaggttctgcatctgaagtattagattgttagcagcaaaatatgaaagatgaggtggacagtcctctaagccctatttaggggaagcttttccaagccacaatcttaactacctacccaaaggatttgcattacccccagattctgtgccaacaaccttttaagggaaatacagtccttggggaaatgagttttgatgggtgaattgggggtgtttaagggnaggggaaaggttgttcntaggtgggtaggggcntttgnaaattgccggggtttccgct

SEQ ID NO: 265247 - DNA, 564 bp, Homo Sapiens
  misc_feature (54)..(54): n is a, c, g, or t
  misc_feature (61)..(61): n is a, c, g, or t
  misc_feature (83)..(83): n is a, c, g, or t
  misc_feature (89)..(89): n is a, c, g, or t
  misc_feature (530)..(530): n is a, c, g, or t
  misc_feature (539)..(539): n is a, c, g, or t
  misc_feature (552)..(552): n is a, c, g, or t
cttgaagtagttccagaaaaaaacacaaaacctcaaaactgttaacttgacctnataattncctttctctttctttctttctntctttntcttgctttcacacaggtaagacctataacaacaaattgacaattacaaccaagttaaatcgaacctggaagggaggtagctgaaatctgtctcaaagaattattttcaacaaatagtatttaagcattggccaggatgggaataagaccaagagaaccgtctagggcagtgactcaatgtgttgaagccagggagtggcagctgataccctgcattttcaaagccctaccatctatgacaatctttcccttccttaacaccccaattcaccatcaaaactcatttcccagggactgtatttccttaaaagggttgttgggcacaggaatctgggggggtaatggcaaatcctttggggtagggtaggttaaggattgtgggcttggggaaaagctttcccctaaataggggcttaggggggctgttccacctcatctttncatattttngctgctaaacatntaattacttccg

SEQ ID NO: 265248 - DNA, 427 bp, Homo Sapiens
  misc_feature (12)..(12): n is a, c, g, or t
  misc_feature (30)..(30): n is a, c, g, or t
  misc_feature (48)..(48): n is a, c, g, or t
  misc_feature (112)..(112): n is a, c, g, or t
  misc_feature (187)..(187): n is a, c, g, or t
  misc_feature (260)..(296): n is a, c, g, or t
  misc_feature (298)..(298): n is a, c, g, or t
  misc_feature (363)..(376): n is a, c, g, or t
aaagatggccanggagggtagggcctttgnaaaatgccggggtatccngctgcccaccccccggcctcaaacacattgaagtccacctgccctaaacggttcctccttgggnccttattcccccaccccggcccaatgccttaaatacctatttgttgaaaataaatcctttgagacagatttcagnctaccctcccctccccggttcgatttaacttggttgtaattgtcaatttgttgttataggtcttacctgtgtnnnnnnnnnnnnnnnnnnnnnnnnnnnnnnnnnnnnngnaattataaggtcaagttaacagttttgaggttttgtgtttttttctggaactacttcaagtgagnnnnnnnnnnnnnntggtgacaaagctgtacagatagagataatagaagacaaagagattaaaag

SEQ ID NO: 265249 - DNA, 538 bp, Homo Sapiens
  misc_feature (436)..(476): n is a, c, g, or t
attagattgttagcagcaaaatatgaaagatgaggtggacagtcctctaagccctatttagggaagcttttccaagccacaatcttaactacctacccaaaggatttgcattacccccagattctgtgccaacaaccttttaaggaaatacagtccttgggaaatgagttttgatggtgaattggggtgttaaggaagggaaagattgtcatagatggtagggctttgaaaatgcagggtatcagctgccactcctggcttcaacacattgagtcactgcctagacggttctcttggtcttattcccatcctggccaatgcttaaatactatttgttgaaaataattctttgagacagatttcagctacctcccttccaggttcgatttaacttggttgtaattgtcaatttgttgttataggtcttacctgtgtnnnnnnnnnnnnnnnnnnnnnnnnnnnnnnnnnnnnnnnnnttataaggtcaagttaacagttttgaggttttgtgtttttttctggaactacttcaagtgag

SEQ ID NO: 265250 - DNA, 613 bp, Homo Sapiens
  misc_feature (12)..(12): n is a, c, g, or t
  misc_feature (23)..(23): n is a, c, g, or t
  misc_feature (37)..(37): n is a, c, g, or t
  misc_feature (46)..(46): n is a, c, g, or t
  misc_feature (73)..(73): n is a, c, g, or t
  misc_feature (85)..(85): n is a, c, g, or t
  misc_feature (489)..(489): n is a, c, g, or t
  misc_feature (526)..(526): n is a, c, g, or t
  misc_feature (533)..(533): n is a, c, g, or t
  misc_feature (566)..(566): n is a, c, g, or t
  misc_feature (595)..(595): n is a, c, g, or t
agggaccgagantatccttcaantgaagtgacctaanccgagatgnaatatagaaacccagtctcccatgtgnagattaagctgncccccagggaagcagagtgcaagagcagaagagccccaagcagactatgtctttcaagatgtacagaagactgacaacaggccagtgcagactttgcttcctccttttgtttcaaaggaccttatctacccattaacacttgttagagacacctcagtcgggccacaactgtctctgtttcaactttaagcccacacactctgtagcttttctaaaacagtacattccattcatgcagtagatatgaaggctttttccaagtttgtcatataaagtaatcaaattgttttcaccgtttaagacagttatttttaatgggaatttgctgttgcacaatttgagaaccagcccatttcataataaaagattaatgttgggcttgttgttaatattgcatctcagangtgttcttggtaggaagatctgttgaaattccaggtntctggancatagcacttggactgttgggccggagtttgtngcagcccatgcctagcgatgctgcacctnccatgatgtcctgggctt

SEQ ID NO: 265251 - DNA, 781 bp, Homo Sapiens
  misc_feature (59)..(59): n is a, c, g, or t
atgaacagtcttataataatgtgctgtgaatgtccaggatgggcgtacaggatgaagtntttcccgaactcctttgtcctttcgcacactgtctcacaagatcagtgagcaacatttggggaaactgttctggccttattccagctggctccagttatgcaagtctggaatgaaagctgggggtggtaggttctgacatccccaagcgctaacacccttgtccctgctttgtcccaggctggccctgcataactcccgtttcctgagtctctgctctgagctggatggtcgagtccggcccctcgtgtacaccctccgctgctgggcttcagggtcgggggctgtcaggtgagaatggatcaggacagacttggggctgagttggtctcaggacaaaggcagggattcagggagagaagggaggtcagaatgggcaccggggttgagaaaactgccagtgaggggattagaagcacctctgatctaaccggaattattgcttatttacccagggagtggcccccttctcagtaactacgccctgaccttgctggtgatctattttcttcagaccagggaccctcctgtgttgcccactgtgtcccagctcacccagaaagcaggtacgtggcctagcctccaccctctccatcttgttagtttcctctctcttcttcatcacacttagatacaccaagcagctctgtgaatgagatctctctacccccaccctcaatctccttgcttccagactgactctcaccttatttactttcacgag

SEQ ID NO: 265252 - DNA, 323 bp, Homo Sapiens
  misc_feature (222)..(222): n is a, c, g, or t
  misc_feature (251)..(251): n is a, c, g, or t
ttcttaaaaagatgaattcacagttgttaacacgattgacccagttgccacatcaaagggagtgctattcactgcagacatctttgttattttggaaaacattattatacgttatttcatttcaaagatggaaaatgtgtgtgtttactacagctttgggtagatgggtagtaaagtgtcttgtgactaaatttgtatattttgacaagtttttgatggganttaaggtatcttgttcaaatgggagtccntgtctgttataggtaattcaggaaataatataccttattttaaaccgtttaggcttctccccggtaattccc

SEQ ID NO: 265253 - DNA, 157 bp, Homo Sapiens
ttgtcctttgcataatgcatggcaaaatgagcctaaaacctatatggccattttaattttgcttttgtaataataccaagcccagtttctttcaacttgagagatgagctatttattcttttacttaatgaagatgtaagaaatgatcttctgttct

SEQ ID NO: 265254 - DNA, 383 bp, Homo Sapiens
  misc_feature (292)..(292): n is a, c, g, or t
  misc_feature (325)..(325): n is a, c, g, or t
  misc_feature (350)..(350): n is a, c, g, or t
  misc_feature (359)..(359): n is a, c, g, or t
cattaggctgctgattgtaagttatttccaataccactgatcttggtatctgccaagggcttccttgccttccctgggcagttttaggatttcaccctagtagggggtatgaggcactgacccctttattctggacccaaactgctttagagcagagttaatacctctccctccctcttcaaaacagctacagggaactgcaggcaccacatatgtgtgaggccacatcactgccaactattttccaccatgcactattactaggctacttaacaggccattttaaggagantcttcctaggccttgcaaaggtaggaattttgnggggatcaagttcccaaaaacccanggaacttgnccagtaaatggggggactttggaa

SEQ ID NO: 265255 - DNA, 516 bp, Homo Sapiens
ccgtgaggggcattaggctgctgattgtaagttatttccaataccactgatcttggtatctgccaagggcttccttgccttccctgggcagttttaggatttcaccctagtagggggtatgaggcactgacccctttattctggacccaaactgctttagagcagagttaatacctctccctccctcttcaaaacagctacaggaactgcaggcaccacatatgtgtgaggccacatcactgccaactatttccaccatgcactattactagctactaacagccattttaagagatctcctagcctgcaaggtagaattctgggatcagttccaaaaccagaactgccagtaatggtgacttgaatattttatttgatttttggtcagtaaccttgtcatttaaattggactttccaatagccttaacatggcctctgagaagtttcctccagaaaggtctttaagctttcgcttttcaataagtaagttctttactgcttttctactgctacttt

SEQ ID NO: 265256 - DNA, 558 bp, Homo Sapiens
  misc_feature (53)..(53): n is a, c, g, or t
  misc_feature (101)..(101): n is a, c, g, or t
  misc_feature (112)..(112): n is a, c, g, or t
  misc_feature (539)..(539): n is a, c, g, or t
tccggcacaggggaagacccttggccagcatgctgtccccacagctgtgactntacctgctccacttcagcggggactgctaggatgactgtagccctggncaccagcaaangattataactaccagctcaaggccataccagaagctgataaaatgttcacgtccttcctcctgctgcaggctcaaacccgcagacagctcctcccctactcggtatgaaggttcagtctggaatttctgcagcgtgaggttctccaaaggacagggagacccctctgtctctggccctcagtgccagccctagcagactccctgaaatatctgcctgtgcttttgcctgagctggggcctcccactggcccctgcagcggagtcccatgccctggcagccattggtcaagactgcagacaacctgtgtttgggggaaatgaggggcccaagagaaggtcagagctatcttgccagcttgggcaacatacgtcttagttatggccccactgtatagacaaacatcattgaacaacgagggactacagntctgagaaatgcaaaaaca

SEQ ID NO: 265257 - DNA, 574 bp, Homo Sapiens
  misc_feature (21)..(21): n is a, c, g, or t
  misc_feature (47)..(47): n is a, c, g, or t
gattctggagctcagcgagtnccagagggactatttttggtaccctnctagttccctggtaactatacactttttcccattccacactgtgcttaaatgacaaagactcttctgagaagcccaaattctgtccaagtattaactagagatattgttgattaaagaaaatctagaactgaagtgaaagaagagagttccagttctaatagtcttttgattaacaattcttttctgagaaatgatttttataagaaatggggtgattctttaaatgcttttcttaagttgaaggcacaacagttaatggctgtattgttgctattccgttgctgacatgtttttgataaagctttaacattcctgctactaattttggcggagagtgtttgccaggtttcaatgtgggctgcagctttttgtgctccttctctggtttgcagtgtaatgagttcataagctaaattttcagaaagaattttgtttaagattatgcctcttatctacttgagagcaacatgtcttttcaatcatgggattgacacatgaaaaataaagttatttcttaatcaaaaaa

SEQ ID NO: 265258 - DNA, 509 bp, Homo Sapiens
  misc_feature (24)..(24): n is a, c, g, or t
  misc_feature (69)..(69): n is a, c, g, or t
  misc_feature (77)..(77): n is a, c, g, or t
  misc_feature (87)..(87): n is a, c, g, or t
  misc_feature (102)..(102): n is a, c, g, or t
  misc_feature (125)..(125): n is a, c, g, or t
  misc_feature (130)..(130): n is a, c, g, or t
ctaaggtctcaggtttctaggccnttggaatggggccatgccagccccatagtgttcttggaagtccancattgggntgcgaaaacnggattccctgttctnacttaggtctgtggcacaggccngagcntggagccttcgcctgggggaccccacccttctctacccagcaacttccctgcctccctctagtatcgagtagtagagtccttgtgataggcctggataatgcccccacaagatatcccatgtacctaattcccaggactttgttgatgttgtcttatgtggcaaaaggaactttgcagaggtgcttaagttgaggattccgagatggagagatcaacctgaattatctggatgggctctaaatgtaatcacacgtgtccttataagaggaacccttgcttacagaagaacaagagatgtgatgatggaagcaacaggttagagagattcaagaaaagcatagccagccaagggaatgcaggcagcctccagaagctaaa

SEQ ID NO: 265259 - DNA, 378 bp, Homo Sapiens
  misc_feature (46)..(46): n is a, c, g, or t
  misc_feature (189)..(189): n is a, c, g, or t
  misc_feature (235)..(235): n is a, c, g, or t
  misc_feature (243)..(243): n is a, c, g, or t
  misc_feature (262)..(262): n is a, c, g, or t
  misc_feature (301)..(301): n is a, c, g, or t
  misc_feature (312)..(312): n is a, c, g, or t
  misc_feature (329)..(329): n is a, c, g, or t
cgaactcctcagctcaagcaatccacctgcctcagcctcccaaagngtgggtattataggcatgagctactgcacctagccatgtaatatttttaaaaagataaaacatagaagaaattttcttaaattacagagaattgatccagggggtccaaaatagaactactataactaatagtcattttagantaaaaacatatagggaaggacattttcaaagatacagatgaaattncctagganctgaaggaaatgggatttncagactgaaagggcccaccacacacagaggcacaatgantaaataaaganctacacatcgtgggcanttttcaggaacactgggtgccaaagagggggttctcaaagtcttcttgg

SEQ ID NO: 265260 - DNA, 467 bp, Homo Sapiens
gcatgagccgccacacccggcaatcacacctggatttttcagtgggaggtttttggtttggagacatccaaagcctgaagccaggtgggtgtgggcaggggctgcattttatgaaactgcccagcaagctgcgctccctggggccccaggatccacctaactggccctgcacctggtgccacgtgctctgccgccaggatatgcgccttcccacaggtgccctgcctgagttgtgtgcatccaggggcctggtgagcccccaggctggtggcatggcccccctgccccgtgctgaatgaatgtacagagccagacaaagctgtgaatggcctaggggctgagtcccacaccagctgtgaattctcctgcagacaggagggccctggctgtgcacctggggaagtggttgccctggggccagggtgcttgttctgttcaaataaaggtacctcttttccacaaaaaaa

SEQ ID NO: 265261 - DNA, 909 bp, Homo Sapiens
ttgtgattcgcgggctgtgattgacggcctcgctcccagcctgtggaagggccagggcccgggccccgggcgcagaaaactcggaggtcctcgaaccctggggagggcccgcagagccgcggggagggaaaaccactttgcctgtgggaagcccacaggatatttcaaaacttccggtgcgtcggggagtgctcgcttgcacagaagttggttctaactcctgtgctaccctcattctctctttcagagataagatttaatgttcatagcttagttttcctgttgggatgactttagaacccatctagtctggatctgctcctgtgccagagccagcaagaaatatttgagctacttgagtttgtacacagggctgagaatcctgcaggccgagcttagtaaattttggttgcgattgctgttgctactttactgcgaagggtatacgaagaaaagtttatatttgttgtcgttaactgggcattttgacaaccgttccattccccagtgtctttttacacgtaatgagtggcggagtcagatccagctagaaatcactgtagatggcaacacctgacttgtctggagttaacttagagttgtagagcggccttagctcattgaaaaaaacatcttggggtactagagagaaaaggcagtgggaagctaaatcatcctcagcagccaaaatcgacggcaaacaatgtatggtatttcttataggagggcctctagtgcttactcaggaagtccttattaatttacctgtaattctaattagtttagttacctggcttcccaggctgtaactaatggcattatattagaaaaaagcctggatagacgtccgaacttagccagtgaacactgacagcctgatgaagaaatttaaaactaccttcatacttg

SEQ ID NO: 265262 - DNA, 740 bp, Homo Sapiens
agaccgtaaaacactggcacaccacatagggcacttgtggtgggcagcagatgaaaacaatttcagtcgttggaatagagctgtgcccccctggaaaacggttcatgattacgatggtggcgagcttcgtggccatggcgggccagttcctcatgcctgggctagccgccctgtgccgggattggcaggtgctgcaggcccttcatcatcttgccccttcctgctcatgcttgctctactggtcgtgagtacactcttgcacagcgccctgggcttggtgcgactgcacattgcttcctgaaggcccggccccgggcaggacacacaatccccacacttcccactagttgcagcttgtggttctgtctgagaaggttttcctctctttttaaaaaattttattgtttaaactttctgtcttggaaaactgttcaaatatacacaaaaatagaagagtggaatgagcccatcacccagctccaaaaatctgcaaatgcactggccagtctggctcaccccttcttgctaccccacccacggggttattctgacatgaatttttatgaatggattgcagggaggtggaggtcttgtgttaggaggggggatttggagatattaaaggagtgatttacaaaagtccccctatctcttctaggcgaggggtgggcaaccttcagcctgtgggccacatcaggcccactgtctgtttttgtaaataaagttttattggaacacaa

SEQ ID NO: 265263 - DNA, 537 bp, Homo Sapiens
ttacccagagtgtttttctgtgtaaaaccacatcatgaaggagaaagcgacaaagggaatgtgaggggctggaagccacagggaggctgtctcttgagtccccaccactgatccagagccaaccaaggcacctcaggaaatggaaggccacattgcctctggatttggaaatcctcctgggtaatgtaactgaaacccaggttgatgccatgcagcaggagcagcagggggaacgtgctctcaggagaggtcggccaaccctccagcccaacacccttcaccacagtggtggaggaggctgcacccaggagatctttgtctcccttttggccactgatacctttggccttatctgacaacagctacccctcgatccttccctcccaccccaggggctgggcagctggctggagctttgtgtccaccttgctctggaggttgagacccccatctgagcaacatcctctctctttgttcctctgatcccttggcatcgtcacaaacccacaggtgcataataaaaacttgctgagtcaa

SEQ ID NO: 265264 - DNA, 383 bp, Homo Sapiens
  misc_feature (25)..(25): n is a, c, g, or t
  misc_feature (71)..(71): n is a, c, g, or t
  misc_feature (107)..(107): n is a, c, g, or t
  misc_feature (116)..(116): n is a, c, g, or t
  misc_feature (121)..(121): n is a, c, g, or t
tgctgcacggaacgtcatgcaagcnaccaacgccctggttttccatagtaaagttaggtcatctggttatncgtcagcacccacatgtaactatgttttcaccaaanaccaacatnaagantgaggggaaaggaccttcaaggagcaggaggcactgcgcacgggaggcataccccgtggagtgcgctgtgcccaccaagccgggcccccaggtcgtgccgcccccacctgcacacgtgtatgctgcatccagtactcaggtgcgccacgtcctgcgggagctgggtagcatttcattgtaagagtctttgattctgcccactgtaaacatttttctattgtatcataattgtaaatatatttttaaaaaccttggttaaaaa

SEQ ID NO: 265265 - DNA, 845 bp, Homo Sapiens
gctgatcaagacaaagctactccaaattgaacaacagttaatgtggaggtggcgccaggaagccgggagtctgttgaaagggtctgggaaagaaagctggggcaagggaccttgggaagccagaatgagggcacagcacactccacgacacaaactacccacgttgtcatgacaaccaaatgggcctgctgcccaaggtgatgtctgcttggtgaaatgcattgcagcctcaccaggagacagcctctggctgctttctgatatgttctgaggcttggctcatcagtaacctctgaagagaaataggggctgggaactcaaagggaaccaaataaaagccactgagcaagaacagaagaagagggagtaactacaaagggcatttgagttttgtaggtctccatccccacggggactctggccagggacagagcctcccatcacctgacaggaggcacagggagccctcctttcaaggacaggattctggctgggacagcagcacaggagctcacagtgccgagtggcctgcgaggtcacactgttccatctgtggggaggcagctgcctcccaaagcagtacaaaagcaagaagaagggtttcactcaagtggctgtaggtctgaatggcacacaggaagaagccctgagcagtcaaacagtaactgaagcttcaagttgggaggacgcacagacgcacagtcccaggctgaccttatctctgaagtcacgggtgttttggaattagccgtgcaaggaccagaggggctcttgctgggaaggccagtcaagatgtggaccccctccttcctgacataatttctactggaaagatctctgcaact

SEQ ID NO: 265266 - DNA, 560 bp, Homo Sapiens
  misc_feature (12)..(12): n is a, c, g, or t
  misc_feature (57)..(57): n is a, c, g, or t
gtatatgcaaanacctgtgagaccccccattcaggtcaaggaaaaccattgcctggnaccccaagggcccccatatttgcccctcccccatcacagtcctgcccttcacccctcaagcacggccctaaacttgtctgcactttagaaacaccctggagagcattgaaaactctgctgcctaaggtcagcatcaatcaaaacaatgaaatcaatgaaacaatgaaaccagagcttctaggtgtgtggcctggatagtggtagattcaaagctccacccacctcatcccaggtacatttgatgtgcagctgagattggggcacatcccaggtcatcgtcttctgtcagtcatttccctgctttcgtttgaattttaccattcttgtatgcagccttatacgacatagttgtgtttgcttttgagtgttagataaatggaatcctgtgtatgtgcttttgtgtcgtttttgtcactcagcattgtataatccatccttgttgggtcctggagttcatttttaatgctatatggtgttctgttgtatgaataatacctcaagtg

SEQ ID NO: 265267 - DNA, 321 bp, Homo Sapiens
  misc_feature (27)..(27): n is a, c, g, or t
  misc_feature (58)..(58): n is a, c, g, or t
ccataacctaaaccatccccgtggacnaacttggccccggtgctcggcgggaggtgangctacccctgggccctggtgaaaaaggcgggctcgacctgcccgtgaccgtgtcctgcacgctgttctaaagtctcagggaggtggtgggcggggcccttgccccctcagactctgaggacccctttctggatgagtgcccctccgacgtcctgcccgagcaagagggtgtttgcctgcccctgagcaggcacacagtggacatgctgcagtgtctgcgcttccctggcctggccctgccacacacacgggccccctcccccc

SEQ ID NO: 265268 - DNA, 312 bp, Homo Sapiens
accctgaaaaagcccacttaagggcattttgaacacgtggcttgcattgctttgtctttttgaaatcccgctgtggcaggccccaaaccttgcctttggtgggcttaaagtaaggtctggtttcccagtacaaaggcaaaggcaaatgaggattattagtattccattttgccctatggatattctcagtgctttctactggaaactcacaaccaattctgaatatgccacatactgtgtgatttgcccttgctgtccaaccctgttcttgctgccatttaaaaacaatcaggccaggtgtggtggctcatt

SEQ ID NO: 265269 - DNA, 485 bp, Homo Sapiens
  misc_feature (23)..(23): n is a, c, g, or t
catatgcccacataaaaaatganccctgatatagacaagtactaccttttcaaattctgaaaggctattaccactttaactctttgtgctcctccaaatagctttaaaatgtgggcttttgtgaagaccactttcaaacaagggagcactgaaacctgaattggatactgccagaataggtagttttgaaacaagttaaggacatggtatatgcactctgcattttcattggcagtgtgcccttaaagccctttcagtagatgagggttgtcagggaggagaaatgaagaagctatgttaatttctggtgagtaagacctggggaatgtttggcaatgacaaaagaaataaatgactctcagaaagatgtttctagtgttctttgacgccgacctgctgcatgactccttgacactgtatgggggtaagaagatggctagagatgggggtgagtttgaaataaattccacatgcagttgtctcag

SEQ ID NO: 265270 - DNA, 581 bp, Homo Sapiens
  misc_feature (491)..(538): n is a, c, g, or t
gcagcacccgccttggagcccctttcccgcctgcgagggagacctggcgtctgcccgctgctcgcagagtcacgttgccggcgattcaaagggcgaggaaaggatgaggaagcgctttgtggtctgaggcagcccctctgtcatgtggtgctccctattcctcctcctcgtcttcctcgtcttccccctcctcctcgcgcccggcagcaccctcgctactcaggagttctgtccatcctcgttttgtgtggctgactcagttctcgagcccccttcctcccatgcagaaaggggacagtgtggcaacccgcccccaacctctattcttggtgaatttaaaatgggggttcccagagtgggtgctggcaccccaggggacaccacacagaccaccaggctgcaggagggagacacaggccgtgctgtctgtgttatggagtgcaccctttaaaagttccgaggtggtctagccaggggcggtggctcacacnnnnnnnnnnnnnnnnnnnnnnnnnnnnnnnnnnnnnnnnnnnnnnnnactattctggcttggctaacgtggtgaaaccccgtctctacta

SEQ ID NO: 265271 - DNA, 576 bp, Homo Sapiens
tttaggtgaaattataggtaatctatgtatgtgctaatggggttggaaagaaccttacagagcatattacctgataaactggagtgggtttgggagaacaaactaataggattattgtgtctccctagttggtacctgggagcaattgacatgcccccttcagaaccttaactgttagtagcagtggctgtaacaacacaaaccagtgaccagagataacagcttttaggccaagctggctgacggtatggctgcaggaagtgactgagcagtagcggtactcagccagaccaagacggagagggaagagtccacagctttctggaagctaaggcattctggtggtagaaaagtgtgccccaagccttcatggacgagttataggtcttaagattagtctcctcttgtttggattccatacttgctaaataacctgataataacctggttttccatgtaactgcctctaggaagaaaatgtactgttcatgctgacacagatatttcagtctgcatggtaaaagttctaaatcttactacaaaataataaactggctggtttataatgtgaaaaaa

SEQ ID NO: 265272 - DNA, 952 bp, Homo Sapiens
  misc_feature (138)..(263): n is a, c, g, or t
  misc_feature (437)..(437): n is a, c, g, or t
ccagggcagacacctttcagggtggtctactaactgcacatggccttaagcacctgggcccaaatgctgcaacagacaaatgtagttcagtgattcttggctggagggtgattttattggcaatgtctaactcgcagnnnnnnnnnnnnnnnnnnnnnnnnnnnnnnnnnnnnnnnnnnnnnnnnnnnnnnnnnnnnnnnnnnnnnnnnnnnnnnnnnnnnnnnnnnnnnnnnnnnnnnnnnnnnnnnnnnnnnnnnnnnnnnggtcagataacaccaaccatatatatctatttcctggttcaagcaggaacaggaatgaatgagatgggaaatcaataaccaaggtctcaacaagcctggggatatcagattgaaagagaatttagtgtaagaaagaataaaatttggggtaaccctcagttcattatgcacacnaattcaaaatatgcaccaaatttaatgtgaaaacaaataatctagattgttccgatctgatcacatcattcccctacttaaaatgccttcagtagtccttcatgcctgagattaaatactatctcctaaacaaggcactctgaagcactttgtcagctgcctctggcatctctctctggcttcacctctctcagcctcctcactggatggtctcccatgacctcctgacttccctggcctcatcctccttgacctcttgtcagcagttgataaagcttcccccttccttggcatccaatctactggcctcttctgcttctccttttaccatgttgattactcctttcctttttctgcctttgttttctctttcttcttagttgtgggtggaccttagggagtggggcatgaccacattttttcttgtctaataccagatgctttcagtatccaggaaaataatgtacattagtaaagaggccaagtgcttgcatattaacatgtagaacttcttc

SEQ ID NO: 265273 - DNA, 489 bp, Homo Sapiens
  misc_feature (33)..(33): n is a, c, g, or t
  misc_feature (38)..(38): n is a, c, g, or t
tcactcagctctccctgggggtacctttggggnccccntagacgaaaagggaaggcctaataaatttggaaacggggcagcaaaccctcctgatggttccatccacattgggcacccccagccccttgagtaacctaagggtaacccccaggcacgagactgaattcctgagccccccaggtagagaaataaaaactagagaccttccctatcaggatgggagctaatattagaatatgatcccgattaacatcacttgcattttatctacttttgaaagccctaaaatctgtttgcttctgttatgtctagatgggcaagttcacaccagataattcattctacagcatatctacaggattaaaaaaacagctctaaagcttaaatttctattttttattcagttattaggagaaaaaagttgattaaaatgtcaaggtcttttaagtaactattaatttttgaatttcaatcatttttatttacctt

SEQ ID NO: 265274 - DNA, 599 bp, Homo Sapiens
  misc_feature (548)..(548): n is a, c, g, or t
ctgtctggagctttctgtggctcaatccctcgtattagagatttcttgcctatcttttagccccacctcctggaggttcttcacactcttctccttttgcttcatccactctggccactttcctcctaggaatattttaagtcccgcttagcattgggaggactatataaaccccaacatcaggatccttcagagaaggctaagccgtcatgaggtaaccatagacccaaagattggactcattcactccacacagcagtagcacttgttaccattcacgaactttcaaccaccagaatatagtgaccaccaaggaagtactttgtcactcctgcgacatttcttaccttggtctgcgcacagagttacctggccaccatagtgttgcaagtctttttctccccacgttgttgagagtctggggttattcatcagaccaggtgggtctcgattccttactcatgaggccactgcaacaaggcagtgggatgtgtctcctcacaagaggtgatcaaaagaccctttcccggaggacaatggttttcccnggtatgggccaccaattttgttggaaacaaatgctcggtgctgcaagaaga

SEQ ID NO: 265275 - DNA, 619 bp, Homo Sapiens
  misc_feature (482)..(502): n is a, c, g, or t
acttgaatagcacacaacagttctctaagggtcagtttccaaagtaattcctaatatttaatgaatttttaagtgatagaaattgcagtaggaaagtctagcttgaaatctaatttgtgttaggttgaccaggtgacaaccacccacccctgggattctgctcagttaggtcagacctgggggccagttgcccatttaggcatctcaggcctcaggatcctcatttattaaacctggggttttgaactgcggtctccacgatcactgtcagctctccttagtcagttggttgttctaaatgtagtttagtggccagtaaacacctgttcctgagtgatacatctttaaggagccggtagatgggtcaacctggctggacttgctttttcaagtctgccttgtctattagaaaggctgagcttactgattttgcctgtcacgtttgagtgttcctgggcaacagaacaagaccctatcttagnnnnnnnnnnnnnnnnnnnnngggacaacttacaactctgtgccctgatgtagaaccatctccaaaatatattaaatgagtgtgggatactatgcttatatgcgattgtgtgtatttaatggcttcctaagaaaacaa

SEQ ID NO: 265276 - DNA, 1259 bp, Homo Sapiens
  misc_feature (703)..(703): n is a, c, g, or t
atttcggcacgtgcgaataaactaagaaaaaggtaagaactgtctcaaaaacgaaagcacaccacccaagacacagtacccagtcatggtttccccatccaactattagtttcatactttgaaaacttactttcagattattctcaaagaacacagtagcacctaaatctgttttcaattgggcttaaaaattgacatgcaatctcttaagttttttgttcagctacttcacactgagtacctcaaatctgctctggagtcgattatggccacctgtgtgtcaggatgcacctgaaagccctcggttcggtccttagaccatcttcctacattacctggaagggagctgccatctgtccctctgcagagggataccttccaatagtaaattatctggttcctcactgaaacaagttatttttgcttcatatagtcagagtcagactgacatgataaaatatcatgttcctaatctgttgtctcagataagtgaccaagacgggactttccacattttagtctacattctaatcttaaaggaataaacgcactgaattgggactaacattctgataggttgcacccttaagagtattcagagagcatcaaaaggagcccacaccttcagcagtgaaggattctaacacagggaatctgcagtttgtagcagaatggtattttcctcaagtagctcataatactngccaaatctcaaaagttaagctgaatttcacaccagatcctacccctttccctgagccacatgtttcacacaagtgtagaaaatgccagggatccaccacaagatggagatggtcagcaccaaaccgattctgttcctctttaaagtgtatattagccacttagcaatctctatattctttcaagtaaccaagctgttgactttcttactacttgcagtagcctgtccccaacttttccatccagtgctttaacctaaaaaactccttaactctgccttgacctgaggaagaccatgctaactggtgttattttgtatgtaccctgtgcttaattctataacagtaaaccccatacgcaggtgggagggaggaacaccggtgcctcggtcactctgggggcagtttagatgctgtgaaattaaacctgttctaagtgtacttgtttgaattaattgtattgtaatattatttgttgaatgtagtaattaggtatttatgaatatattgctgtaatttctgacaacatccaaaaaataaaatcttcctaaattaaaa

SEQ ID NO: 265277 - DNA, 391 bp, Homo Sapiens
  misc_feature (347)..(347): n is a, c, g, or t
ttaatgagaaattcacttacaaaaaaccaactggctcaagtgaatgggatcaaacccaacttgttataaggtcattagtatcaagaattcagatacagagtctattctaacataactgtttttaaaaaatttttgaacttcaaaaatttccagtcactaaataaaatgcattcaatttaagcccaggattgcttaccaagcccaaacattctttattttaacacttcaggtccgctttctgagatttcttggtacctgctctttagcatcttctttaaccttagctcatttcaaatttttccatatgtggctatctgtgcttaacatttatggcatgtgatggttcntattatacagtgggagtccccactgtggggtttacctgggcatt

SEQ ID NO: 265278 - DNA, 276 bp, Homo Sapiens
ttatatttactgcatgtggaaaaatatagtttagtatgcatcccctggtgttttctaagatgtagtttttgaaaaatttttgaaatgtattacatttgtagtttttctccgatataaattccctgatgttgaacgaagtttggagcaactgcttcggatacaaaatgtgtacaataagatctgtgatacaagtaaggcaggcactacaaccctctttatgtttctaatgtttgtcttcaaaataaaaactctttttttactttaaaggcttatatt

SEQ ID NO: 265279 - DNA, 372 bp, Homo Sapiens
  misc_feature (35)..(35): n is a, c, g, or t
  misc_feature (42)..(42): n is a, c, g, or t
cccaaatttgaccccattgccctaacagattgggnggttatntaatttaatccagttccagccctgtgttttgggcattaaaatagataatatccacatgatttgttcattcattaccttaacaattattaggagccctattatattcctaaagtctgcgctgggtatgtggcatattaaatgagataggacttccctttaagtacatcattgtctaatgatcacacaccaaataattgtactataccatgataagtctaggaatggagatgaacacaaggtttgtcatttatattagtgtatttttacaagaccaaaaagtgtttttctatatgagttgtatcttctctgttgagaattctttctgcattc

SEQ ID NO: 265280 - DNA, 387 bp, Homo Sapiens
  misc_feature (29)..(29): n is a, c, g, or t
  misc_feature (42)..(42): n is a, c, g, or t
  misc_feature (46)..(46): n is a, c, g, or t
  misc_feature (51)..(51): n is a, c, g, or t
  misc_feature (64)..(64): n is a, c, g, or t
  misc_feature (71)..(71): n is a, c, g, or t
  misc_feature (74)..(74): n is a, c, g, or t
  misc_feature (78)..(80): n is a, c, g, or t
ccgggggccccccaaaaaccaaaaccccngcccggcgggatncccnacccnagacaaggccccncatatanaantatnnnttttaccatatatatgcccctgtatatatagttgtacatatatgtgtgtatatatatacttaaatgtaatatttacaaaataaaactgtgatctcgtctagagaaaatgtattcatattacaaactgctcttccatatttatgtaccatattatacctttttattattgttataattattatgggtatttctaattaatatgatgttgaaacctgtttggcaccttctggaagctaccaaaaaaatgacactccattgaagtgcttaaaagctgttctcataagaattctactggcctattgtaaaa

SEQ ID NO: 265281 - DNA, 484 bp, Homo Sapiens
  misc_feature (247)..(340): n is a, c, g, or t
  misc_feature (396)..(396): n is a, c, g, or t
  misc_feature (465)..(465): n is a, c, g, or t
tacaataggccagtagaattcttatgagaacagcttttaagcacttcaatggagtgtcatttttttggtagcttccagaaggtgccaaacaggtttcaacatcatattaattagaaatacccataataattataacaataataaaaaggtataatatggtacataaatatggaagagcagtttgtaatatgaatacattttctctagacgagatcacagttttattttgtaaatattacatttaagnnnnnnnnnnnnnnnnnnnnnnnnnnnnnnnnnnnnnnnnnnnnnnnnnnnnnnnnnnnnnnnnnnnnnnnnnnnnnnnnnnnnnnnnnnnnnnctgcagacaggttattgattatagagacccaagaaagcaactcaataattggttcnaagttttccccactgactggctggtgtgtagtttaagaagcccccatttggttgcactcagaatggccntatcctcctttaatgggac

SEQ ID NO: 265282 - DNA, 691 bp, Homo Sapiens
  misc_feature (28)..(28): n is a, c, g, or t
  misc_feature (35)..(35): n is a, c, g, or t
  misc_feature (87)..(87): n is a, c, g, or t
  misc_feature (92)..(92): n is a, c, g, or t
  misc_feature (346)..(439): n is a, c, g, or t
tgggcaaattggacctaccccttacccngtcctanaattgggttaaaagctgattacggccctacaatggtcaaagtcagcctaacngtcgnctaccttaagccttcgggtcatttcccaacttatagaggaagggagtctctaaaatcctctccttcagaaggcacctcacttctcagacttaaaattcccacatcaagtgttccattaaaagaagataaggcattctgagtgccaaacaaatgggggcttcttaaactacacaccagccagtcagtgaggaaaactttgaaccaattattgagttgctttcttgggtctctataatcaataacctgtctgcagnnnnnnnnnnnnnnnnnnnnnnnnnnnnnnnnnnnnnnnnnnnnnnnnnnnnnnnnnnnnnnnnnnnnnnnnnnnnnnnnnnnnnnnnnnnnnncttaaatgtaatatttacaaaataaaactgtgatctcgtctagagaaaatgtattcatattacaaactgctcttccatatttatgtaccatattatacctttttattattgttataattattatgggtatttctaattaatatgatgttgaaacctgtttggcaccttctggaagctaccaaaaaaatgacactccattgaagtgcttaaaagctgttctcataagaattctactggcctattgtaaaaaag

SEQ ID NO: 265283 - DNA, 445 bp, Homo Sapiens
tgcctcccaagatcctggaatatgaccaaggatgcccccactgtcacccactgttattccaatgcagtacctagaagtccctagctagagcagtcagaccaagacaaggatataaagggtatcccagattggaaaggaagaagtccaaattatccgttgtttaccagatggtgtaattttatatttggaaaaaccctaaagactcccacaagaaaattattagaactggtaaattccagtgaagcctgcaggatacaaaattaacgtacccaaaatcagtagcatttctatttgtcaacagtgaacaatgtgaaaaagaaataaaaaagtatcccatttggaagccacacataaaataaagcacctaggaattacccaaataaatgaaaggtctctataatgaaaactataaaacactgatgcaagaaattgaagaggacaccaa

SEQ ID NO: 265284 - DNA, 327 bp, Homo Sapiens
  misc_feature (93)..(136): n is a, c, g, or t
agtatttgcccggggggaaaaagatattgtattatcatatatgcttttttgcaataaggatttattctcagaacaccaagtaaatctatctcnnnnnnnnnnnnnnnnnnnnnnnnnnnnnnnnnnnnnnnnnnnnagagcctgttttaaaaaatccagtattatttagtaaaattatctgttctatggaccaaatgtaaaatatttataaatgaagatgcattttaaatgtctataaatggtgtcataactagagcacgggcgttatgtaagtttctaagaatttagaggataaataataaaggttctatgatatacaaaaaaaat

SEQ ID NO: 265285 - DNA, 442 bp, Homo Sapiens
gggaatccgaggccatcaaccttggtgacagcagcgcagtgccaatgctgatcacactgccatgggagattttgttaacgtctgccacccccactctcacccccaagctctaagcccccgggagccctggcctgtcttcctcatctctgtagcacccaagccctgatagatctgtatatggtaaacaggggtttaaccacatgtggttaacatggattaatgtgggaatttggcttcaagaacacaaccttaggaccttgggccccaaaagctggtggtgaaatgagaggagccaatttaagaagacccttatggagacctgaggctgcagaaactggtaggtttcatcaggtggttaaagtcgtcaaagttgtaagtgactaaccaagattatttcattttaaaaccacagaataaaaatgacacctgagcttctctaaaa

SEQ ID NO: 265286 - DNA, 466 bp, Homo Sapiens
  misc_feature (56)..(182): n is a, c, g, or t
  misc_feature (272)..(272): n is a, c, g, or t
caaaacttcataagacagacaccattgttatgcatattttattttaccaaatagtnnnnnnnnnnnnnnnnnnnnnnnnnnnnnnnnnnnnnnnnnnnnnnnnnnnnnnnnnnnnnnnnnnnnnnnnnnnnnnnnnnnnnnnnnnnnnnnnnnnnnnnnnnnnnnnnnnnnnnnnnnnnnnnatagatgatgaaactgaaatccagagagtgagagtaatttgcccaaagacacacagctaaaagtggcagagctacggatttgaacccagngctggccggctggctctactcattacacgtcactgcgttgcctcctgaagcgtgtgtcacgaccccactgttaaccacgaccttgatattccatctctccaaaaaacagttagacgtgcctctttgtggatcttgacctttagttacatttcttttcccagcatcttcaaagtctcatctgccttcctcatctc

SEQ ID NO: 265287 - DNA, 401 bp, Homo Sapiens
  misc_feature (129)..(129): n is a, c, g, or t
  misc_feature (352)..(352): n is a, c, g, or t
aagggccacggaaccccaggctttagagccctcagcaggtctggggagctagagcaaaggagggacctcaggccttccgtttcttcttccagggtggggtggccctggtgtccccctagcctcccaaancccaggtggcctgcccgttctccccagagggaaggcgcctccgcccattggtgctcatgcagactcgtggggctgaggtgtccccggggggtgatctctggtgctcacagccgagggagccgtggctccatggccagatgacggaaacagggtctgaccaagtgccaggaagacctgtgctataaaccaccctgcctgatcctgcccctgcctgaccccgccnacgccctgccgtccagcatgattaaagaatgctgtctcctcttggcaaa

SEQ ID NO: 265288 - DNA, 298 bp, Homo Sapiens
tgagtaagccctactgagggtttacctttagaacagaacaagacagtagcagggcgcagatgtattaagtaataggatgaaggaagaggggagcctggcaaatcctaattaggtaggaggaaacataggaacccctgaaagtggccctgataccttcaatttggtcatttaaacattggcagacactctgaggttttcattggcgttacagttcagcatgacagaaaggcgagcttttctagcattcagggaagcaagcacaacgcaaccttcctaagtggcagcacctcttaagacc

SEQ ID NO: 265289 - DNA, 427 bp, Homo Sapiens
  misc_feature (64)..(64): n is a, c, g, or t
  misc_feature (78)..(78): n is a, c, g, or t
  misc_feature (287)..(298): n is a, c, g, or t
aaccctgtttaacagtttgggcaaaagttgcagtttgttccttgtttttagtttagttttgttntggtgttttgatancctgtactgtgttccttcacagaccctttgtagcgtggtcaggtctgctgtaacatttcccaccaactctcttgctgtccacatcaacagctaaatcatttattcatatggatctctaccatccccatgccttgcccaggtccagttccatttctctcattcacaagatgctttgaaggttctgattttcaactgatcaaactaatgcnnnnnnnnnnnngtatgtattcttcactactgagtttcttctttggaaaccatcactattgagagatgggaaaaacctgaatgtataaagcatttatttgtcaataaactgccttttgtaaggggttttcacataaaaaaa

SEQ ID NO: 265290 - DNA, 355 bp, Homo Sapiens
ggggccagcttctctgtgtgtgtgtgtagcctgtctcctagtctgcctatgtctttctctgctatatgtttctgtcctgctgtctgtcaaaagtctcacagagagagggcctcagggagctgctgaggggtgctgagcctggctcagggagctgggacccctcccctccaacacacatactcacagtgctttcctccttgtccctcctacactaggagcaagaggagggggctccaatgacactccggggttttaagacccaaggcacattcaatgcaaggggagcaaggatgggacaactccatcttctgctgcccatgtgaaaaataataaaaatcaagagccattgaaaaaa

SEQ ID NO: 265291 - DNA, 735 bp, Homo Sapiens
  misc_feature (45)..(45): n is a, c, g, or t
  misc_feature (245)..(257): n is a, c, g, or t
aggcatgagcggattacaggcatgagcaccgcgcctggcctgagntaaactgaaatgtttgccaaagatttgttggaactggtattttgaaatgaaagcatcttatactgtgtttagaacatactagatggtccatagttggaagctgctatcacaatattactactgttatagcaaattcagagattcacactgaatttggttcccacaattctgcattactttcgaatagttggtaaaagaannnnnnnnnnnnnaacagatacatgaaaagcaaagaatttatgaatgaaatcttctaaggatgggctgccaatttttcaggtgtacacagaaatgtatttctctttagaacagtaagctggggagatgaatcacctctggtgcagaccttgcttgggtggccaagccaacaaaccctgcatcattaatctaaatgcatacttggccttctcctgaatcactttgataagaacaatctgcaaaggtgacactgatgagggccttcaaaccaaagaatttccatgtgtcccaaacacctcaagttttctgacaacaaaagctcttctccccactttttcaaagaagccctttatgtttttctcagaaaactgctggccttgattttcaatctaattctaatcaatggtgtttgcaaagtcaggaaaagcccgctaaaactggctagagacctttctgtgggagcagcaatgtgattatgagtgatgtaactgg

SEQ ID NO: 265292 - DNA, 497 bp, Homo Sapiens
  misc_feature (16)..(16): n is a, c, g, or t
  misc_feature (63)..(63): n is a, c, g, or t
  misc_feature (141)..(157): n is a, c, g, or t
  misc_feature (288)..(288): n is a, c, g, or t
  misc_feature (329)..(447): n is a, c, g, or t
aattccacttattggnattaccccatcaggataaatcaagtacatcaggagactcaaatagtnccaaaagaggtgcacaaactgagaatgcacaacaggttatgtaaaattaaacattaatacagaaaaacacaaaagaannnnnnnnnnnnnnnnnagtgctgtcacaatgaaatgtgcagagatttgtatatgtaaaactaaaataggttagccaggcatggtggagcatacctgtagtcccaactactcaggacgctgagacaggaggatcatttgagcccaggngttcaaggctgcagagagttatgatcttgccacctcacacnnnnnnnnnnnnnnnnnnnnnnnnnnnnnnnnnnnnnnnnnnnnnnnnnnnnnnnnnnnnnnnnnnnnnnnnnnnnnnnnnnnnnnnnnnnnnnnnnnnnnnnnnnnnnnnnnnnnnnntcttgtcttcaaaatgaatgaataaatgaatgaggcgaattgaatgaaaa

SEQ ID NO: 265293 - DNA, 141 bp, Homo Sapiens
tattttaaactttttgagggaaactccatactgttctccataatgggttgtactgattgacattctcaccaacagtgtacagggggttcctttttctccatatcctcaccaatacttgttatcttgtgtcttattttattt

SEQ ID NO: 265294 - DNA, 292 bp, Homo Sapiens
  misc_feature (158)..(158): n is a, c, g, or t
gacaaggtgtgagccaccgcacctgaccctagtaagattcctgagctgtttccatttgctttcaccaaaggagaaagacaggatgcgtagaggccaccatgagcctccacgtcagtcctttaccctctctgtgcatgaacacaagcccatcccagggncagacagccacacttatttcagtaggggaggatagtcctcaaaaaattccaggggatttctttcctcttacaaaaacctaggaaaagtgaccgcacaggcaacacaacgggttcagggccttagattggttttc

SEQ ID NO: 265295 - DNA, 339 bp, Homo Sapiens
  misc_feature (87)..(209): n is a, c, g, or t
attataatgaaagtaatagaaggaaggaaatagacaaaagcacaactatgaagaagcagaaaattaaaatagaaaacattaaaagannnnnnnnnnnnnnnnnnnnnnnnnnnnnnnnnnnnnnnnnnnnnnnnnnnnnnnnnnnnnnnnnnnnnnnnnnnnnnnnnnnnnnnnnnnnnnnnnnnnnnnnnnnnnnnnnnnnnnnnnnntgctaaaaaatagataatagaatattaacgattttatgcccagtaaacttttaagtttaatggacagatttccttgaaagctcactcaacaaaaaataggcaaccctggcccaggcgtggtagcctcaca

SEQ ID NO: 265296 - DNA, 572 bp, Homo Sapiens
caggctggactcggcccgagcagtgtggagcgaatacagccccgctttctctcactgcggtccacacgcgcagccctgcagggaatggagggaggtcactgagcaagtcctttgctctgtgtaaaaatgacgtgaaaggctgatcctgaaagtcattaggtgtcctttccatgaagttgtgccttcctcagaggcaagggggtggagagaaaaaggagcactttcaggcagaagccaagcagaacctgccacagctctgtcgtctggactcgccaggcccaggccacggccctccgggagcacagccgtccctccccgaacacagccgtccctccccacctgccccgccccgccccacccagagctgctgtcctcctctctctgccccgctcagctgttgctcgctcattccttaggtctcgggtgcactctctgccccctggtatgggaagaacttggcctcttttatccaccgcttcatctctgctggccagaacgggctggcatctcatagagcctctgtagaagcctccatgcaggggatgagtgatactcaatgtgaattaaaaaaa

SEQ ID NO: 265297 - DNA, 585 bp, Homo Sapiens
aacagacagcatcaactgggcaagtggtgaggatgaccatgtagttgccagagcagaatatgattttgctgccgtatctgaagaagaaatttctttccgggctggtgatatgctgaacttagctctcaaagaacaacaacccaaagtgcgtggttggcttctggctagccttgatggccaaacaacaggacttatacctgcgaattatgtcaaaattcttggcaaaagaaaaggtaggaaaacggtggaatcaagtaaagtttccaagcagcaacaatcttttaccaacccaacactaactaaaggagccacggttgctgattctttggatgaacaggaagctgcctttgaatctgtttttgttgaaactaataaggttccagttgcacctgattccattgggaaagatggagaaaagcaagatctttgatatctttcatgtttgcctgcagttgaacaatactttagagtactttttaaaattatttctcacaaagaaatgaatgtacaatccaatgaaaacatttgttattggctatttcaggtgttttgctgctagaaattattaaagttacacactattat

SEQ ID NO: 265298 - DNA, 459 bp, Homo Sapiens
  misc_feature (155)..(155): n is a, c, g, or t
  misc_feature (190)..(190): n is a, c, g, or t
  misc_feature (324)..(324): n is a, c, g, or t
  misc_feature (366)..(366): n is a, c, g, or t
  misc_feature (404)..(404): n is a, c, g, or t
  misc_feature (414)..(414): n is a, c, g, or t
  misc_feature (429)..(429): n is a, c, g, or t
  misc_feature (443)..(443): n is a, c, g, or t
tatattgcaaaactgaggtttaaaggacaaatacattatccatttaaaaacagatatctaagacaaaataactcaaacattctgaggtcagatacttgcttatgcacactgacatccacaactgctaccggtgcggaagaacgccaggtcctggnttctgtatagtcacagccgagctgaacaccttagnctccgacacctgggatgtgttctagagaatgacaggctgagactgtagtttggtttaactactgggctttgttgcaataatcctcggaataccacacagtggccaggcttttgggcattcataaaaatggggancataactgaaggggaagggctttcacacattcacaaagaccngggttgggttaatggacttaaatcttcactacatggantacggcattnttaatttactgtggnttttcggccttttntcgctttctgtgtagg

SEQ ID NO: 265299 - DNA, 385 bp, Homo Sapiens
aagccactggagttcaaagtctggctctcacgtcagttaagcacaggccagattccctttctctcccctcccacatagctctcacctcctctggcctttttgctgatggcagaggtgtgctcctctttcttctttccaagggtacttcctcaaccctgctacagtccttatcaacacagcattcattctcagggaattgaaagctccaagtcaccctcgttactggctccttccatcaagcagacacctcacctaacctggaacatcctttccaccatgctctccccttcatcaagctaactacctctgctcttttccattgtttcaaaacctcttgaaatgcagcagaaaggaaaaggaataaacatttattgagaacctaaaa

SEQ ID NO: 265300 - DNA, 405 bp, Homo Sapiens
gctacatggggtggggtcgtagggaggctgtttgcctccacgtctaggaaggcctgtgagaggagcagtcaggacttccggacaacttaagtcggccctacttgggcccaagtttcagaatagtgttcccctatcaaggctgtgactagatcaggcagggatccattccctgtcccctgcccactaccttcaggccatttagagttgtaaatttacaaagatccacggtgggctccagctgccaagccacccaagggagtctggccctaggcctagccccatccctccccatgaggggccaagacactgcctaaggtgtgggagggactggctgagattgcagcccatggtaggagctggaccaactgtatatagttttcaataaactttttccttttctgttaa

SEQ ID NO: 265301 - DNA, 756 bp, Homo Sapiens
  misc_feature (454)..(454): n is a, c, g, or t
  misc_feature (461)..(461): n is a, c, g, or t
cgacttcccccctctctccgaggagctgatcagcaagatgatccgccacccgtatgagacccagtctgacagcttctacttcgtggatgaccggctggtgatgcacaataaagcagactattcctacagcgggacaccctgaccccacggctgccctgaccccaggaggctccagttctgggctgggagctgtgacctccccaacgctcaccccttcaaccccaagtcctctgcttggggagttctccaggagctccggaccctgagtcaatgttgggaggaagggtacctgggtgtccccagtcaagcccatgaagcccatgcggcctgctgacatggggtggggtcgtagggaggctgtttgcctccacgtctaggaaggcctgtgagaggagcagtcaggacttccggacaacttagctgggccctacttgggcccaagtttcaaaagggnaaaaaanaatttaaaggtggtttcccctatcaaggctgtgactagatcaggcagggatccattccctgtcccctgcccactaccttcaggccatttagagttgtaaatttacaaagatccacggtgggctccagctgccaagccacccaagggagtctgggccctaggcctagccccatccctccccatgaggggccaagacactgcctaaggtgtgggagggactggctgagattgcagcccatggtaggagctggaccaactgtatatagttttcaataaactttttccttttctgttca

SEQ ID NO: 265302 - DNA, 196 bp, Homo Sapiens
aaataaataatttaactcttctaataatgttttgttgcaggaaatgtatttcagataaaatatggatttgaaaaacagaaaatatactttatgttctgaaatttgtatttaagtataaaatgtgaatcatcttgtctaaaatacttacagcatagttggcttaaatgaaaataaaatgatatgcttatacatttta

SEQ ID NO: 265303 - DNA, 499 bp, Homo Sapiens
  misc_feature (80)..(80): n is a, c, g, or t
  misc_feature (131)..(131): n is a, c, g, or t
  misc_feature (145)..(145): n is a, c, g, or t
  misc_feature (204)..(204): n is a, c, g, or t
aaaggaaagccaagctcccaaaaggactttaactgaaaccgtactgtgaaatatgcccaaaatcccaaaaaccccaggtnaaggtcaaaacccccactgccctgaggaaaaagggctggatgcaagggccnagctcaacctgaanaatccccctccccactcggcctttccctgtggggccttcacccagcctgctgggggcanctgtcgtgcacttggctgcgtggctggttctattggccctaggtgctgctctgttgggtgggatgggagggggtagagggagccaggagcactgggttctccctgagaacactgggcacaagagtactggcctcttctatccctggcactgtcctttgcacttgtttggtggccccaatgtgagtcgctgtaaaaaatgctgccgttactattttctaagaaatgacttttctgtgaaccaacagtaacaaaaacctcagtaaccaaaataaagttctatattttaaaaaaggca

SEQ ID NO: 265304 - DNA, 734 bp, Homo Sapiens
  misc_feature (22)..(22): n is a, c, g, or t
  misc_feature (299)..(606): n is a, c, g, or t
  misc_feature (608)..(648): n is a, c, g, or t
  misc_feature (652)..(652): n is a, c, g, or t
tctctgctctgcaccccaaggnaggcctgtcaggaggaggtgggctttccccaacgctgccctcttgacccttggagctctcccaggattccccagatttccccagcgcccctttggcactgtgtctcctcctctttgccctgcctcctccctgtcccaccaccacctcctcaccctgtctatccctcctcctctttgctctggcttccttgccaccaggatcttttcttaacttttttctttcctagtaggagacaatgggctgacaacctgacttccaaaaaatattgaggaaaggnnnnnnnnnnnnnnnnnnnnnnnnnnnnnnnnnnnnnnnnnnnnnnnnnnnnnnnnnnnnnnnnnnnnnnnnnnnnnnnnnnnnnnnnnnnnnnnnnnnnnnnnnnnnnnnnnnnnnnnnnnnnnnnnnnnnnnnnnnnnnnnnnnnnnnnnnnnnnnnnnnnnnnnnnnnnnnnnnnnnnnnnnnnnnnnnnnnnnnnnnnnnnnnnnnnnnnnnnnnnnnnnnnnnnnnnnnnnnnnnnnnnnnnnnnnnnnnnnnnnnnnnnnnnnnnnnnnnnnnnnnnnnnnnnnnnnnnnnnnnnnnnnnnntnnnnnnnnnnnnnnnnnnnnnnnnnnnnnnnnnnnnnnnnntagntaccagattctgaatgcctaacatacaagcatacaaggtggcaggatgagtacataaagtcgcaaaaagtactcaagtgcct

SEQ ID NO: 265305 - DNA, 680 bp, Homo Sapiens
  misc_feature (431)..(520): n is a, c, g, or t
  misc_feature (640)..(640): n is a, c, g, or t
  misc_feature (669)..(669): n is a, c, g, or t
gcaagcaccagctccacatagtgacacagtaccggaagggcaaggattctctgtgtgcccagggaaagtggttttatgataggaaggacagtggcttatagtagtgtgtctggagttggttccttcggtgggttcatggtctcgctgacttcaagaccgtggaccttggcagtgagtggtacagctcttaaagatggcacggacccaaagagtgagcagtagcaaggtttattgtgaagagcaaaagaacaaagctttcacagcgtgggaaggggacccaaggcaggttgcttgctgctggctggggtggccagcttttatttcccttatttgtcccctcccatgttctgtttttgtcctatcagagtgcccttttttcaatcctccctgcccttagctacttttaggatcctagtgattggtgtgttttnnnnnnnnnnnnnnnnnnnnnnnnnnnnnnnnnnnnnnnnnnnnnnnnnnnnnnnnnnnnnnnnnnnnnnnnnnnnnnnnnnnnnnnnnnataatcctcttgtaagacagaaaagttctccaagtccccactcgacccaggaagtccagatggcttcacctctcagtaggcagactgagcctatttttctagaaaagggttaaaactagnaagaaaatagtgctaaggcttgaacatgntgagcccaacc

SEQ ID NO: 265306 - DNA, 950 bp, Homo Sapiens
  misc_feature (25)..(25): n is a, c, g, or t
cgccccaagtaattcggcacgaggnctaggcaattctgctaggtgctgttgctttctgtaatacctaggagacccattagtgccagcttcacaactaccagcacccatagcagggattcctaggctcgggaatcattaggctggcagaagaatctcaaggcagtcatttggttggcagcatcttaggagattttattaatgaaagagtctgtcttgtcataggaatcacatggtgtcagaaggagactctctttcaaagttccaacatcgtaccagttctatcttcctcttaacacagacgtgccatccatgttgatgtgaaaggaccaatattaaagagatgggcagcaactttttgctttttgccctaggacgtttctagctagtcctttaatatcataaagtcttaaacatatttcccgtagccagtgccgaaactttaccttagatttatttatcagaaatgggaaagcaaaaatctttcatctttcacacttaaactccacaccagtagttctcagtagtagttgcacatttagatcacccggagaacttttgaaaaatcccgattcctgggtctcaccttgagattctaattattctgggggtgctgtgtcagctctgggagtcttcaaacttcccaggtaattctaatttgaagccaagactgtgaatcactggtccagaagtatgtttgtttagcagagatgttctgacaggctcaattaacttgcaataaaaggaacaaaggaaagtcattattgccaactcatggctatttaaagctatcctgatttggtatgaggagaagggagtagtttaaaggagtccttaccaattaattctattttaatattagatctttacagtattaatattatgtagcaataatttattgaatggaaatttaaagtacaggacaatcaaaacagtagtttagcaaatatcag

SEQ ID NO: 265307 - DNA, 606 bp, Homo Sapiens
aaatacaaccactctgtggactggtggtccttcggggttctcctttatgaaatgctgattggtcagtcgcctttccacgggcaggatgaggaggagctcttccactccatccgcatggacaatcccttttacccacggtggctggagaaggaagcaaaggaccttctggtgaaggtaagaagcgaagcaaagagcgtcttcataagacgagcattaggtcttctggtcagttttctgttcctcttagtttccaacttgcatgtggcaaacaatgattattattgaactgggtttaaatgggatgtgcaccgtctgtgttttaatagaggcacccaatattatgagcattaaatgtcaaaatgagtgtaagagaaaccctcatgtgcatcagttataacataacggccccaggaaccagttccatgaccttgaatacgctcacctggagatgtagttggttcattaaacaagcacagtgtgtggcttaaaaatcaatcttctagctacttgggaggttgaggcaggaggattgaagttggaagtgtgaggtcagcctgggcaatgtatcgagacccctgtctccaaaacaataaaggggaaaaaaaa

SEQ ID NO: 265308 - DNA, 359 bp, Homo Sapiens
  misc_feature (38)..(38): n is a, c, g, or t
  misc_feature (65)..(65): n is a, c, g, or t
  misc_feature (101)..(101): n is a, c, g, or t
agttacagagaaataaagcaaaaactcaagatgcattnaagacaagaacccccaccctcgagggnaagcctcaagctctgatgaagacccagctgacaagncccctggctccccctaagcccatggcagaggagatcattcattcacatgtcagagacaaagccccaggagtctggattgtgaagtaaacgctgagcccgaccacaaccactgtgaatactgggcaactggggcgtctcagaggattcaggtaattgaacaaatagacttcatacggaatctcaactctcctctggtcagcaatatcagatgtacttctgtgtgaataataaaccagactgcctggatgcgggagcaca

SEQ ID NO: 265309 - DNA, 566 bp, Homo Sapiens
  misc_feature (20)..(20): n is a, c, g, or t
  misc_feature (26)..(26): n is a, c, g, or t
  misc_feature (39)..(39): n is a, c, g, or t
  misc_feature (51)..(51): n is a, c, g, or t
  misc_feature (61)..(61): n is a, c, g, or t
  misc_feature (85)..(85): n is a, c, g, or t
  misc_feature (379)..(438): n is a, c, g, or t
cccaaaaagaaaatgggtanaatttngcccaaaagaccnacttatacttgnagaacatggnaagaatttgccctgatactcctcnttgggggaaaagagtctctccctcttttccctcaaacccccagtacactcagcctctctgcccccaccttctcctgactttgtcctcacttgcttctgcagtacattggaacctgaattgaaagaaagtcttccttgaataattggagtttgtcttgagaggcaaatatagccccaagaatcacaagattcgaggaccatgtaggtcttttacgtagcccaaatccataaattagtctcactttttgtatttatcgtttcatattaaaccctctatatcaaatgttcatcatgnnnnnnnnnnnnnnnnnnnnnnnnnnnnnnnnnnnnnnnnnnnnnnnnnnnnnnnnnnnnaatggtaaattcttaaactgtggaaaccactgaaggtgcttattaactgttctcccagatttgtacaagtattggatgattccttgagtttacagctgtacaaatagtgtggaaaataaacttttttt

SEQ ID NO: 265310 - DNA, 421 bp, Homo Sapiens
  misc_feature (111)..(111): n is a, c, g, or t
ccttctcctgactttgtcctcacttgcttctgcagtacattggaacctgaattgaaagaaagtcttccttgaataattggagtttgtccttgagaggcaaatatagccccnaagaatcacaagattcgaggacccatgtaggtcttttaccgtagcccaaatcccataaattagtctcactttttgtatttatcgtttcatattaaaccctcgtatatcaaatgttcatcatgattttgtatgatttttataactattttattcattttattagatttattctaaaattttttaatggtaaattcttaaactgtggaaaccactgaaggtgcttattaactgttctcccagatttgtacaagtattggatgattccttgagtttacagctgtacaaatagtgtggaaaataaacttttttt

SEQ ID NO: 265311 - DNA, 479 bp, Homo Sapiens
  misc_feature (72)..(72): n is a, c, g, or t
  misc_feature (174)..(174): n is a, c, g, or t
  misc_feature (182)..(182): n is a, c, g, or t
  misc_feature (289)..(289): n is a, c, g, or t
  misc_feature (297)..(347): n is a, c, g, or t
  misc_feature (369)..(369): n is a, c, g, or t
cagtctctcctcttttcctcaaaccccccagtacactcagccctctctgcccccaccttctcctgactttgnccctcacttgcttctgcagtacattggaacctgaattgaaagaaagtcttccttggaataattggagtttgtcttgagaggcaaatatagccccaagaatcnacaagatncgaggaccatgtaggtcttttacggtagcccaaatccataaattagtctcactttttgtatttatcgtttcatattaaaccctctatatcaaatgttcatcatgatnttgtatgnnnnnnnnnnnnnnnnnnnnnnnnnnnnnnnnnnnnnnnnnnnnnnnnnnnatggtaaattcttaaactgtgngaaaccactgaaggtgcttattaactgttctcccagatttgtacaagtattggatgattccttgagtttacagctgtacaaatagtgtggaaaataaactttttttaaaa

SEQ ID NO: 265312 - DNA, 583 bp, Homo Sapiens
acagttgttggctctggtatttactagttttgtagtaacgttttgctagcctgactgacttttcttactggtttttatgcccacggtccgaggggactgttcttcttgttgggggtgtctgcggaatagcgtctcgtcttgtttgtataggcagtcaatgtgtgtgacatgtgtgtcctttcagtccggaagcccactgtgtgacaatggccgtggggtgtggctgggaggtggggtgctgaagcttgaagagcatttcctttgctgattcataacagtatttccccatcttttggccgcaggcagggaaagtgtacagtatttaatttgtttcctgttttactttaaatttgtaagtctttaagtagcttacattgattattataggggaggacaagtgacttgtttaaagttgtatttagtattctttccaatttctgtattttaaaatattgaaattaaaattgtattacttctgttttgatttttttagcactcagtgtattttttgctcattttgtttgaaagtataaatgttgaaaattgtataaaatgcgtccttgaaagaaaaagaatctgaatt

SEQ ID NO: 265313 - DNA, 465 bp, Homo Sapiens
  misc_feature (82)..(82): n is a, c, g, or t
  misc_feature (393)..(393): n is a, c, g, or t
agatagatggatccaccaaaatacggatttccccttcccttttccaaatgcaaatccatccagtttaattaatgaaattaantgaccaccagagattggggaaaagtgggtgaaaagcagaggctggaggaggatgtggaaagaagggtaacagaaatagaaatgagagtcccgacaagagaaaaggactctgttaactgggatctggggcccacccttcacccttctggtcttttgtagaagggtcctctgccagtgcccaagtaggagggaggtagaagattgagctttcacagtgttccacattgccctaatcatttcatttctaatgtactttctgagttggcgcattacccagagctgattcatccctgaggcataggtctccctttnagcctaacggagatgactgcatacaagtggtggctggataacctcaatcatcaaaagaaatatgcttcagaa

SEQ ID NO: 265314 - DNA, 147 bp, Homo Sapiens
tttttaagatcattatgtgcaaaacaccaagttttaaaaataactcacagaatggccttagttttcaatgtctgatggtatatttgtgagttgtgttatctgtaatatacatcccagaataaaggagtgaattaaatagtttaaaaa

SEQ ID NO: 265315 - DNA, 435 bp, Homo Sapiens
gactcctggaaaggagttgcctcttctccaatcagagcgtggaggcgagttgggcgacttcaagggcctggcatggcagaggcccaggcagccgtggccgaggtggacagcgtggccgtctgctgtggctgaaggcagcttccacagctcactcctcttctccctgccctgatcagattccccaccttacccgggccctacaggagcctgtgcagatggccatgcccaaccaataacgagacggttcccctccctttccctgccaggctcatgtctttacaccttcactcagccacgccaaccagagactgggttccaatctcaccccaccacatacagagccctcatctgtgaaatgagaaaaagcattttctgttttcccaccaggcccccaagtgtggtctttttctttccttcctaatgttgaagagaata

SEQ ID NO: 265316 - DNA, 394 bp, Homo Sapiens
  misc_feature (320)..(320): n is a, c, g, or t
actttaatccactcagggaacattttcctaggcatgactgtccctcataagttgctatagacaccagatcaatttctagccctccaattctaggagctagtgctacacagagtgggtgccatacctattattatgttactttttcttttggaagtgtagcctccaagtctttaagcccagagtctgaaattaaaatgtccataggacccaggcacctgcccataaagattgaagcacgtgaaagcacatggccatttgcctaacagaacctaggtcacatatgaaacccttttgccttgacaaaaaattagctgggcatngattgtcacgcctgtagtctcagctacttgggaggctaaagtgggaggatcacctgagccctggagattgaggc

SEQ ID NO: 265317 - DNA, 863 bp, Homo Sapiens
atttcaggctgctcattcgtcaactagagagagaataacagtgtctccctcacgcccttattgtgaggcctggtaaggtgactcatgaatggggcttagctcaggagatgctgtccacccctcccaggcccaggcaaccttgtccagggttcccatctctcctgggatgcagctgtggagcttcacctggagaagacaggtccatcaccatgttttattcactgactcaggaaggactccaggcagcagactatgggatggcaggattctgtcctggacagctctgctagagaagcagaccgggggcagggagaggctccaatgactttcccgacctggctttgccaaggccctctgctcccgctctttccttttccattgggtgagctgcttccttcagcttcttctcaaagctgatacacacaaggagacaactatcccatgctcccctgcatccttcctgacatgggactactccagtccctttcccaggccagcatgggtgtgctgtctgctatgctgccagaactccctttgtctcaacttccatccagcccactttcctggaaggccaaactgcagtcctttcagccacatcaagacggatctggctgacaactggcctgctgcttggctgaccaactgctgctgttctgttcaccttgggtgcaagttctctgagctccacttcacccgttccctcagctcttgcccccatttcaccatcctggggaaagtttccatgatgtttcactggtgctgccctctgcttccagggtccagtgaagctggaggcccaagtcccctactaaccagcccgcaggcaagctgcctaacctctctgacagggtttcacctacaaa

SEQ ID NO: 265318 - DNA, 376 bp, Homo Sapiens
  misc_feature (23)..(23): n is a, c, g, or t
  misc_feature (35)..(35): n is a, c, g, or t
  misc_feature (55)..(55): n is a, c, g, or t
aaagtgcctcagtacccctgaanaggaaccaaaanaaagcccactgaagccccanaggggaaaagagggccagggagaacctatgtggaggtggcagtgtctcggctaaaccttgaggaacgaggacacggagatgggggagaagggcatgccgggaggaggaaagagcatgagccaaggcacagagtggggaggcttgggagggtcagtaaagaccagcgctcatccatgagaacacagatgcgaacgagaggcccaggtaccctcatctgaacaggctgatgctcaggaggggcggctggtgtgggcacgctcacatggggtttgaatccttctgcatttgggagctctctggggatggagtagagccttgtgc

SEQ ID NO: 265319 - DNA, 463 bp, Homo Sapiens
  misc_feature (26)..(26): n is a, c, g, or t
  misc_feature (31)..(31): n is a, c, g, or t
  misc_feature (38)..(38): n is a, c, g, or t
gaaaaccctttaaaaaagatagccangccanggaacanccaagggattaatttataatatgtttggggatggaaaaaggaagggaagaaagtatacctgttatttttcctcagtgccagccatataaattgtacatttttcactagcaaggaataaaaagtcattttcctttaaaaataataaattgcctagggacatttgtggattgtgagtgtcttaaaaatgaaaacactaaatatttattaactggacaatggattgtttctttccagactacatcaaagaatcagagaattatctagccctacatttaacagcatgtcttaaactctttctagaccatccacaatattgtttgaacatctgaagacatggggaacttgccatctgatatctgataacagacttcctgtaaagcaggactggtagtttcctgataacaaattcttcaatatgaaggtat

SEQ ID NO: 265320 - DNA, 530 bp, Homo Sapiens
  misc_feature (49)..(49): n is a, c, g, or t
caaagttccacagatttggaaaacctcctaaaacccaatactacccccncccccatcacaccccccaaaaaaacttgctgaagcactggcaaagttagacatttcacagtaaatgtgaaaagttccatattatataatctcttaaaatgaaccttttcaccctctttcccacagcatgaaactgttatggcttaatttatattaaaagtagaaaagtcttttctgaaggaaataccatctgcgaagatgcatttcctgatcagtgctatttcatacctaacaactgtatgacttgcttttgcagtcagaagctgtttttggaaaaattgaggttatagcttttgattcagtctaaccataaactgtaaggcccttagtttggtttaggtttcttttgcaagataaaataaccttggggttcacttagtaagttacacctcaggtccctgactgtaatgtggaagttatacgtagctctgtaaaaataaaaggttacttatgaatcttaaaaggaagaaatagttctaggt

SEQ ID NO: 265321 - DNA, 246 bp, Homo Sapiens
ataaatatttacctgagcctccccattatatatccaagcccctgttcctgagtattggaaaaacagcacctaggagaaacaaaaagcaaacagacaaagcagggaaaattccttgcattaactgaacttacactcaagctagggacagagaaacaacaatatataaaggatatggaatggtaaatgttgtagagaaatgcaacacaatgaagggggtacagagcataagaggtaggacagagggtg

SEQ ID NO: 265322 - DNA, 454 bp, Homo Sapiens
  misc_feature (25)..(25): n is a, c, g, or t
aaaattgaaatgttgggatattaanttaagaaaatcacctaaaacgaacggtcttaaaaatgtcttcaacccatactgacactgcacctcccgcagtccactgaccgggatcgccttaaaagacactcgcaaccctggtaactggggcggaacaaagtattgtgcatccatagtttaaggttcctaggcgtagaacctgtgtaaacatgctgaactagagcgctggagtgatcatagcaacttgaggtatgctctaagttggcaaatgtcaacactgtctgacctagtaattacttcggaaacagacccttaaacctttgctagcctagccctggaagcttgaattgcagggagctccccagatgaagtccaactgtcaaaacagccgcagcctcagacaaggctaaacaccttagatgtttaggccacaaacaagacttgaacaccggcttta

SEQ ID NO: 265323 - DNA, 703 bp, Homo Sapiens
gcggcccaagtaattcggcacgaggtaccctacaacccacaagttactgcaaagctgggcttctaccagaagtgagtgatttgaaattgaaaacagatttcggatctcacctgagtagctcgagtgtaagggagggactgggagagccacagagaacatttgtcaatccagaaccaaccattcatggtgttgcttgactggagggcagggaaggaaaggactagaagcaaggcgaaagaggatctttctgtagatacacacatataagtcttggatttgcattttagggtgaattgtaattagcttgagatgaccaggggcccaccaatcaagcaactctggggaaaaacacttgtctacatctttaagtttctttgtctattaaaatgtccaagatttgaactaacactacatgattctctcgggaactcaccagttctaaaatttccactccttcttttcacagggcagtgtaactttaactccctgtttcaactttgggtgtaaaatacaggctcacaagcacttttgctttgcagcggaagctaggaagaccctgctgtggaattttgcagaggggctgagcagtggtgggaaggaccagcggcccatgtaccatgttgggcccctgcattccaaggtgtctgcctagaaataaatgatagtttatttaacatacttgtaacttccaacgacaacacat

SEQ ID NO: 265324 - DNA, 910 bp, Homo Sapiens
ttaaagtagaagcataattcaaagaaagattatttaaacctaacaagattggttccatttagtcaagatattggttctcacaaaataactcctaagtagtctatgatggtttagcctatggactgactacaccccattccctaccctccctcaggaagtcctgctttgcaatgtcaggaagacattgcaggtgctggcatttctattgtagcgaatcaaagccaacaaaacagctgggactgacaattccaaatctgcttcattcagctgggctgacaaatgtagttagggtcccaggggaatgtggctcaatggtagaaagcagggtccgcagtccagggtataattcttgacatctcctgaagacaatatagtatttccagggattggtattaacaagtgttcaataaatatttgttgactgattgccaggtctattatatgtacaagtactacatttttaaaatgtagtactttatttgcattcccaaagaaattacccgaaaagctcagctaagctataaattacataagtatcctgtaaacacaggtacagagcagtcagaaaaaggaatccctggatgggtgaattgagcaatgttttgaaatatataaataaataattgcctatatgtgatcaaaacaaagctacagcacaaccctatagctgaactacaagcctaactaactacagggctgtagttaggagacccaattaactacagagagatgacggcacagacaggtgtcttcagtggttacttatggttgaacactgtttctgagaacctaatttccaagttatgcttactacttacaaaggaaaaattggcctcagagacactgtacaatactgcaaggacaactataaaggaggaaaaataaatatggggtatatatctcattgttt

SEQ ID NO: 265325 - DNA, 476 bp, Homo Sapiens
  misc_feature (14)..(14): n is a, c, g, or t
  misc_feature (50)..(50): n is a, c, g, or t
  misc_feature (72)..(72): n is a, c, g, or t
cagaaaactggggntccaaaaaagggtaaaagtcattttgccccaaaatngctgagcccaaaagcccatccnatgtcccctaccctttattttcctttcccccgaacatcccccaggctgtccccctcataaccttcccaagcatgcaccttaaaaactcccacatgaatacaaggttccatgggacttgggtattcatagaaagggaggcagaaagctggtctgttcctgataggcttgtaatttaatatcattctgttcatgtgctttggatggaagcacatctggcatatgatgctaatcagtggttcccatacccctggcttcctaattttaatgtttgctcacagcatagtagattgacatcaaatagtggccgatgatgatgaaaataaaggtcaaataagttgagccaataacagccgcttttttccttctgtctgcgtatacaaagcactgtcatgcacacaatctat

SEQ ID NO: 265326 - DNA, 392 bp, Homo Sapiens
  misc_feature (98)..(98): n is a, c, g, or t
ccccatagggagggcctgcagggcctgcctcccccccctacagagaccctaaccatccaagggtaagttgccagaattccagattccctaattaccantgtggttgggatggcggggtggattcccacggaggtcaggaagaggtaaagtaccagaattgaggctccttgggaggaggtcataggaactttgcagtatgaaaatggctagagattgggtagaattgagcaggctggcaatggcagttttgtgtgggtggtaggacctaggattcaaacttgagggcaaattgtggagcacatacgacaaatgatgtagagcctttcctatttcccttcctgctgtgtcatccgaaacaataaataataaagaattaacaaagactgaaaaaa

SEQ ID NO: 265327 - DNA, 557 bp, Homo Sapiens
gaataaagaaaaaactgcactgttcccacccacatagttacagccactttatcaaacagaagagcagtctggagccattgcaaaacaaaatacctgccacaactcctctcttctcatttcgactccagcttttcatcttagcaaaaaagttgcaatcagcaccccctagacggaaggaatatcctgtcttaatgggagtccataggaggctgcaggctgctcccctacagagactaacatcaaggtagttgcagaattcagattctaattacagtgtggttggaggcggggtggattccagggaggtcaggaagaggtaaagtacagaattgagctccttgggaggaggtcataggaactttgcagtatgaaaatggctagagattgggtagaattgagcaggctggcaatggcagttttgtgtgggtggtaggacctaggattcaaacttgagggcaaattgtggagcacatacgacaaatgatgtagagcctttcctatttcccttcctgctgtgtcatccgaaacaataaataataaagaattaacaaagactg

SEQ ID NO: 265328 - DNA, 988 bp, Homo Sapiens
ggagctactcaggggagttcagcagcggctcatccaggctcccttccaagtcacagatgctgctgttctcaacaatgtagcacacacatttggcctaatggacacagtcaagaaggttttagacaacagaaggaaccaagtagagcagggagaagaacagtttctctatactctgacagacttggaacgccagttggaggagcagaagaagcaaggccaggatcacaggctgaaatctcagacagttcaaaatgtggtactgatgcctgtgagcactcctaagcctccaaaaaggccccggctccagcggccagcctccaccactgtcttgagcccttctcctcctgtccagcagcctcagttcacagtcatctcacccattcaccatcaccccagtgggttcagtcatttttccatggggcaatatttccagtgggccaccctcagccagggctccagtcctgtgactgtccacacactgccttctggccctcagctcttccgctatgccacagtggtctcctctgccaagagcagctcaccagacacagtgaccatccacccttcatctagcttggcgctgctgagctctactgccatgcaggatgggagtacactgggcaacatgaccaccatggttagccctgtggaattggtggccatggagtccggcctaacctcggcaattcaggctgttgaaagcacctcagaggatgggcagaccatcattgagattgatccagccccggacccagaagctgaagatactgagggcaaagcagtcatcttggagacagagctgaggactgaggagaaagttgtggctgagatggaagaacaccagcatcaagttcacaatgtggagattgtggtcttagaggattaactggggatctcagggccaggagttatgttttgatttggaattttaattatttgtttatttttatcattgtcccactcatttccacataggacccttttttta

SEQ ID NO: 265329 - DNA, 178 bp, Homo Sapiens
aattggttgtttggaaaatcacatcatgcctagaatctgaaattgaattagcaagaaccgactgtttgcattttccatatatccttttatctgctctttttaaattgttaattctaataatttcaaaatgcattcactgaagaaatggacattaaaatattctaaaatttaaaaaaaa

SEQ ID NO: 265330 - DNA, 565 bp, Homo Sapiens
  misc_feature (353)..(353): n is a, c, g, or t
  misc_feature (366)..(366): n is a, c, g, or t
  misc_feature (370)..(370): n is a, c, g, or t
  misc_feature (372)..(372): n is a, c, g, or t
  misc_feature (383)..(383): n is a, c, g, or t
  misc_feature (408)..(410): n is a, c, g, or t
  misc_feature (418)..(418): n is a, c, g, or t
  misc_feature (440)..(440): n is a, c, g, or t
  misc_feature (447)..(447): n is a, c, g, or t
  misc_feature (467)..(467): n is a, c, g, or t
  misc_feature (470)..(470): n is a, c, g, or t
  misc_feature (494)..(494): n is a, c, g, or t
  misc_feature (501)..(501): n is a, c, g, or t
  misc_feature (512)..(512): n is a, c, g, or t
  misc_feature (519)..(519): n is a, c, g, or t
  misc_feature (525)..(525): n is a, c, g, or t
  misc_feature (534)..(534): n is a, c, g, or t
ttaaggtgacaaaaagtgtgggaaagattccacacctccctccccacgcccgccaatggtcctttacctgtccatgtttcagattaaataattagctcaagagatttgcacagaaagcgaattagcccttttctagtcagactgttaagctctcaggcgggcaactcggaaccccgtttcctcaccgaagctcaggaggccagcccagtgagggatggaggtggctttagagggcgacagttgtgcagcactcatgagcaacagtgcccagggacttttgaagtcacggaagggctcctggaaacccgacagctcagggtcccgcccctgggggaaccaaaagggagtctttnggggggcgtgccnccgngngtgggaattgntgggttagccagattttttgggggnnnaggaaggngcgcaaagcagcttaggaaacngcacatncttcatttcttgggaacttnttncccaaggcccccattgcttttttnagcaggncttcgggtttnaaatttngggccnggtttgganccttttccaccccacctttgggttttacccc

SEQ ID NO: 265331 - DNA, 450 bp, Homo Sapiens
  misc_feature (394)..(394): n is a, c, g, or t
  misc_feature (423)..(423): n is a, c, g, or t
  misc_feature (432)..(432): n is a, c, g, or t
taaggtgacaaaaagtgtgggaaagattccacacctccctccccacgcccgccaatggtcctttacctgtccatgtttcagattaaataattagctcaagagatttgcacagaaagcgaattagcccttttctagtcagactgttaagctctcaggcgggcaactcggaaccccgtttcctcaccgaaggctcaggaggccagcccagtgagggatggaggtggctttagagggcgacagttgtgcagcactcatgagcaacagtgcccaggacttttgaagtcacgaagggctcctgaaaccgacagctcaggtcccgcccctggggcgaccaaaaggagtcttggggggcgtgcccccggggtggaattgtggtaaccagatttttgggggnagaaggccccaaagcagctagaaacgcanatccccatntctggaactatgccaagg

SEQ ID NO: 265332 - DNA, 488 bp, Homo Sapiens
  misc_feature (17)..(17): n is a, c, g, or t
  misc_feature (25)..(25): n is a, c, g, or t
  misc_feature (36)..(36): n is a, c, g, or t
  misc_feature (42)..(42): n is a, c, g, or t
  misc_feature (72)..(72): n is a, c, g, or t
  misc_feature (87)..(87): n is a, c, g, or t
gtcaaaaagccctgaantcccgggnacccttccagngggaanaaccgccagttttggttgaaaaagccacanaagggcccgccgaanatggtcccttgaagccagcttgcgggaatacagggaagtatattccaccccccggaaatgtccgttgccttagtaatgtaaccccggagcttttatacacctacatttccttttttattattatgaagaatgggatacctcccaggttcccagtaaaattccttctgaccgaaaccaatgtgggtgttagaaaaattacccatatagcttaatatgtttattagttctctttggaaaaaaactaccactgtggtcttaaaagggaacaaaatataccataggctaaaactaaggctttcactctagaatgcaaagctgttttgcagctgttttcccttaaagatgtcctgttgctttagtgatatttagacccctctcagttaagaaatgcttagattaaa

SEQ ID NO: 265333 - DNA, 500 bp, Homo Sapiens
cagagagtagtgcttgggaggtaataggtgcttctggagtgctgttgatgttctgttcctaagtagggtgctatggcttgagtttggtttgtctgaccctaccaagtctcatgttaaaatttcatccccagtgttggaggtgaggcctggtgggaagggttgtgggagtggatttctcatgagtggcttcgtattctgtaaggagtgagttcattaagagactggcacctcctctctcctttctctcgccatgtgatctctgcatatgtcatctcctgtctgccttccaccgtgagcagcctgaagccctcactggaagcagatactgctaccatgcttcttgtacagcctgcaaaaccgtgagccaaataagccgaacattctaagacactgggattacatgagtgttagcactctatgacttaatgagaagtaggttttttggagaaaaatgtactttcagtatgtatattatatatttcatggttatttttaaaaaa

SEQ ID NO: 265334 - DNA, 476 bp, Homo Sapiens
  misc_feature (16)..(16): n is a, c, g, or t
  misc_feature (29)..(29): n is a, c, g, or t
  misc_feature (439)..(439): n is a, c, g, or t
  misc_feature (448)..(448): n is a, c, g, or t
aaaacactggctctgnatcctgggctttnagaaaacttatcaggctgtcacacttaccatcccttcagtctgcttgtcaggttccttaaggacgcatatctcaaatgtatggcatctacctctacctgggtcacaaccaagtgggtttctactagatcggtgttccttgacagccaacaagggagctgacactgccctcctaagttctgatcttgctcctgttcaactggaacttgatggatcccatgtggtttcccccatcctgacgctgtggctcagacactctccctaagctggtccttccctccaaatcctgccttaaacacactcagaaggtagaaaacacttcagcagcaaagtcctcttcccaagccaacagttgtgttcttccaatcacatgatcttaccttttcaataaaaggcaaaacaaaccaatttncaacatagnattacagcctttaaaaccattcacttct

SEQ ID NO: 265335 - DNA, 458 bp, Homo Sapiens
ttgaaaaacctatataaatttaatcacctgccccaaagtcctctcgttaggttaaaaacacaatgcgtcctggggagccaattgcccggcacgtcttattactgagaaagtgcaagaatgctgatcatcttatgcagcatactaaaggatgatttactctttacaaaatagagcttaagtatcaacctgatgggaagttaggaaaattaaaaacatttaagtaggaatcatctctctctctatttttgagatcctgcagcaaaaagcctcccaaatcaactttcaaagttctgccattaaggaatgttggttctcttgtaaaattcagagatctctttaaaatagtaaaactatatactacaggaaagatccctaatttttatttcttattggtataaaatcaaattcttaagactccaaaatattgttacctccaaagaattaagtaaaaaaagatc

SEQ ID NO: 265336 - DNA, 437 bp, Homo Sapiens
  misc_feature (255)..(255): n is a, c, g, or t
  misc_feature (286)..(286): n is a, c, g, or t
  misc_feature (317)..(317): n is a, c, g, or t
  misc_feature (334)..(334): n is a, c, g, or t
  misc_feature (388)..(388): n is a, c, g, or t
aattaataaaagaaaaagaggtttaatggactcatagttccacatggttagggaggcctcacaatcatggtgaaaggcaaaggaagagcaaaagcacatcttacatggcagcaggcaagagaacatgtgcaggggaaatgccctttataaaaccatcagatatcatgagactcactaccatgagtacagtatgggggaaacccacccccatgatccaattacctcccactggggtccctcccacaatgtgggganttatggggagctattaattcaaggatgagantttggggtaggggacacagcccaaacccatnttcagcccgaacctttntcccttactgggaaattacacatttggttaaatttacagtgttgcagaccactnttttccaggggacccacttgggaccaagcccttctggattttaaacggg

SEQ ID NO: 265337 - DNA, 623 bp, Homo Sapiens
  misc_feature (13)..(13): n is a, c, g, or t
  misc_feature (32)..(32): n is a, c, g, or t
  misc_feature (40)..(40): n is a, c, g, or t
  misc_feature (83)..(83): n is a, c, g, or t
ggaatcggcacgngccccattataagtagtcnggtaagtnaaaatttcttacatttaaccataccaaccaatgcataccagtngattagtatttcagcttctttcacctttggtaatcctataaatgccttcatttggatgaaattagctctgaaaagcaagcaggccactattatttaacctttttgacggtgcttttattaattatctttagagatacttagctccttaaaatggaagtgtcagtttggttttgagagagataggccatggtagcaaatttatccactatctttgtttagtcaaaacaaggtgacaagttagttataaagcaagtctcattataagaaatttataggttgtctacattatagttgtagtagattttatttctagtttttacctttcagttcacaagcatttttatgtataaaggttatgcaggcccatgtagattgtgatacataatttctgaaccgaagaaatcagcatcattgaaggaaggaggccatgggtcattcctgtaaacccagcagtttgggaggctgtggtgggaggattgcttgaggccagaagctcaagacgatcctaggcagcacagtgagactcatccctaccgaaaa

SEQ ID NO: 265338 - DNA, 388 bp, Homo Sapiens
  misc_feature (60)..(60): n is a, c, g, or t
cccctggggaagtaaagaggttttgaattgaaggggtaaaaatgtggcccccctaaaccntgaccagaccttgatgcctggggaaggtaacctttccacagaaacaattgaaggatagtccaataaaattgccatttatatccttggcaaaaaggtaagaaattcctcaggtcaggggatgaacaggtagggaattcaaaaataagtacttgataattattgaacattgggttttatatcttcataggataaaagaaaagatcaaggcagcccaagatagtcaagtgggaaaccaaatccctgtcactcttttataaaacaaatccacaaagcccaaaattcattctttgaaaacacccaagaaagtcagctggtctttggtgagact

SEQ ID NO: 265339 - DNA, 738 bp, Homo Sapiens
  misc_feature (20)..(20): n is a, c, g, or t
aaacaagattaaaagacagnatgacaaactaggaaaaaatttgtaaaacctgacagagggttttttgtctgatttttgggtatatatcttcatatacaaagcactcttaaaaactattaagaagtaatctctgaagacttccaatttccagtgtagcatgtaaggagctcagtaattgccacttggtcctgacaacaaataaataactgaacaaaatgaaggaatagacaacacttcttaggattcctcagataagtgaagtcacaggggcaaaccacatcctccaaaactggagagacagacagctggatacagagaatcacaactactgaagcagaaaccgaggatcagaaacccctgagggaaccagtacccgggtaggaaaatctgagctgtaattgaggagttgctggaggctcagtgtggacaagtctgagacctaaaagctccagggagagccagtcctaaggaagcccccgtagttttgtgagatttacttcctggagctctaccaggtcctcacagtaaatatttgagaaaaatcctcttacgctgtcagctggagaagggagaagtgaaacattttgaaatacaccaaggtattctgttcttaacaaggcctgccctcaggagaaattatttctcttagaaccaaacctaactggggaatgggaaaaatgcagctccagtcaactctagcccttcacatggagaaaaggaaattcctaactccacctt

SEQ ID NO: 265340 - DNA, 602 bp, Homo Sapiens
  misc_feature (14)..(14): n is a, c, g, or t
tagtgccaaagaancatttaattccagagaagtgagacttgcttccaacatattttgtgtggttctacccatacaattaaatggcttcattcatctatcagtagatggttatgaagccaggtgctaaggtaaagttgggggcatgaaggggaacaagagaggatacgggctcctgccctcacacaacttggagtctactgagaagagatgcctttaaagtgtaaatgccaggacagacaatatgcttgggccacacaaggacatagtgttcttgtctggagggggctgcagagggaagaacagagaaaagagggagcaacatggtggccatagtcaaaaaatgaaggacattcagttaaggcctgaaaaaggggaccggtggggcagtcaagagtcatatgaggtgcttctctgcaaggaactgtcagggcaaacagatgtttcggaggaatcaccatgctgaatactcgctgagtactagcccaggtacagcagaggcacacccaggaagaggcaagaaggaggccaagtgggagtcaatggcagctatccagttagaaggtcatccatccatccatccattcaaaactaccagcctcgtg

SEQ ID NO: 265341 - DNA, 477 bp, Homo Sapiens
gcccccccaaaaatatggaaccaatggtaacctgaaactcccatgtgaaaacagggcctaagcccaactagcatgtaaacattagtgaatccacggcaaaagagaatgccagggaagggagaaggtatttattatagaaagaactagtactttttagcatgtatgtgtcaggtccttatgctaagcatccttacatatgttaactcatttggttttcaaagtaagtattgcaacaatcctttaaactgatcactcaaagttttacagtacaagggaggaaatggatgagcagagagaatgaaatggataatcatagtggtatgaccacttttggaaaacaagttggcattttcttatgaatttgcattccctataatttgcattttttccccttctaagtatatcttctagaaaaattcctgcacacattcacaggagctgtaagaatatctgtggcagtattatttgtaagggccc

SEQ ID NO: 265342 - DNA, 485 bp, Homo Sapiens
  misc_feature (474)..(474): n is a, c, g, or t
ggcacgaggactccagtcctggcgctggatgctgctgctgttccagcttcctaggtgtggaaactgaaggaccaagagattaaacagtggtgcaaaagtggtaagaattcagcattctcctcgacaagtggacgagcatctactgtgctttcacagcggctatcactattgccagcagcaagactgtcagctcggcgccctcgtctggttggatgggaaactgcagttgctaagggagctgggtttgaatctctgaggacaaatgggaattctcactgatttctaggactaccctggggcaggcaccctgcacagcaattacacactgaacaatgttcgagtttctgcttgaatagacttcctacgttgctctgggaatttcgaagttgggcctaactgaggtctccagtttacaggaaaacactgggctctgttattcctggggcttttgaggaaaacttattcagggctgtncacaatttacc

SEQ ID NO: 265343 - DNA, 822 bp, Homo Sapiens
  misc_feature (768)..(768): n is a, c, g, or t
  misc_feature (800)..(800): n is a, c, g, or t
cagaggcaccgccaagctcggggagtataaaatcccaagaagggaagggccatgggcggcttctggagcccggcactcatcagtttgccagtgtcccagtgcgctccagccctctctatgagtacatccaagagcagagatctcaataccgcccttaagtgatgttgccaatatcttgacacctgccaaagcttcgagcacgggaaaatgagaaacactggggtaccaagtgataacttcagatgtttctgggttgtggggaaaactctctgatattaggaatgtcttttcttccaaaatcttaaactacgctcattttacgcactttgtacttctgctttttattcttcctcaagtagttctttactgcaagatgtctttcttttgctctttgatgcagatgtggtgtgcatttaaaaaaaatataaatcatttaatttgtttaagaaattttgtttgaggaacatgttcatttattgctttcagaagtaacaagagtaataggatgatttgagattctaaacaatgggtcggtttgtttaatgactgacccatcttgtggaaagtgcagatacttttaatgttcaagttgctatttcttcttgaacctaaattatcattgcctccaaacagcatttcatcttttgtggcatagttagcacaaattccaggtaactaaatttttataacccttgaatagtgcagggggagtgacctctgcataaaaacttcctgtaaaatcagcccattactggaagaaatatctgntaagaataggtttagctttgaagatttagaanttaaattagattttttttaaac

SEQ ID NO: 265344 - DNA, 402 bp, Homo Sapiens
aaagatataaagatatctttgccagcacatttgaaaatttagactaaatgaccaaatgccaggaaaaattgaacttagcaaagccagctaaatatgaaaaagaaaacctgagaaaaatgaggcagtaataaaaatttttcctacaaatttcaagcccagagatttatattggtaacttttggcaaatatacaaggagcaaataatttcaatcttacagacacaatttggaaatataaaagagagggaacaatcactcaacaacatatttaataaggttcacataactttatatcaaaactttacaagttaatacaggaaaagaaaagcttaggcctgtctcaatcctgaacatgtagaaaaattcctaaacataatcagaccaatccaaaattagtgtacac

SEQ ID NO: 265345 - DNA, 450 bp, Homo Sapiens
  misc_feature (428)..(428): n is a, c, g, or t
gttctctactgtttgtcttttctgtagttaatattaatattaattgtattaatattctgactttaatattagaaactttttaaacattaaaaaataatgtttcagtgctcactgctcactaagcttgataaaggatgaactgtgtaatgtagggatacagcaggcacttactagggtgcttgttgaatgaatttaaaatatccattaggaaaagcaggaacacacatttgagagctacgcaatcttctgctgatcctggggagtaatagtaaatatcctgtagtatgagaaacggcctgggaggtgacgccccagtctactgctgtactttctcaaaaccacaaaaatgtaaggtgatagggtatacttaagccaagtgggaggtctttggggattctataaataggaagccatttgggaaaaagccnaggtaatttttaagggccctgt

SEQ ID NO: 265346 - DNA, 474 bp, Homo Sapiens
  misc_feature (139)..(139): n is a, c, g, or t
tgagcaacgcgtgtcccgagtctgcatgcggaacgtgggctgtgaagcacgcgtgcctgaagtctgcgtgcggacgtgggctgtgagcacgcgtgtccgagtctgcgtgcggacgtgggctgtgatgtctattgctgcnacaccctgggggtggaaccactgtgtcccgtggcgactgtgtgttgaacgtcggaggaaccgccagcctgttttccgtggcggctgtggccacttgacctttgcacaagttgtgtgtttggattcgcatctccacctccctacccttgttactgtctctttgatcacagccgatcccggtgggtctgattttctttgtacaatgcgagccccccctcaatgaatttttgcttaaaaaaaagcaatttgttgtttttaattgaaatgaaaggaagcattctttcctatgcatgtgttttttttaaagcaaacaaaattaaaatcataagtcagtaa

SEQ ID NO: 265347 - DNA, 668 bp, Homo Sapiens
  misc_feature (267)..(267): n is a, c, g, or t
gtccgcacgcagactcagacacgcgtgctcacagcccacgtccgcatgcagactcggacacgcgtgctcacagcccacgtccgcatgcagactcggacacgcgtgctcacagcccacgttcgcacgcagactcagacatgcgtgctcacagcctcagtcatgacagccagacagtggaaacaaggcaggtgggcctcggctgctgagggagcaacagcagaacggtgctcagccctggagaggaaggacgcctgaaccctggccccnacaccacagcatccacaatgtggtgccaaaccaacaggccacgcacacagaggccatgggccagacgcttccactgacacgaaatgcccaagagaggcacagccggcgacagaacggggacccgtgtctgccgccccaggagaggctgcaggccggaaactggaggattacagggcgcgagtgtcgttttagggagatgaaaatgttctaaaattggctgtggcaattgttgcacaactctgcaaatatactaaaaaccactgaattgtacatttcaaaatgggtgaattgtacggtgcttgaattatacatcaataaagctatttttaaagaaacaaaattttaaatacgtaaaaaaatcagaaagtaaaatctggaattaacattccaggaaacatcct

SEQ ID NO: 265348 - DNA, 466 bp, Homo Sapiens
  misc_feature (352)..(352): n is a, c, g, or t
  misc_feature (371)..(371): n is a, c, g, or t
  misc_feature (389)..(389): n is a, c, g, or t
  misc_feature (446)..(446): n is a, c, g, or t
  misc_feature (453)..(453): n is a, c, g, or t
aattttgttactggagctataggaactaggactccctcctcagactcatcaggaaatctgggaaaatctcatctccatgctgcagtctccccgcttggcaccatctagggctctgaagatctttaaagtgagcgttaaatgaagcaggccttctggggcatcgtgatggagctcctgaggactgggagggccgttttcttcataattcctacccagtttagggaatgagaaaaggccctgtggctcttaagtctcctgactatatccactagtttggccttgagtttgagacacctgggtagatgtaccgggctgcccctacccaagagatttgatttgttttcttcccctnggttttcaggtgatagaancccaaagggtaagctttnttaaattgggggaattggataatccagcatatggtaagcggcacttaggaaccctgntggttgnaaaactggccagg

SEQ ID NO: 265349 - DNA, 862 bp, Homo Sapiens
  misc_feature (223)..(223): n is a, c, g, or t
  misc_feature (259)..(259): n is a, c, g, or t
  misc_feature (266)..(266): n is a, c, g, or t
  misc_feature (272)..(272): n is a, c, g, or t
  misc_feature (278)..(278): n is a, c, g, or t
  misc_feature (284)..(284): n is a, c, g, or t
atttttgtgccagaacagagactcaagccaggtttaatgatcattgtctagttttcagagcccagaggtccaagatttgccagcctaggtgtacacaagtgggaggaatggggtcttggacacgggaggcctgcttgctttgtcagcagagctacgaggaagtacagaggtaagaacacacagaaaactggatccatctgctttgctctccccagctggggtngtaccctctcctggcccctttcttgggccccataantacaaantaatantaatantaatanttacacagattgtagagccctgtcatcctctgtctccagggacacctgcttcctgggagacatgtctggtttatgggtgtggggtagggtaagaggaggtggtgatctctcggccttttcttatacccacacctgggcagttttcaacacagggttctagtgcgcttacatatgctgattattcaattctccaattaaaaagcttacctttgggttctatcacctgaaaccacgggaagaaacaaatcaaatctcttggtagggcagccaggtacatctaccaggtgtctcaaactcaaggccaaactagtggatatagtcaggagacttaagagccacagggccttttctcattccctaaactgggtaggaattatgaagaaaacggccctcccagtcctcaggagctccatcacgatgccccagaaggcctgcttcatttaacgctcactttaaagatcttcagagccctagatggtgccaagcggggagactgcagcatggagatgagattttcccagatttcctgatgagtctgaggagggagtcctagttcctatagctccagtaacaaaatt

SEQ ID NO: 265350 - DNA, 400 bp, Homo Sapiens
ctgccatcatactcttcaaagtatgtgtccattctggctctgctgacaggcatgagctagtcaataatctggaactattgtaaattcaattgagcagtcctgggcatattcactttttggggtttttccatctgccattctcctgtgaaggagcattattcccctgagggaattcgctgaccaagaggccttgctagtcccaaaggtgtgtcattggctccacctgcgaatcacagactcatagaatcatggggctgagagttggtttaactgccctcagagggcccttgtcaaatccaagtctgagttctcaacttttagctaattcaaaacagtggcctattttcatcagggcaatggtaggcaagatggttaaagcaggcaaagcgtgatccttggg

SEQ ID NO: 265351 - DNA, 452 bp, Homo Sapiens
  misc_feature (166)..(166): n is a, c, g, or t
  misc_feature (191)..(191): n is a, c, g, or t
  misc_feature (205)..(205): n is a, c, g, or t
  misc_feature (211)..(211): n is a, c, g, or t
  misc_feature (243)..(243): n is a, c, g, or t
aagttcgaaagcctttaaataatatcaacccattaattgctgtccaaccaagaagtcgttgtaaaggccccgtgcgtctctgtcgtgaaaacgcgtgattgaccctttaactgtatccttaaccaccgcatatgcatccccaggctgggcacggctccgagggcgncccagggacaagaccttgcgccganaccgcagagggaancgtcancgggcgctgctgggagcagaacagtccctcanacctgggcccgggcaggccagcttcgtgctggaggaacttgctgctgtgcctgcgtcccggcggatccgcggggaccctgccgagggggctgtcatgcggtttccaaggtgcacattttccacggaaacagaactcgatgcactgaccctgccgccaggaaagtgagcgtgtagcgtcctgaggaataaaatgttccgatgatgtggaa

SEQ ID NO: 265352 - DNA, 483 bp, Homo Sapiens
aataagctgtttggaggaaggtgtctgtctgggaggatggggccagtaaatgaggttggccagagtggccagtgggggctctgaagagcccagccttggagcctgctccattctgggcccttgctgccaaaggagcccagcctcacctagcaggaaaggagatcaaggccctcctcccaaggaggtagggtcttggctgccccgaacttaaatgcttttgaaatctcttagatgtggaaatattttttcgaacctgaaaatgcagctggtagaatttcaatggaagcataatccatgtaaaatatattttagttgatattttgtaaaatgcactttttgtgtgtgttgatcctggtttcccagatctgtatttcagtgtttacaagggaggaaggacctttcctcacctcccttttgacagagattagaagtacttctttaagaaaaaaataaatttgagaaattgtattgatttagaaaagg

SEQ ID NO: 265353 - DNA, 562 bp, Homo Sapiens
atcctgtcacaaaagatagaaggaactgccctttgggacttcttttcactggaaacccagcactggttttatgttgagtgagtgggaagctgggactctgttttacagccatctgtactggagcctggacaaaccactggtctctatgggaggccccagcctcacatttccctgggcaaggagagagaggtttagccatgtcctgggtctaggattacagcccagagatgggcacttaagaagacctggtcattggtccagacttgggccaaggctctcctctgtgagggatgggttttactggtgaattacctgtgtggagaagctatcagggccatgtttagcacactgaagggaccagtctccaccaagcactttaacatccctccagccagcatagattgatctcgtgttacagagagggcaaggtttttggcccctgtttgcagactccatgtcttaatcagagaccacagttttctctttgttccaatctgcgccacctcggtagccccactttccttgctgtgtggacttgaaacaaaataaaatgtgttgcttc

SEQ ID NO: 265354 - DNA, 1510 bp, Homo Sapiens
  misc_feature (42)..(42): n is a, c, g, or t
  misc_feature (1211)..(1241): n is a, c, g, or t
gcacctatcaccaaatgcaaatttgattcccacctccacccnccttttaggttatgggagttggtgttgggacagggtggcagagaatattggagtcaatcctagcttggtctcttgccttccctcttttcctccatccatcgtggacaatgcctgcaaaattttcacaggaagaaagcctattcaggatattaacttgaaatttccagtgtcctaagagcctctcatgaagcccagttctaataagtggcaagctgctctgccggggtcatctcctgggtcatcggactgattgctcaagttctgcaggagaggaagcaccattagaacaactccatcagaacagctccaccgggacttgtgggcctaaattttcctgcctaacgggtctgtctccaaaccctctttcctaagagctgagcaaaccaaccataataaacttgacaaaagactttgttgtggccatgacagagataccgactcaggagggctacctacctaggtgtgatcatgctgggggctaccttctgagtatatttgtgaaagcacatatttgggaactctggtagcttgagttgggaatgggaaggttcttttttacagaagtacttccccagggacttctgtgtgtcacagtcacctctgatgcctttatcttgatgttgcattgggaatctcagccatcagcccaagtgcttgttttattccaaggcagggtaatccccgtcaacttactctaacctttgctgaaaactaatcttgattcattctactctggaaaatccaaaggtgcttctgagagataagagggaaggggtagaaggaaaggtgccccttgaaatgggaattgagcctgttagaattaaaagcttatctcacctctgctggggacagtatttgcaccaccaacccctctcctcacctgctttgagcgataatctttatcagatattctaaacttaaagggattccctttaaaccaactcaagctgatctttcctatctagcctgctgtttggctgtactcatgggctttggtaatatctcctaaaaatgaggttttggtaatttttcctatgcattgggcaactgtgatcgtgaccactgtgctgtcttgctccagccactgccctggcctcagcatatcagggcagcctgtgctggctgcaatactgtggtgcttgggccactgcctgagaggagccaggttnnnnnnnnnnnnnnnnnnnnnnnnnnnnnnnttgtacagattcaagcaatggatgcaaggaacatgctgtatgtaatagaagaaagaagtccacgttttcggcagaagtagtgagtcagtgtggaagagaggtgagggtgtgctttactttttgataaagagaaagatgtttactcataaacccttcaaaaggtattaacaaaatgtttaccaaacctattgctttattttaaaaacataatttgtgttttctatttgtaagatctgacatttcgaggcaataaaaacttctcagaaagt

SEQ ID NO: 265355 - DNA, 338 bp, Homo Sapiens
gtgtgagccaccacacccaattgcttactgtttttcaaatgtactttccttcactttgttctccagctgtctggcaggagtctaggctatgataagggaccaacatcatgctgcactcaggccagacaaggagctgggaggtggagcaagaaggttgaagggctatgaaaggcctagttcttcacctctggtttaatacgagcgattctatttgagaaggtgggctaactctccaaggaagggaaggggaatgaaattgagacaggggagctctctgcctgccctcaggggacccctgggcagacaggttcatcagatgcacaggatatataatcgct

SEQ ID NO: 265356 - DNA, 199 bp, Homo Sapiens
atagtcaagttcacataaccacacgtagtcgtttcctaacgtaaaagagaaaaaagagtggtgtcatgaaaacaatgactggttccacttgtagttcatgcagttcaaataactacacaagcttttcctcatgacagccatgatacttcagtttgtagcagatatgctttatgcaaacttcccagtttgtcagataacc

SEQ ID NO: 265357 - DNA, 565 bp, Homo Sapiens
  misc_feature (485)..(493): n is a, c, g, or t
gctctggtctcagtcttgtgatttactcctagaggtgctggcaagcctgagctcagatttaggaataatgggggttggggacaggagaaggatgagatagggactagcagctgatgaaaagggaagggggggacatattcatcgtaggggtttcaggaactccattatctcacactcagcccctttgtcatctctgggatcaacacagtgttatcatcgatcagcccccagattcacttcagtgaatctgtaaagaacaagcatgtcctcctcatcccacgaattctgctgcttagaaagccacctgaaagtgatagcccttaaagtcctcagtctgcccctttagagcaccacagaaagatccctgaatggagatcctgacccttaagtatggaactgctgggaagagctatttggagattatcattacatggagggttagtaacatcactttctcttccctttatcctcatttttttcccttnnnnnnnnncacacacacccacacaaccatttctttgctatttgctgttggtatccagtatgccattgctttcttaattaa

SEQ ID NO: 265358 - DNA, 302 bp, Homo Sapiens
  misc_feature (39)..(39): n is a, c, g, or t
  misc_feature (49)..(49): n is a, c, g, or t
  misc_feature (55)..(55): n is a, c, g, or t
  misc_feature (61)..(61): n is a, c, g, or t
  misc_feature (72)..(72): n is a, c, g, or t
  misc_feature (168)..(168): n is a, c, g, or t
  misc_feature (199)..(199): n is a, c, g, or t
ttgaagtgccaaaacgaacgtggcgggttccacgtttanccccaagttntgagangccaanccaggggcggngctgctcagcttgggctggtccagggcctgcccaggctggggcacctttgcctcctgagggcagcgcaatcctcccctgcccaagcctactgcctncccgtgccgccagtaccccctccagccccanacctgggcctccccctgccactcccctcccttgctcccctctgtccccagggatcaaacagaaagcaccgtgggcaaaatacaatttcatttaacaaattgaa

SEQ ID NO: 265359 - DNA, 478 bp, Homo Sapiens
  misc_feature (86)..(86): n is a, c, g, or t
ccttcgatatggcgtcatgagcaggctgcctccctcttggtgggtccttccccccaaaccccagaaccctcagtcctaatcacaangaaaatgaccagcccaatccccaagttccagggacatttggcaaaatagcccaccactcctacttaaaagtgtcgaggtcttgaaaggcaaggaaaccctgggaaatcgtctttggccggaggaaactcagcagacatgacgactaaatgcaatgtagaatcctcggacagaaaaggacattagtgggacagctggtgaaacccaagtaagtccaggctgtaccaatgtccacttcccagttctgaggaacatgctgtggtctgtccacatttacattaggagaagcagggagagcgtatatgggacctctctgtattgtttttataacttttctgtaaatccaaaactgtcttaaaatagtttttttaaattatactttaagttctggggt

SEQ ID NO: 265360 - DNA, 387 bp, Homo Sapiens
  misc_feature (14)..(14): n is a, c, g, or t
  misc_feature (23)..(23): n is a, c, g, or t
  misc_feature (32)..(32): n is a, c, g, or t
  misc_feature (61)..(61): n is a, c, g, or t
  misc_feature (290)..(345): n is a, c, g, or t
aatcaaaaaaactncttcctgcnctcaagagnctcccatcattttcccccagtgtgtgtcntccccaaacacttgggaatggtgtttgctttttagtttatgccctggaccgaaagccccacgcccaaatttgtatcatgattagggacagcagagaattgtgccctccactagggtagccacagatggccatggtgcacttgaaatgtggctagtgtgactgaaaaactgaattttaattttattttaattttaaaagtgatgtttggctacacacggtggctcgcacnnnnnnnnnnnnnnnnnnnnnnnnnnnnnnnnnnnnnnnnnnnnnnnnnnnnnnnntgagaccaccctgggcaacaaagaaaaaactcatctctacaa

SEQ ID NO: 265361 - DNA, 658 bp, Homo Sapiens
  misc_feature (45)..(62): n is a, c, g, or t
ttcggcacggccaggcccgggtgacagtgcgagactctgtctttnnnnnnnnnnnnnnnnnngaattgctaaatgcagtattctttggtgttcgctgtgggaaatgtgttctgatgagagggaggcaatccataatgtgcccctttgtatgcagggtgggcaaaacactgcttccaactagttacgtctaagatactaggttatcccactggttaccaaacaactcaactatggtttgctgccttcccatagctggccctgtccttaaatccccaacatcgtctgaaaataatataggaagcttttgaggactgtcttgtttctacccactcacattccagttatgggacccaggcgggcgtgggagaagaaacgggatcgtcaaagtgggactgttcccgtgtggcatgatggcaatttcaagcaaggaatgttgctgaatgctcagagcctgccccgggaccaaaagcttttcatgaacttgggtttcatttgtatttgaacatcagtcatctctcttggggtcctctcttgaaagctacttttgcccagtaggctagaaagtggggcacccgtaggtttaatagcagcatgcagggatgacagagtattaaaaacactttttaaaaagtcattcttactaagtttttgtcatgaa

SEQ ID NO: 265362 - DNA, 466 bp, Homo Sapiens
  misc_feature (46)..(46): n is a, c, g, or t
  misc_feature (64)..(64): n is a, c, g, or t
tgcctgaaaccccctggaggcttaatttccttaaccttaaaaaccntaaaaaattaaatgaggnataaggttgatggatgacccatccatagggttgttttaaccgctgggatgccagtgatgtgtgtgcaaaccccctggcacagcaacttaatacccagtctcctctgtcctgtcttgcatctgctgaggatgaagaaggagagcagttgagtgtggccctgcctggctgggggcccttcctctatagttatcttctttataagccatttatagtcttggtataattttaaggaaaaaaaatcaaggcgctactttgcgatttaaaattcatttttgaaacatactggcagcaaacgccacactattgcagttagggaagacaggagagcaaatgtcaggtcttggcaaagtggggtggggaattttttgagtgtgacatttgaataaagaaatctaaactagg

SEQ ID NO: 265363 - DNA, 411 bp, Homo Sapiens
tccctctttgagtttcagcattaaattgccaataaatgcaattcatttggacagtttgaaatttttaacccatgcatgcatagcactgctgggctctaagagatggcgggaggggagagtccaagcaaaattagctcatgatctacacagtgagtacaagtgacagggataaaacagacaaaggggcttaattggaagtcatgatacttacaggaaactgctccatttccagaacctctgtgggtttatccattcccctctgagagtcatttaattctttggaaaataatacattctcaaaaatgtggtatttctgatcacacaagatcagaaataatatactaaaagctgcccttagtatttgatgctttcattaccaagaagccaataataatcatggccaatatacac

SEQ ID NO: 265364 - DNA, 575 bp, Homo Sapiens
  misc_feature (131)..(131): n is a, c, g, or t
  misc_feature (236)..(236): n is a, c, g, or t
  misc_feature (486)..(486): n is a, c, g, or t
  misc_feature (514)..(514): n is a, c, g, or t
  misc_feature (521)..(521): n is a, c, g, or t
  misc_feature (526)..(526): n is a, c, g, or t
gtaaactaagaatcagcaattaataaaagcaagtgtactctataatcacagacagaaggttcttattttcaggtcagcactccctagaggtgcaaactttatttaatttaaatgcagttgtttgtctaatngggaagctgatagggccttgctgcagttctctaaggtggccaaattaaacttggctggcagctcctgtaatcctcttgggcaactttacagccaagccccaaggntaaaatggcaggcctgggagctgtgagtgtggcctccccacagagggtgactccttgagttcagtgagggaaaaccacggtgcctgggcagtggtcagccagggagtatgacttggcccactccttaggcatccagaagtagggaaacacagaaagcattccacaaaacggggaatctccccaaagagctagaaacccaggctggaaggaaatggcagcgcaggcaaagagagcaagagcaccctgggtntccctccatcccgtttctctggggaggnttatgangtgcntcttcaacagttaattccgttcattgcttatcacagttcacgagttctg

SEQ ID NO: 265365 - DNA, 404 bp, Homo Sapiens
  misc_feature (29)..(29): n is a, c, g, or t
  misc_feature (38)..(38): n is a, c, g, or t
  misc_feature (88)..(88): n is a, c, g, or t
gcactgccccggctcgctttaaaaccccnggccaaggnaaaacagccactggcccggggtgtcccaaatactttacccaagttccagngaatctgcgtgcaggaaaactgagacccatttttctctgtttcaacagaaacttgaaaacccacccctgacaacatgttagtcccctggaagtactcaattacggtgaaaagccatcggcaaaagttaaagtaagtaatatgacagtgagccatgtaagaagtaaaggtgagtggaagattatgaactacataaaaggcacaatgatctgagtctagaaaggcaatctggaagcctgaaaaggtacaaatgggtgcaattctcttagaaagtaatgggcaagtaaatgtcaaaagcgtttaaaatattcataaccc

SEQ ID NO: 265366 - DNA, 450 bp, Homo Sapiens
  misc_feature (307)..(307): n is a, c, g, or t
aacgatatggcaggagcagtcttggggcccgcttctaccggcagatcaaaagacatccggggatcatcccgatgatcggcttaatctgcctgggcatgggcagcgctgcgctttacttgctgcgactcgcccttcgcagccccgacgtctgctgggacagaaagaacaacccggagccctggaaccgcctgagccccaatgaccaatacaagttccttgcagtttccactgactataagaagctgaagaaggaccggccagacttctaagccaaggctgggctggccatgtgccatgcaagccacangccatgccatgcccaatccacttcttccactcctccccgcaaggccccaaaggcatcactccggccaccctgtcccgctactgcttacacaggccgggttcccacgcagaggggaggctgctccaacccctactctcctccct

SEQ ID NO: 265367 - DNA, 440 bp, Homo Sapiens
  misc_feature (413)..(413): n is a, c, g, or t
ggtttggtaccaataattggtaaagctgatgtaattctaagtttttctcatccagcgcataggaaagcttgcctataggtatctgatttaattattttgaatagtcaatgggctaaccaaggagaagatgaggggatcaaatatctgatgtttaaattaaactagtattcatctctttactttaaatttggtctcttaaaggtctcgcattttgtttcatttgtagtgccacagtttcaggattaatgggtattctttcctttcagggctttaaatgaaggaaattgttaataggaaagaaggaatgtaggatccaagctatttaaaaatgggtcagggctctttcttaaaaccaaaccacagggtactttggaaaaagtgtgtcctcttaggcacccctatgggtcttcaangacaattttggttaccccagggaaagg

SEQ ID NO: 265368 - DNA, 381 bp, Homo Sapiens
  misc_feature (347)..(347): n is a, c, g, or t
  misc_feature (366)..(366): n is a, c, g, or t
ttgaaagagaaggggacaaaggaacaccagtattaagaggattttccagtgtttctggcagttggtccagaaggatgcctccattcctgcttctcacctgcctcttcatcacaggcacctccgtgtcacccgtggccctagatccttgttctgcttacatcagcctgaatgagccctgggaggaacactgaccaccagttggatgagtctcaaggtcctcctctatgtgacaaccatgtgaatgggggagtggtaccactttcacgggcatggcgggagatgccatgcttaccttcttctttaccagaaaaccactgtgggaacccacggcacctgtctgggttcantgggcagccaccccttagnagggcgacggcattt

SEQ ID NO: 265369 - DNA, 362 bp, Homo Sapiens
  misc_feature (11)..(11): n is a, c, g, or t
  misc_feature (341)..(341): n is a, c, g, or t
  misc_feature (349)..(349): n is a, c, g, or t
aggttaaaggngggggggctggaaaatgcagacaccaaagacccttcaatatgaggccaagaaaggaaggttcagaacagggaaaaggaaggcttccatgatcctggccacaatcctgtgaattaggttttagtattctcagtctgaagataaggaattattgatacaattcagaaaggtagagcaacttgctttaggtcacacagtgaatgagtagtgcagacaggattcaagtctgtcccccttgattctgaagccaaagctctttttcctgcttggtgcagtgcagtgggaggcatggggttgatgagaagcctaggcagaggctttttcctgccatnccttcctnagttttccccttt

SEQ ID NO: 265370 - DNA, 664 bp, Homo Sapiens
ctcaaattaaaggccacatatgtatccagcttcaaaggcagtgatctttccctctttgctagagctgggcttctgtctgtaagactttcttcctgactctcaaaggcctcctgataccccctgtaatctgactgtagcccagaccagtttctgtaggttgaagagtggcctgagaaggaacaatacccctacaacatcctgccctcagaagaaaggattgggagttgcggttgttttcttgaaatgtattattggtaggctggataatggcttgggtatgtttctccctcttttgaaaaatggcaaataaaacaatactcagctatagtgttaccaacctggggatggaagcgttcgcctgagggatatttgaactcctccagagtagtttatgtaacaaggcatcactaaaccaaatggcattagcaggtaatccctttttgccatgtcatatggtaacaatgcacccctgctttctcacacaggactaatgactgatggaagaagggaagaggtgagcgaggctgagactttgcttgcagataggcctgacttggagtttgggatccttatcttcagcgccagtacgcctgtttagtccagaaatggagccacacttttcataagaatagctgtccaccccagtctgtgggattccagtggc

SEQ ID NO: 265371 - DNA, 742 bp, Homo Sapiens
agttccaggctgcttttgctgctctgcctcactggtctgttcggagtatccacagctgctagcttgcagggttgttgtgaatgagacaataaatactaaagctcctagcatatggaaagagaggatcatgcaaaggaggaagtctcttctgacttggtgtcttcttcatgaatgtttgggccaggtgtcttgagtactcattctctctggcctgcctatttcccttgttctttttcttatttccaaattttctatattgaatttcatgccaaagtggcctgtggtagatatgggcagggagcaggtgaggtaaagacaaggcttgtaggtgacaaaatcctccagacacaggggagcatgcggcatcttctggctgatggttatgtgtgttaggatcagtggttatgatgtctgtaacttgcgcccagaagctccagagagcatgggagccaacttggatgacaggagagtggtcagagcatgccaaagccctcgcaaccctcgctgatggccagctgcagcatcctgtgcacctcttcataggagtcatatgtagggaggcacagctggttaaaacatgtgtgtgcagtaggcagcgtgctatgggtcggagcggcaataatctgaaatgagggacagagggcgcaaagcctccaggtggtagctgagaggagcctgttgtgaactgaagtagccgagccaactcctcctgggtcagactggaaaccacagtccaaaacca

SEQ ID NO: 265372 - DNA, 1058 bp, Homo Sapiens
  misc_feature (719)..(719): n is a, c, g, or t
  misc_feature (733)..(733): n is a, c, g, or t
  misc_feature (977)..(977): n is a, c, g, or t
  misc_feature (1014)..(1014): n is a, c, g, or t
tttattgcaagaaacagttgagttaaatgtttgtttttggaaaggcgggatgtcagttcacatccttggtgtgtgtaagtaccgatgcacgccaccaccatgcctgtgttacagcagctccatgatggttgttgcccgaggttaatgtagttgtttgttagacctgtgtcttacacatttctcagagtaggatattagtattataatttaaagctacgacagtcacaaagtcacaataacttagaaacattgcgcatattcttctgaaatagcacttaaaaatgattagtgtcagtattttttcacttgggtcaatcaaatctgtaacactgaatccaagctattaaacaaaaagtatgcaatgaatgaattttgtaaatgaatagagagtatcagtttacaataatgttcttaaaacagtatcctctggatagttgagtatgggttagaaatcattgaaatggattggtcagaaattgctatctgtgtaaaatgtctaccagtagccagatgctttccagagttcttaatgcctctctggcatttcagagccagcatcccccaactcccacccctctgccatcacccaacccaaacacatcagctttcaaatgagatgatagtaaatgcggcaatgttaagacaagaaatttatgatttgccagattcaacatttatgacctccccttccaaagactgtcccccgttgaccttgtccnttttggtatgcccntggggtttctgataatgtgtggagtccccattatggcctgagagtttagtgttttcacagtgaagtgcagacatttgatttctttatgagttccctgtgttagaaatggctatagaaaaatttgtcataataatttcatttgcatgaaatcctgaggggtgcattaaggaaactaaaagcaccacttaccaaatctatcggcagaactgatgtgaggtaagtgagcatgtcaaacaaaataggngctcacatggatatatttatgtcactgagttgtcagnaattatgtcaaaatgaaaactgtttgtttcatgacaaattatat

SEQ ID NO: 265373 - DNA, 179 bp, Homo Sapiens
  misc_feature (72)..(72): n is a, c, g, or t
gtcccccaacaccatcctaacaggccaagaaggtaaaactacattgaacacaaataagaaactgaggaatgnattaagcaagtgaagactcaaaatctggcgacacagatgggtatgttgggtatccacagcagattgaagcaaagtgctgccctagtgcaagcccttagaaagttctg

SEQ ID NO: 265374 - DNA, 696 bp, Homo Sapiens
taatgagctatgtagtgttctaaatcctggggctaaagctgtgaacaaagaaattgctgcccacacagagcttctgtttttacaggctggagacgcgataaatatgtagctttttagatggtgaaaagtgctttggaaaaaaataagggtaaaagggattgggagtgacagggtgggtggtgcaggggacttacagtttcatgtaatgtggtcggagagggctttgttgataagaatacatttcagtagaaaatgaaaagatataatgaagtgagtgagctatatggttatcggagagaagagtattctaggcagtgggaacagtgagcgcaaaggctctgagacaggattgtgtttgccacttataaggaccaccagtgaggccaaggtggcaagagttagatttggggaggtagcagggtctccagatcacataggcccttaggagccacactaaggacatggactcggctggggcatgatggaaagccttagtggagtttttagcagaccgatgcaatgatctgaagtttcagttggttcagcctggttgctggatagaataggctctggagaggccaagttagaagctgaggtgggaggatgacttgagcccctggagattgagtctatagtgagctgtgatcatgtcactgcattccagctggggcaacagagcgagaccccatctccacc

SEQ ID NO: 265375 - DNA, 1006 bp, Homo Sapiens
  misc_feature (55)..(55): n is a, c, g, or t
  misc_feature (70)..(70): n is a, c, g, or t
  misc_feature (95)..(95): n is a, c, g, or t
  misc_feature (163)..(172): n is a, c, g, or t
caggggatttgccccaggggcccatttctggggccagaagggaaggcattgcccnataatgggaaaggcnaattatagggacaacatggatgacnttcaaaacttttggaatcctgtcatgagaaaaaggcaatagacctgtggccctactccttattggagnnnnnnnnnntgaaggaatttcttaaagtggaaaaaaatggtcttagctcctgtttttacctgcaacaggtgtcaactgctgattgagcatccccattggtgttggtggtggcaccaccccccatgagagcccccacaggggtgcctgctcggggagaagcactcggctgctgttgctgtgctgctcgctctctctcctgctgctcagcaactttagctgcccgctctgtaaaggcatttcagattttcaattctgtttttaacccaggaattcaaaataccatccattgcattcaacaggactagtaaaaacacaggcaacagttctgtctcaatggaaggaacagtagatgactagtctcaacacaggaggagtcgggccgatttcacttggtaacctagagtccagctttcctatcccatcttgagaactggtctgcaaagatttcaagaatgttaagactgcaacacacattcagaaagcacaggttttatgtaaacacgtcaccagcataaccaccatggttaatctcacgaggcaccctgaagatgagaagcgctaccattattctagtattaatagcattacagattatttataatttcaatatgaagcaattccatggcccattataatttttggtacaattgttacttactatatatatttcctgattctttgtacccaattttactaagatttgaggactcatcacgagtgtcatggagtttagcagctgaagaaaattaactctgtaagggaaaagtagctgactgcctccttcagaaggttttagggaaacaactaatttctacattctaatgaagcaaagaagtcatgttt

SEQ ID NO: 265376 - DNA, 614 bp, Homo Sapiens
  misc_feature (514)..(514): n is a, c, g, or t
tcttaaatatgtgactgggatactaacagaaaatgcagtttaatgtaattaaatagaaaagcattacagagtgggcacaatgaattgaataaggactttgtattctatttagcagtcatgcacattggtgaccaagaaaggatttacaattcattgtcaaaaaatccttttaaacggtcagtcttttaaggatggctgcagcagaacaaggcaaactgaatactggaatgagatgggaaaatcaacaccacctaaagactagttttgtgttttctcttgggagtccctctagaacagaattcagggtctactttcatattttctgctatagtgctctatcaagagcaggctggggtggaggaacatcaccagaccatgcccacagccagggaagagctgctccctaccaattaccagggttgggccagggcaatttctggggcagagggaggattgccatatggaaaggaatataggacacatggatgactcaaactgtgatctgtcatgaganaggcatagacgtggctactacttatgagaaaaaaatgaggattactaagtgaaaaatgtctactctgtttactgcacagtgcacgcgatgacaccatgtg

SEQ ID NO: 265377 - DNA, 141 bp, Homo Sapiens
aaaagtatgttgtcctcattcctattgagaaagttatacaacatacaggccttcctaggtcctaccccaggcccatcctagtttagtcaagacagctgtgtaacaaacgtagccttgaggcccggcacggtggctcatgcc

SEQ ID NO: 265378 - DNA, 209 bp, Homo Sapiens
  misc_feature (174)..(174): n is a, c, g, or t
  misc_feature (191)..(191): n is a, c, g, or t
tgaatgcttccaaatgcaggaagctcaaagattaccaaataaatacaactcaaaaaggtcttctccaagggcacattatgggtaaaattgtgcaaaagacaaagaggaaaatgctaaaaacagcaaggaggaaggacatcaagtcactttttaaggggattcttccatcagggntaacgggggtttcttcngcaggaacctttacaggg

SEQ ID NO: 265379 - DNA, 674 bp, Homo Sapiens
aacatcctcctctgatggccaaagccctggaatcaagggtttccacgtaccctgcctaatacccgacgtagctcttgatgcaccgtccttgtgctgtggctggcggtgtctcagcctgaaacataaaccccacatgccccaggagcgatgtgctccctgaaacagacaaccacacgctgttggggagagaaggatggagataggatggagataggatggagatgtggctcttctcatctttgaagccagcagggcatcccggagcaggaggctggccgggctccccaagcgaaggcgttggtgtctgtcattaggtgtgtgttagggtgcagcaccggccatcacaggatgctgataagcgcgctgagaggtggatgaaacaccaaagtctgtttccccgtccgcagtgggtgttgcctctttgtgtgtgtcccgatgttcctgcctgtgagtcggccttactccgtttccttagcgcccatgacacgccaagtcccgtttcgcactcggcttctcacccgcccagctcggctagggagggggagtttttagcacctaatatgcttcctgccattgcgcaatctgagcctgagcaactggaaacccccatttctcattagtgcaatgtcatatctgatcccaggaagcctggaaaataaaagacgatgcaattt

SEQ ID NO: 265380 - DNA, 352 bp, Homo Sapiens
  misc_feature (126)..(126): n is a, c, g, or t
  misc_feature (152)..(152): n is a, c, g, or t
  misc_feature (229)..(229): n is a, c, g, or t
  misc_feature (245)..(245): n is a, c, g, or t
  misc_feature (278)..(278): n is a, c, g, or t
  misc_feature (315)..(315): n is a, c, g, or t
  misc_feature (326)..(326): n is a, c, g, or t
ggcaataaggattgtcttaggctcctctgaaacagaccctgaaatgaaggttcatatgcaagtaatttattaagaaagtgctcccaagagaaattggtaaggaaatgaggtaagcaagacagggantcagtagttgtcaggcaacagcaagntcaggaaaagtcccagccttgacttaatcctgtagggagctcaggaccataagttacaacctcaaagtttgttcctncctcaagactagggantctggggctttcaagtccccatgaaggtcgccntttttgactaggggggtttttaaggctaaggcagctnttaggttaggnccaaagggtcatcccctgggggggga

SEQ ID NO: 265381 - DNA, 424 bp, Homo Sapiens
aagtagaatccatagctcaaaacaagttttaagcctgagaaaatataatttgaggtgttttttatgctcctaatgaaaagatgaatgaatgcatcattaaaccttaacagtagagcagaatttcactgttacaaaccacatggggtcccctggttgtgctgctgttctctacctgtgtgtcactgagtttgagcatcattattgtttgaatcagaggacccactggaatcaaggcttcttggaattgcgcaagaatctgagaaaacttcaatctttaccagcatttcttaatgctttccatgacttttgtgcaattatataagttcagtttagacaaaatgctgttactttttaaggcattactaataactgaaaatagttacgtcattgcccatcaagggaaaagcacttgtaactgtcattt

SEQ ID NO: 265382 - DNA, 603 bp, Homo Sapiens
ctctagctaggccagaaccccacagtctttgaacactgtaagacctctggtatttttgttcttcatttaacctcacattcatgctctgctgggccttgatgagtcttgtgcacatgtgcagcctagccctttaacaatgacctatttcgaactcccacattgacttctgtcctcgttctgtgcatagctcctccatcttcagtgccctaccaggtaaatcacagctgcattaacagcccccaaatttccatctctgtctcatcagtgcagttacaccgtcatgatctgcttggtttcaaactccccgccacaggagaattttccccacccatagggcctgggcaaacatgaggctctcaccctgacaataccttatgtctatgagaaactctcatacactgtttgtgggaggagaaattggagttaggactctggcaaagttttggcaggttctattaagctgaatatgaacattcagtatgacagtaattctctctgtcatataatcatcctaaaagttaacatgtgccaaaaggcatatagaaacgctaattcctaatagcccaaactggacacaacctagaaattaaatcaccatctcaa

SEQ ID NO: 265383 - DNA, 281 bp, Homo Sapiens
attcaaacttttaatacaggttttgagttttgtgtgacttgaatttttaatctttctgtaaaatacgtaacttaaatgaacatattaaatgtgtatcttttcttcagataccagatttgatataatgttgtaacataggtgtgtagatagtggatcctggatggaactggcttctttatcgagaagaatataattctgcatgaggacttaatgaatccaaacctgtgtcatgcctgtgtgcatacccaattaaacactggaaataaaaattgttttggtga

SEQ ID NO: 265384 - DNA, 416 bp, Homo Sapiens
  misc_feature (36)..(36): n is a, c, g, or t
  misc_feature (86)..(86): n is a, c, g, or t
gcccccttgtggacccccaagttctggttcaccctncctatatggagttgtgttcctggtccttaagggaacttaccccttcccantcccatcactttcctgcccatcaaaactttccctttcctgttttcctaagacaatatcaatggctgtggatattgaacaattgtctgataaaagtgatttttgacattaaggatctaagtgctcatatttgagagtctgatctagtgaccctcatgaataacaatcacaccttacttagtactgggattttccctttacagttgatgtttacttacatgattgacctgcgtaacagtttaaaacaggtaggaccacgaggtcaggagattgagaccatcctgacaaatatggtgaaaccctgtctctactaaaaatacaaaaaaataata

SEQ ID NO: 265385 - DNA, 716 bp, Homo Sapiens
agtagagacagggtttcaccatatttgtcaggatggtctcaatctcctgacctcgtggtcctacctgttttaaactgttacgcaggtcaatcatgtaagtaaacatcaactgtaaagggaaaatcccagtactaagtaaggtgtgattgttattcatgagggtcactagatcagactctcaaatatgagcacttagatccttaatgtcaaaaatcacttttatcagacaattgttcaatatccacagccattgatattgtcttagaaaacagaaaggaaagttttgatggcagaaagtgatggaatggaagggtaagtcccttaagaccagaacacaactccatatagaaggtgaaccagaacttgggatcacaaaggagcccctctggccctctaggaatcagagcatactctgtgatattttccctcgcagcctagaagtcaggagacccccaggtctagtaaccatggacacctcccctcaccccttggggcctcatattctgtatctgagaaggtgattcctagtcattggttttctataacaaacacctcctcggttgattagggtccaccgtttaacaaaaatagacacatgggcaatgggaaaactcattctagctgagttagggcatcagattttgatcgaagtcaaaaggggactagaatttattaccaaacagcagcaatagcagcagctaagtttgaaacagtgc

SEQ ID NO: 265386 - DNA, 353 bp, Homo Sapiens
  misc_feature (48)..(106): n is a, c, g, or t
tccacccagttggccccaggatggtctcaaaactcttggacctcgtgnnnnnnnnnnnnnnnnnnnnnnnnnnnnnnnnnnnnnnnnnnnnnnnnnnnnnnnnnnntggccttgttcatcttcctaattaaatatcctttgaatgttttgtaataattttaatgttgacaataagagtttaaaaataatttgattttggactgtatttagatttctctttaattttgctgtagaaatagtaaatgatttaaagtggttatgatgtgttttatgaaggcttactattttatattgtacttatttaatttgtatttgagtctgtctaattttaaataaaaggtttatacatttga

SEQ ID NO: 265387 - DNA, 478 bp, Homo Sapiens
ggcacgagcagatgatttcccatccattgctgaaacccagggctgccccattgtacaacctcagggaataccattttcacgtgactttcctggagcacagcagtgtgactggtgctccctggagctgggcagcacactggcctggctatcccagtattactccccgtactttgctgcatctgcttcaatgctgcatttcattccctatcttggttaatggtcccatcaaaaccagaaacctggggagccatccttgattccctccttttcctcactttcctttcccaagtctggttagttttctctgccgaaagtggacaacttaccttctctttttcctcatatctaccaccctgatcccttcttgcccactgaaacaattgcaccagcctcctaattgatctcttagctatcgtcttccacatcactgctagagggactgatcagaagggcaattctgaccatgtcagtcgtcatt

SEQ ID NO: 265388 - DNA, 574 bp, Homo Sapiens
tcacacataatctcttactgtggctcataaaatccctgtaaggcattaactccatttttcaggggtgtaaactgaggctcttggagcagacatgctctgcccacagttacagagcagggttgtggggagggaaagctggaactcaggcttcccaggcgccgctgacatgtgcctcctccatattgacatctggtttttgtggatggaaggcaggcactgatttccacaagtaaaatcctgcctttctacccacctaaccccccctgctcttgcagtggcaaaaggactgtcctatttgtatttccactctttaatatgtaaagtagaatgcagctgctagggtctcagtcagctcttgctaacaaaatcaaatccaccggctttctctggcaggcagagccagggcatgtaatctatggctgcttaagggagcggctttctggtgaggggagcagcctgcagtctgctttaattgtggataaaccatgcacgccggatactccaggtgggaagaggaaaatcctagatttgggtatgagacacatggggattagtggcagataaataaaattct

SEQ ID NO: 265389 - DNA, 463 bp, Homo Sapiens
  misc_feature (18)..(18): n is a, c, g, or t
  misc_feature (431)..(431): n is a, c, g, or t
agaccatgcccccacccnggaccttcctatttatatactgtgaacatccctgtcagctgccccgaatgttggttgcacaggtgcctacaagagcatagcccaacttgatagaaaggaggcaatttgaaacccaaagagaataagcgtctacctagaaaaatcctcagagggtagaagccatcattgcatctatgcaggctactggtgcagaggaagcacagttacaagaaatagaggagatgatcacagctcctgaacgtcagcagctagagaccctgaaacgtaatgtcaacaagttggatgccagtgagatccaggtggacgaaaccatcttcctgctggagtcttacattgagtgcaccatgaagagacagtgatccagaagaagcatcttcctcagaagatctggggggatggaaagcaaaataaanggaggtgcctggatgcattatttgcagtggaa

SEQ ID NO: 265390 - DNA, 415 bp, Homo Sapiens
  misc_feature (44)..(44): n is a, c, g, or t
  misc_feature (297)..(297): n is a, c, g, or t
  misc_feature (357)..(357): n is a, c, g, or t
aagaagaattgaccatgcaaggcaggaagaaggacattctaggnacagcaaatcatgggaggatgagtaagcattgcatgttttggaatggtcagtggtgggtgagaatggaatatggagttcttggagaaagcttagtgaaatgagatttggggtggaagacaggtaggtaggggctagattaagggaaggccttatatgtcattccaaagtctttgggattttaaagttcgctttcaagggtttttcaagagaaaggcatgtaatcagacttgtgttttagaaagatcatatggntggcagtgtggaagaagtggggtgggacgacagtgaaatctaggagtaaaacccaagctngccccaaggtgtccctgcaggctgttaatgcagtttaatccagagtgccctttttttt

SEQ ID NO: 265391 - DNA, 331 bp, Homo Sapiens
gagagctagcaccatgagcttcaacaccctgtacctactacaatttcagaagcagagctgcctgctacagcaaactggaaaatgtgatgccttcgtgaaatttcccgtcgctaaagatactctacacatgccccttgaccaagaaatagcacttatgggaactctacagatggatttctacacatctgaagtgatgcattggccacactattcttaatggcattgtttgtaatggcccccaaattggaaatcacctaaagtccatccctacaggacttgtttaataaattatgaattatccatactttacatctattaaaaaatgaatact

SEQ ID NO: 265392 - DNA, 502 bp, Homo Sapiens
caggggctgttgaaagttgccatagataatgccagagctcaagagaaacaggtccaactggaaaaaactgagctgaagatggatttttttaagggaaagagaactaagggaaacacttgagaagcagttggctatggaacaaaagaatagagccatagttcaaaagaggctaaagaaggagaagaaggcaaagagaaaattgcaggaagcacttgagtttgagacgaaacggccgtgaacaagcagaacagacgctaaaacaggcagcttcaacagatagtctcagggtcttaaatgactctctgaccccagagatagaggctgacccagtggcggcagaacagatgctgaaaggacaatacaagatggaagactgtatttgaaaactactgtcatgtactgaatctttcctgttgaagaaatccatgttatagaaaagaactttgcagtcagacattcgtcatgggaaagttcagaaaaaaataaagtccttttaagggaa

SEQ ID NO: 265393 - DNA, 250 bp, Homo Sapiens
tggagtgagagggtcctcctggtagctggtggtgttggattatccccattgaagctgggacagctgttccctttcctcatagtgataacttgggtctgttgtcctctaaggaacgtgaaacatacacttcttaagctgaaccacgtaaacttgaaattctgcgcactgggagaaatgtgtcctgtgtttcaaaggataaaactgttctaaaggcttccagggtcatgatgggatttttttaaataaatgc

SEQ ID NO: 265394 - DNA, 498 bp, Homo Sapiens
  misc_feature (91)..(91): n is a, c, g, or t
cgtccaggcctccattctagaaaagctcttctagcctcttggattccagattacacaaagactgttcccaacttgactgagagcagctcgnagtccatccagagcttcctgcagtcaatgatcccgctgtgggcatccctgaggtcaatgtctcggctcgaggtaagtgtttaaaagcccctcatgaacagcaaaggcgtgagcctcttcgacatcatcaaccctgagattatcactcgagatggcttccctgctgctgcagatggactttggcttccctgagcacctgctggtggatttcctccagagcttgagctagaagtctccaaggaggtcgggatggggcttgtagcagaaggcaagcacccaggctcacagctggaaccctggtgtctcctccagcgtggtggaagttgggttaggagtacggagatggagattggctcccaactcctccctatcctaaaggcccactggcattaaagtgctgtatccaag

SEQ ID NO: 265395 - DNA, 468 bp, Homo Sapiens
caatgtttatgtcattcagcctttactgtaaaaaaggaaacaataaaaacaaaaccctattaataaacacaatgcaaacaatgcccgagattatcataaaaacatactagcaagccacaagtaccagagaggggtgaacaggcatatctgctagctctcctcttgcagtcctcagcctcccacaggaggaacaaggtccaaactattcccctagccccagcccctcagctgtggggagaggccacctcctctgatggggtctcgatgctgctgatctgttcctggtctggaacgtcctaccacttcctgctccaagctgaagttctcgagctcctgaaaaatcgcatccatgaagtcctgggagttctgtttgtaagacacagctaatcgaattgcatcattgaagagcttcacaacattggtaccatcagcagccgagacgaaatacaggggcagggagaacttctt

SEQ ID NO: 265396 - DNA, 428 bp, Homo Sapiens
  misc_feature (25)..(25): n is a, c, g, or t
  misc_feature (35)..(35): n is a, c, g, or t
  misc_feature (57)..(57): n is a, c, g, or t
  misc_feature (101)..(101): n is a, c, g, or t
aaccctgacaaaccctcccgagtcnaggaaggatncattgaaaccattgcctgaaancccccaagggtcagagtgccctttgtccctcccaatgatttcanccctttcctcccgtcggggtaaccagaacctgggaggggggatcagatgggacaaattgacagaagtagggcttcaaaatatgggtaataaaaaccctacactgatctaaaggagccatgttctaaccccaatgcaaagaagctaagaaccttgataaaaggttagaggaattgctaactagaataaccagtttagagaggagcataaacaacatgttggagctgaaaaacacagcacgagaacttcctgaagcatacacaagtatcaactgatgaatcaaccaagtggaagaaagaatatcagagtctgaagacaagaaaaaagaa

SEQ ID NO: 265397 - DNA, 374 bp, Homo Sapiens
  misc_feature (268)..(268): n is a, c, g, or t
tccatcaattcagccacactcctgaacctgccttgtaaggctggcagagggaagggaaagcagacagcagggatctaaaatgatgtccactgagagaaaccaaagacttaaataaatagaaagttgtatcatgttcatggactgagtcaattttattaagatgtcaattctccccaaactgaactagagattcaatgcaatctcaatttaaatatcaccaggggttttttgtaggaaattgacaaactgattctaaacttatataggnaaaaccaaaaacctaggatagcccaatactttggataagggaccaaactggggagtcactctcggtggatgtttagggtgcttttattaaactatgggggcatcat

SEQ ID NO: 265398 - DNA, 496 bp, Homo Sapiens
  misc_feature (23)..(23): n is a, c, g, or t
  misc_feature (46)..(46): n is a, c, g, or t
  misc_feature (95)..(95): n is a, c, g, or t
  misc_feature (108)..(108): n is a, c, g, or t
  misc_feature (133)..(144): n is a, c, g, or t
  misc_feature (425)..(442): n is a, c, g, or t
tccaaaagatttccaatgaattnaaagtcccttccagagtaagttntcccaaatggaggggaaaatgtgatctaatccaaagtagatgaacaaangcatttgataaanatttaactcctgtttattagtttcnnnnnnnnnnnngccccacagaacaaatttctaacaaactgggaataaagggacttttaaaaagatgataaagggcatcccacaaaaaatatttatagtggacattaagccttaatggtgaccttattgaaagctttcttcccagagatgaggaaagagacaagaccctgctctcatcacttctattcagttttgtatgtaaagctctattgggaggctgaggcaggaggatcccctgaggccaagagtttgagacttggcctgggcaacatagtgagacccccgtccctacnnnnnnnnnnnnnnnnnngttctagtcagtgcagtaaggcagaaagagagataagaggtataaaacttggaa

SEQ ID NO: 265399 - DNA, 491 bp, Homo Sapiens
  misc_feature (226)..(226): n is a, c, g, or t
  misc_feature (231)..(232): n is a, c, g, or t
  misc_feature (235)..(237): n is a, c, g, or t
  misc_feature (239)..(239): n is a, c, g, or t
ttgaatgacaagctgagttggcagctacatccagagttcatgccatgtgagacctaccttaaaggatgaacgaagctgggtgcagaggcctcaaatgccctgctaagaaatagctgatggccttggggaactgtcatacattttaagcaggaaacagaaggatctaataggaactttagtttctctcttgtcaaattaaagcacacaaaaagcaaggacttgatcnttttnnttnnntnttgtataacaccaatgtcaattctagcctgtcagggcaaattcagtaattaatagctgttgatgagccagtcattctagattgattttttaaataagcaggctaataaatgagaattgacataaatttagggatgtctcttttcagagcaagtgttaaggtgattttcatagtcttctgtattccctatgcatccagtaggtgtgatggtaaatgatttggctttagcatagagaatgtggcagctgattaa

SEQ ID NO: 265400 - DNA, 307 bp, Homo Sapiens
agcccttctctcctcccagcccggggacccccgcgggcccccagaagcagcccagttctcagagagcccttggaaggggtctcggtggagctgtgcaccagcagccaagcagaaagaaacacgcgacatggactctgtcaagtagaggacagaaagcaagaaaggatgcagaactgccttcctccccctgaccccgcccccgtcactgcgcttctgttataccatctttgcctgactctctccggcttctccattgaatggctaatgtgtatgtgaaataaagaaataaagaaaaacaaacgcgaaa

SEQ ID NO: 265401 - DNA, 337 bp, Homo Sapiens
  misc_feature (223)..(223): n is a, c, g, or t
aaacacgcgacatggactctgtcaagtagaggacagaaagcaaagaaaggatgcagaactgccttcctccccctgacccccgccccggccttctggggaaggaacaaagtccccaaacaaagcaaccagcacaattctgaagggccctggcctccaccctcaccccttcctagggggaaccccaccctccacacagccggagctgccctagggaccctggagnggccagcttgtaaagatgatgggggtttagatccctcaggctctcccctccagactccgcccttccctccctccttcagcccccatcatgggaataaattaattttctcaatgt

SEQ ID NO: 265402 - DNA, 462 bp, Homo Sapiens
  misc_feature (415)..(415): n is a, c, g, or t
tagatggctattcatatgaaaaggaagcaatggaaaattggatcagcaaaaagaaacgtacaagtcccatgacaaatcttgttcttccttcagcggtacttacaccaaataggactctgaaaatggccatcaatagatggctggagacacaccaaaagtaaaattgttgatattgtattatttatattttcagtgatctcatttgaatgatttataggtaaatactaatcagacattattaaaagcaaaacaggaaaaaggtaaacttcttaaatttagttacctataaaaattgtcaattttcattctttaaaaacacatggacttactataaaagcctttttgtactagtgaaaagaatcttcagctatatagaaataaagttatactttaaattgcagtgtcctaagttttntaaattcctcttactatcattcccaacagtgcgcacatttattcttg

SEQ ID NO: 265403 - DNA, 805 bp, Homo Sapiens
agagctagcaccatgacaaccctggccccagcgatgcgcttggtccagggagcgagaataaagttagtggagaatggagtcacaagttgggattcattctccatgtccccactccccgaacgcatctcctggtaatgagctggtgcttgtgctaaacgcctgagaattcttgggaggccggtgtctttccccctcacttccccgtactttaccgcaggcactttaaatttgaacctgcgcattttgtttctttactcctaggacttggatttcagacctttgtcctgctcccggtccccccagatgggtccccgggggggcgttgggggctgtcgctgggctttgcgggcaggctggtgacagattgaagcgcccaggtctgtggctgccccgcgccgctcgaccgcaaagttcccgctgctcaccagccaggagtccctggcatttcattcagtgtcatacagccctcctgaaagggagcggctgcttccagctccctattcttttgaaagtgtgatttaatatgtcagtaattgatgatttttctgattcctgccttacttttacatggtgcttcttgttagaattatctttgtgatgtttattaatgactttgtattttatctgcacagctttaatttccaggtagaggctggaatcccttataatttagaggtatcttaaaaatggaatcattatgcagccctgcatcaaaaataaacattacagaagaaataaaatttagctccaagaaatataatattatgtagtacatgtattttaagctagcacatcgagtatgtgg

SEQ ID NO: 265404 - DNA, 657 bp, Homo Sapiens
ggccgcttaattaagatctaccttgatagaccttaagagaaatgagctcaaaattatttggtcccctatttgtagaatatttcctgtggcattttaagtttttctctccaaactaaggtccctccagaaagaacgtcccctggcgtttcactactactgtaattgtggcaccccctcccctggcctaggcccccaagtgctaggtttgttcatctttctcctatcacatccacaaacttctttgcctcttaggaaagcttttaacttagttggagaacatgctggtgatccactgaatctaatttgtctctcctggtttagtgcaattgaatcatctcaggaaaatgagaagcaattaggtacctgttgctaacaaggcactgaaataatctgccaacagacgcacggtgtttatttattattggagtatgtcacttgagcaaacattacgttgcctttctccaagaagaattgccagaattgattttcaaatgcaggcctcatagacctaacaagtaccacctttaaggagcatggaacagagaagcaagagggcttgtgagcctcgttcagggttagttcaagtgccagtgcctagcctaatgggcagcgttgtggatgggatttgaagttgcaggacactaaagaaaaagcagc

SEQ ID NO: 265405 - DNA, 361 bp, Homo Sapiens
  misc_feature (30)..(30): n is a, c, g, or t
  misc_feature (41)..(41): n is a, c, g, or t
  misc_feature (92)..(92): n is a, c, g, or t
  misc_feature (300)..(300): n is a, c, g, or t
gggccccccagtacctcctaggaagggggnacaccctctgncccccgggaaaataataccagggaatgaatacctccttccccgtgaccccntctgggtcattccttcccagcatcacaaaaacccaaaaaatggaaatatggccaaatacgtgattagctgtccctcatcttcaggtttcttatctgttacttatagataatagcattaccttaaggattatgatgaagatacaatgtccaaatataaacacagttttgagcaaaatgccttgtatgaattggtcaatgaataattacntaaatatgtgaatatttactggattgtatggatcctatgaataattactgaataattaaaa

SEQ ID NO: 265406 - DNA, 443 bp, Homo Sapiens
  misc_feature (119)..(134): n is a, c, g, or t
actgctgctttttgaggtggcactttttcatttgcctattcccacacctccacagttcagtggcagggctcaggatttcgtgggtctgttttcctttctcaccgcagtcgtcgcacagnnnnnnnnnnnnnnnnccctcaaagtctgcaactttaagcagctcttgcctaatcagtgtctcacactggcgtagaagtttttgtactgtaaagagacctacctcaggttgctggttgctgtgtggtttggtgtgttcccgcaaaccccctttgtgctgtggggctggtagctcaggtgggcgtggtcactgctgtcatcagttgaatggtcagcgttgcatgtcgtgaccaactagacattctgtcgccttagcatgtttgctgaacaccttgtggaagcaaaaatctgaaaatgtgaataaaattattttggattttgtaaaa

SEQ ID NO: 265407 - DNA, 285 bp, Homo Sapiens
  misc_feature (15)..(15): n is a, c, g, or t
  misc_feature (45)..(45): n is a, c, g, or t
ctgcctcccttaagngggtggggattgggataataaagcccccgngcctctgggtcccaagaaccccaaagcccttttacctacctgcacccatactggctggcctaaatcagggacattgggtacctcacagctataactgaccccactccccccacaaaaaacttttttgttgttattaacattttccccatgattttgcatttgcttatataagactagaagctgaagatttatgaaagaaatttaagatggaaaaacttggctggacactgtggctcacac

SEQ ID NO: 265408 - DNA, 475 bp, Homo Sapiens
  misc_feature (437)..(437): n is a, c, g, or t
ttagactttcttcctcttctctgcatacgtttttcccttaagaacttaataactccgtggagcactgtggtaagtgctttcctggctcatggagttgcagatgtgcaatcaggcttaactcaatattgaatgtacatggaattctagagttgaatgcatctaccctgggaattccaaaggaatttttgaaattcagggaaagaaaatgtcaggtttttggcctttgggtaggtttgcccagtgttgatcccttctcaggacccaaatcccctaaaagagcatagggctatcatcaagagggagggtacttacttttatggtttgacaatcagatccgggtcagtttcaaccaaagggggaggagttttgggaaagacagcctaaccccctgttgaggaggattacagtttaggtaggggcttttattaggggggctntccagcagggtattggttttaaccttttccaaaaacct

SEQ ID NO: 265409 - DNA, 524 bp, Homo Sapiens
gagctttgaaatattggaaccatttctaattgctcctgtttttctgggtaacaccagttttctgtagttgccactaaagcagtagactcttgagtctcacttgtctctgagagagacagaagttagaaagttttgacttggcgattccgaaagtatgcctttgttggcacttaaatgtccagtgagacttcttggcaccttagagccctctgagatactgattattttaggttcttctccctactttcagatgttttcagcccaacactgggtgctctcttccactacagagaatcctgaagaaaagggaaggtgtttcccatgatggtgaatgtcactgccatgaattcctgaatctacctgctgctgggagtcagagtccaagcataacccgtgtagcataaaagcagcgctgtagccctattccagtctttttcgttaatgtccagagtgaacaacaagagttagtcaatcattaactgttgactgttgattctcataataaatgcagcataacgaccaaa

SEQ ID NO: 265410 - DNA, 355 bp, Homo Sapiens
  misc_feature (12)..(12): n is a, c, g, or t
  misc_feature (59)..(59): n is a, c, g, or t
ggaggtgggctncgaggaagaaggtgggctccctctcccttcccctgcccctcttccanccttgttcgtcttgagctccgtcaagtggccccagaagaaccagcagatgcgatggccctgtgcctgtggagcagggggccaggcagcatggctgtgtcacactcagccttgcgcctagagctctgtgactctgggcatgagccactcacgggaatgcaggtggaccctgcctgtttacaagacagtctggtgcgggtattgcaggtattaaagcagaaacatcgtgtaccctctgacccacccgttctccttctcagtctctatatctcaaggagatgtataggatgactactct

SEQ ID NO: 265411 - DNA, 406 bp, Homo Sapiens
  misc_feature (31)..(31): n is a, c, g, or t
ttgtgggccaatgttgtcttcccaattcccnacatgggagaaaaatttccccccccaattttaccccaaaggggaaaacttgagggcaaaagagggaatcatgaagaggggggcccaatcaaagtcaccccaaatgtaaggggaaaaaagaccccaactttcccagaccttcccacgcctatgccctgttcttgaatgtatacgggacttgactcagaccactaaaatgacagtgtccctggaaatgaggatgagcaaggggaagactctggcaaaaccccccagaatgtttaggaagcacagctctttgaaagggaatcactgttggggcagtgtggcaactcccactccaggccagtccctcactttcactctttgccacttcaataaagtttctctttcatgt

SEQ ID NO: 265412 - DNA, 693 bp, Homo Sapiens
aaggacactgggacactggctccaggctgtacttcctcaagtttctgtgctcctgacactttctggaaatagaaagggtctttaccttcacgtgggtgactcagaactggagaagcccctccatcttgacctgaaatcaaagcccaagacaccaaagccagaagagcagattctaactgacagcttggggtgccctggaacactaacagcttggggtgaaggcaccttagcccaacaacgtggccagcaaaacaacaaaacaaccagaaccacaccaatgatttccagtatttctctgaggactcggcccacgttgtgggccatgctgtcttccattccacatggagaaacatttccccccattttaccaaagaggaaactgaggcacagaggaatcatgagagggggccaatcaagtcacccaatgtaagggaaaaagacccaactttccagaccttccacgcctatgccctgttcttgaatgtatacgggacttgactcagaccactaaaatgacagtgtcctggaaatgaggatgagcaaggggaagactctggcaaaaccccccagaatgtttaggaagcacagctctttgaaagggaatcactgttggggcagtgtggcaactcccactccaggccagtccctcactttcactctttgccacttcaataaagtttctctttcatgtga

SEQ ID NO: 265413 - DNA, 510 bp, Homo Sapiens
agctcgctgcgcgccgccggccaccacagcctgttccgccgcatcctcagcaacccgtcggggccggatgcgcggggactgctggctctgcggccgttccacacacacagctgcgcgcgctgccccgccaacatgtgcaagcacaaggtgctcagcgactacctgcgcgagcgggcccacgacggcgtgcacttcgagcgcctcttctacgtgggcgacggcgccaacgacttctgccccatggggctgctggcgggcggcgacgtggccttcccgcgccgcggctaccccatgcaccgcctcattcaggaggcccagaaggccgagcccagctcgttccgcgccagcgtggtgccctgggaaacggctgcagatgtgcgcctccacctgcaacaggtgctgaagtcgtgctgagtctggccgcctgcaggggggtacccgggccaacggcggagggggcggggaagggagattcggcaaagacagctttactactcccttaaaaaaaga

SEQ ID NO: 265414 - DNA, 288 bp, Homo Sapiens
  misc_feature (207)..(207): n is a, c, g, or t
  misc_feature (265)..(265): n is a, c, g, or t
  misc_feature (278)..(278): n is a, c, g, or t
ttttaataatttaatttaattttaaaataatacaaaagagccaggggaaaggatctcagtatattagggatcagttgacattaacagtagaaagtaaagtcttctgacttgatatttcaaaacaatattaataataatgatccctaaacattttaggcaatgcatttcaggaaccctactatagctttgtccccatttgatttcccntaatttgagggtggggatattaatttatcccccttctatcagtccaggaaatgagggnctccggatggatnatggaatttc

SEQ ID NO: 265415 - DNA, 625 bp, Homo Sapiens
  misc_feature (14)..(14): n is a, c, g, or t
  misc_feature (76)..(76): n is a, c, g, or t
aatttagggaaccncccaaaggacctaacctgaggatctggaatctgcctgtcttgcccccaaacatctttttccnggtcttccttttatggacaagattgaatagcattattggtcaaacagacttgtacggagctgtctgtttgcccataaagtgtctcaaaacttgcctgttttaggtgtaggatgtaactaaatactgttctttaaaaggcctctcctggttattaagccaggtaagagaagtagaatctcgaatcacctaattgaaatggtgacacaggttgtcctttctcagccgttgggtttcctttcatctctgaaggcctgtagggtacccatgaggaaaacatttaattcagagggtgaaccccaacagtaggaagctgaaagcagaagtgtttatctccctctgcattcagacccaggctccttagtgcactcatcagactcattgctgcccctgctgtctgctgttgagccttcaccaccactcattcaaatccccacagcctacagattcctacaagtcatgtcctttctagtgaaccctttttaaagggttttatgtcacacacagtgcctagtccagagcttgttgccttcactttaacaaggcaaaaaa

SEQ ID NO: 265416 - DNA, 384 bp, Homo Sapiens
  misc_feature (269)..(269): n is a, c, g, or t
  misc_feature (302)..(302): n is a, c, g, or t
  misc_feature (371)..(371): n is a, c, g, or t
tgagccaccgcgcccggccatcatttctatgctaccatctcagcatctgtggtgaggggaggggtgccacttcctctttgcccagcgagagggcgtactctaccccagagagggaaacaccatgcccacagtgcttggttttgcactcaggtgtgcgggcagccaggcaggcctcaccttgcagcactctgggcacaatgacactgtccactggggagctgcagagctttaggcagctggcttgggtcttgccctcggggggagggggnagggagttttgccaaaaaaagggagggcccttnagggttagggatattcttgggggggcccaccaagacaggttttaaaagagggaaacctcttttcatttnacagctttcgttt

SEQ ID NO: 265417 - DNA, 929 bp, Homo Sapiens
tttcggcacgagaactctctcctctctggtatgtttctgttttgtggattagactgctaaataagcgaagagttaattttgaagttcaggtcaacaaattcctgtttggagacgggctgttcctgaataccaggttgttatctgtctattacagccccttcacttctgggctcctggccctttgcgaagtacttcagaaagcctagagagaagagagggccctcaaatcccattccagcccctaaatgaaagtggcatcacaaggagaaaagtggaggtagaaatgtaccatgggggacgttgccccattgcctttcttcccctgactactgggcttcctctatcagcttttaacgtctggaagtagctgagtctccagtcactggtggccttccccaagtgagctcagcagcatgtgctaataggtgccaatactgtgctggctccagtgggattcctctctgcaaagctgctggcttagcttgactgtttccctattcctctccttagaactttcatagccagtcaagcatagaattgcatccattcttctgaaataggtactgtgcctaatttttcattggcttggccaagattctgttacctgtaattatgtcatatgggctgactggtgtaggtttggtaggcctcactgctctccagaggctagtgttcctatcccaggatggctgttgggattaggagtggaatgaggaatagtttaggaccacaagagatttggcctccttggaacatgtaggaaggcctcaaggatgtaattctagcccagggaagaaaatccttttcagcagacgcttcccttcccttcccctagggaatgtgtccctactatagtaaactcttccttaagagagttttatgttttctctgtcagaccaatttgtttttcttaatgttgttcctattta

SEQ ID NO: 265418 - DNA, 832 bp, Homo Sapiens
aaaagaaacaaaattaacctcatagtctgcatactctcgaaatggcaaaaaagcctgcaactttccgttgtggaaaataatatacctgggtgataaactgagcaaacatcacccttgcccttgcctctgaaagagagcctgttctagttcatcctggggccagcttggctgggaaccccactggccagctctgtccacaccttgcatattaggacagaaatctgcctaccacattccagctacataaagaaggtggccagcacctgactgcctctttctccttgtgaaattccttggaaataccatttgtgactgcttgggcttgttctgaagaaaattcaaatcttgttctgtttaacaaggattgattgaagaacccgtaggctcagtgctagtacaaagataagcaaggaaggaactcagaataagagagaaaaaacttggataataattatcaaaaccagtatttattgagcacctactgtgcccagtagagtagtaattacaggaggtaaatatctaaaacttacatagctcttcacagaacatacatctgttcttgcttctgtgtttgattttattagctttcctctgtacacataagcttttagtgtatgtcctattattgaagtccagagttttattatttttcacttatttgggcatagatagttccagaatttacttgtcttcctcattctcattgttaatctcatttttcttccctggagaatatggactttcaaaactatttttcaatcaaggccaaaatatttcttaaaattcacttctatttaaaacacagataacatccaggagaaaatctgagaag

SEQ ID NO: 265419 - DNA, 955 bp, Homo Sapiens
ctggaagatgagaacatttgcagtgacaccaatggcaaaaacatacgtttccaaaatccaaacctgaagcacttgggaaggaatggctaaacaatctttcaaagcccaatgtcaagaagtccggaagaggaaagagcttgagctgcagatcctgacggaagccatccggaactgggagggcgatgacattaaaactctgggcaacgtcacttacatgtcccagggtcctgattcagtgtgccggaagtgagggaaaagaatgaaagatatcttcttactcttcccaaatgttttgctaatgttgtctgccagtcctaggatgagtgggctttatctatcagggaaagcttccaacgacaggaatgacaatcacaaagcttgaggacagtgaaaatcatagaaatgcatttgaaatatcagggagcatgattgagcggatattagtgtcgtgcaacaaccagcaggatctgcaggaatgggtggagcacctacagaagcaaacgaaggtcacgtctgtgggaaaccccaccataaagcctcattcagtgccatctcataccgtaaggacttggtgcttctcctccttccagactccaggcgtggcatcccgtggctgagctgtcagcaagtgatgagttgctttaaaacctaatcaatattttggataaaaagtgcaaaacacttgcttcacatttctctgcagatctttggccctcttcgtgcagtagtgaattgttttccaatgagtgttctcgagaaacaaccctgaattgtgcctcctcacgcacagttcagaggtgcttgggtgggaagctgcttctgctccgtgtggccctagaagactgatttaggggagttttacactcaactatagatgatttttctgagaattttaactgtttattatgcttcatttaagaaaacaaaaaataaatgattatgatgatgaaaagga

SEQ ID NO: 265420 - DNA, 927 bp, Homo Sapiens
  misc_feature (73)..(83): n is a, c, g, or t
  misc_feature (900)..(900): n is a, c, g, or t
  misc_feature (903)..(903): n is a, c, g, or t
gtatcatctcaggaataaaagaatagctgagtcttgaacagtaggaaacattttgctaatgcctttatacgcnnnnnnnnnnnaactgaaactccaaagctatgccctgtgtggttttgaaagaaattagtttatgggttcagttgtggaaaaatatcttacttttacattatgtaggacaagtgataataattgtttctgtgttggaaaaaaataattgcaaagttgttttgtttcttataggttatcttctttatctgtaatacagaggcctttctgtacttattttccaaatttaattcttttttcctgtaggctcaaacaggcccacaccctttcccggttaacttagtaatacaggcgaaaacaaaaggacttaagtatttggagtgtttggaaaacttttaatgtgtactacattgcataccaggaagaaaatatggaaccattttctgcctcccacatgctaggtggttcatttcccttattccctaacaattttccttaatttctgtccttcagatagcgggtacacagcactctaatttaaagggacagcagtttaggtgccacctagaacataggaaagtgatgctgcctcccttccattttcctcctccttgctgcttgcttcccattcctcattgagccgaaattactgaataggtttgacacagcaattaaagttggcctagacacaagaattctattaactcaagagattgcttgcttaacagtgtctgccatctgttgccctgcaatccagagtgtttgtgtaaattaactcttccatgttgctagactgctactctgaactattgaattgtttctgaaaggggaatgaaatggttcttaaaacactttgtaacaactgttggttgtttgtcctctcctcctaanacntgtactatccattcttgaatcctt

SEQ ID NO: 265421 - DNA, 719 bp, Homo Sapiens
  misc_feature (396)..(646): n is a, c, g, or t
cccaaatatagcatatagcacaaaattaaaaatacaaagaatatgaagcatagaggatagaatgaaaacatcccatgtattttacttgtagttgtagaaggaggagagagaaaattgaagtagagacaacagttgaagggttgatcactggaaaattttcagaacctgttgtaagacatcaaatcagaggttaaagtctaataacttccaaaaggatacattagaagaaatatggaaaatttttgccagataaagagaaaattttcttcaaaggaagatgagttacacttacagatgactactcaacttcgtgctctgaaggaaaataactaccaactaataactagaatcataaattgtacactaaataaaaatatcttttaagaatgttagtannnnnnnnnnnnnnnnnnnnnnnnnnnnnnnnnnnnnnnnnnnnnnnnnnnnnnnnnnnnnnnnnnnnnnnnnnnnnnnnnnnnnnnnnnnnnnnnnnnnnnnnnnnnnnnnnnnnnnnnnnnnnnnnnnnnnnnnnnnnnnnnnnnnnnnnnnnnnnnnnnnnnnnnnnnnnnnnnnnnnnnnnnnnnnnnnnnnnnnnnnnnnnnnnnnnnnnnnnnnnnnnnnnnnnnnnnnnnnnnnnnnnnnnnnnattaaataaaattagtttcattatttaagtcaacagaaattatccaacccatcattaatcataccaagtactg

SEQ ID NO: 265422 - DNA, 677 bp, Homo Sapiens
  misc_feature (536)..(536): n is a, c, g, or t
  misc_feature (543)..(543): n is a, c, g, or t
tccccccggctcctcgacctcatcaattacattttcatgacatcctgagtatgaatatcaggctctggccgaacaaagggtggtgaaggaagacacactgcgtcttgcatttaagcagctccctttattccctccctagcagtgcagctatgacttgcttgtgggtcctggtaggataactcctgggcacctgcattacacagccctaatgcacctatccacttttcctcttatttctacattctcctgtttgttttgagcaatatgtccacaactctgaccttttgagaaatcctttcaatctggaactgactgtgctgcccagagaaatgtggtttggctgccggtgagcattgggaaggttgtgtggagggagtcctgtgatgaaatgcctgggtgtgtgtatgtacaacttcctctcaggctattgattttccctgattttagaatgcattttttattcttcctccttttcctggatcctttcacattcaaaaatgtactgaacaaataaatgagatttctttttttctaanttgtttntttgtggagtttcccattatatgtgtagtgataatttttacagtcattctatctagactgacaaaattctttatggaaacttttctctttgcaaggacattttacttctaaaaccaagggggataaaccgaatt

SEQ ID NO: 265423 - DNA, 966 bp, Homo Sapiens
cagcagcagctctagccttggggggacaagcctctctcagctacgccaggggaaacgagagttaaggacactcacccccacccacgcacacacacaaggcagcgtcgggtgggagagagaaggccgtttctccttctgtagcctgggtctcccacgggccttccccgctgctgagcgagtacaccagtagccaggtgaagggccacagcgggccaggccccgaccctgttgtgacccacctggggcacctttcccggaccagctccgcctcccctgccctcctctctccaggaaggagccagaaccctcacccctctcccaccctccccaggggtaaccccaggccaagcacagatagctcagctgcgacctctggcctctggggacataaacggggcggctgggccagggcggaaggtgctcctgtttccctccttctgcgtggtccctttgacgggccggccaccgtgtccgaggcgcaacgctaggcctccaggccacgcatccatctccaagttaacagcccgtcctgcccaagttctggggcaggtaggagagggccgtcacacacctgtccgcccgtgagtgaccccgggggggcttccgggtggaggtggagccaccacgcccttcctcaaggggtcacttattaaaaagtccaccgcctgaggccaggccctctgcacagaagccattataccggccagccgcgcctcctcctctgtccacggaaccgctgcccatctaaccttcgtaaagacctgtctcctgtttccagccgccgcctgtggttctagcaggttctatgccatctgcattgggatgtctggttgtttttatttctgacttttttaaaatcccaggtgtgccgcacccactttctcgcagtgttttaatattgtgtggagttgtcgataccacgtgaattcatacacaataaaaagcctcactctccctttaaaaaaa

SEQ ID NO: 265424 - DNA, 554 bp, Homo Sapiens
  misc_feature (258)..(258): n is a, c, g, or t
  misc_feature (489)..(502): n is a, c, g, or t
cagatggggaaggctggcaggagggcacagatgacctcagcaagtccctcccaggtccctgactctatatttagctaattgccacctgacacaagacaactctcacacattccactaggtatagcctcccttttaaagtagcgctgagaggcaaagaaaattccaattctaactttctcctcaattcatcttcagcaaataccaggcatgttttaaatgatgaatgtgcttagcatgaaagataaaatctattcattnaagcccaagaggcactgaaaagaagcaaaaggggccaagaagcaaaaggggttatgctgtaagcctactgtaatcagaggtggctagtgtacatccttgaaaatgtacatttaaagataaaaattaggaatgacttctaataaaaaattcatgaggctgaggaactccctagctttctgctaggtcatttccctgattggacattctacccttccacaaaaggtcaacctnnnnnnnnnnnnnntcagcaacaaaagacaaaacataaataggagtcatagtacaaacgaaacatg

SEQ ID NO: 265425 - DNA, 598 bp, Homo Sapiens
  misc_feature (23)..(23): n is a, c, g, or t
aattcggcacgagcggcacgagnattcagagctctgttaccatcttaaagatggactcggagaggaaggagaactcgtgtcccctgcagggggttcgtgggcaggtgtccccgtcaggcccgcgggctggaagtgtcgctgctggggatgaaagcagctgctcctctgcacgcctgctggtttcctccttccacgcttcctttctcactttggacacctgattctataggccatgtgcaggctgtgtatctggtgtgtcccctgatagctctgcaggtttgatggaattcatcccagggtgcgttggccacgggtgatctaccaaaacagtttgagttttaaattatccagtgcagtggttcctagactcactttgtgcatggaggcagccccctcttcagatggagtcttagataaaatgagtgaattcactgggtgggcagctgaggctgcctcagagtcttcagaggaaggccttggcctccaaccccacaactctaaggttctgagaaggcagaatgctaaactcgaccaacttttgattttcttttcaaagtacactttttcccccccaagactctgtctcaaaaagaaatct

SEQ ID NO: 265426 - DNA, 742 bp, Homo Sapiens
aggctttaattatgacagtatttcccacacgagtcctgggatttctggaaggggtgtgtgggatttttgccacgcttacatcacattaccaggtggtggacaggtggggaaggaaaaggaagggccattatttgtcagaagactgtttattggacctgggagggggtgtaacactatcacaaaggccaccctgaactcttgatcatcagatagaccaaatccatcccctacttgaaaaggatcttaggtaggaaaaacttgggacacagccatccacatcttcccaaacagaggaaaagccatcatgcggactctttgtggggtgagagctactgtgtaaacagttcagggatggggaggcgagaactgcagggaagcctggaaattatgtaactccactcaaagctggactgagaggcgccgcctctgggcccccacctgggcagtcagaggaaagccacaggacaggtgatggtggccgccatctccttcaggacaccatgctctcctctttgaggctggtccttgtcttgcagaaagtgacacagggaccagatgtcacccaggtggccaggctgcgtgggccatggagggggcacgggagtgggcactggagccaggacgtggagggagctgcctccctttcttcatggcattgctgttaggatgacatggttacggtgctctttccagaagaacttaggagagcagatggtgattttttagggcaatggagtacctg

SEQ ID NO: 265427 - DNA, 463 bp, Homo Sapiens
  misc_feature (419)..(419): n is a, c, g, or t
  misc_feature (427)..(427): n is a, c, g, or t
  misc_feature (438)..(438): n is a, c, g, or t
catcttttttaaaaagccgtgccttccttcattcaaccaatattcacagaatacttctttgtcattctgtggatgagtccaagaaaggctggaggaggaaagagtttcagtctgtgtgcctgccatgcaaaggtcgggctttacatgcaaggcaaacagaagtgctgagggattatcaggtggggagacacacaggtgtgaactacagaaagacgtggctactccctgtctttctgcaggcttgcaggctctgcggcaggcaccacgaagaatgggctggatcttccactccaatcagctaaacttacctctcccgcaggatcccagtgtgacaaaaaacaccatgacctagcacctgcactgagctttacactttgaaaactgtgttccctgcaaacctgcctgtatttttccaactnggtggcantaaaacggccntgcaggggagggcagattcgggatt

SEQ ID NO: 265428 - DNA, 380 bp, Homo Sapiens
  misc_feature (47)..(47): n is a, c, g, or t
aacaaaaatacttctttgtccattcctgtgggaatgaagtccccaanaaaaggccgggaaggaaggaaaagagtttccagtcctgtgtgccctgcccatgcaaaaggtcgggctttaacatgcaaggcaaacagaagtgctgagggattatcaggtggggagaacacacaggtgtgaactacagaaagacgtggctactccctgtctttctgcaggcttgcaggctctgcggcaggcaccacgaagaatgggctggatcttccactccaatcagctaaacttacctctcccgcaggatcccagtgtgacaaaaaacaccatgacctagcacctgcactgagctttacactttgaaaactgtgttccctgcaaacctgcct

SEQ ID NO: 265429 - DNA, 528 bp, Homo Sapiens
  misc_feature (36)..(36): n is a, c, g, or t
  misc_feature (60)..(60): n is a, c, g, or t
  misc_feature (147)..(147): n is a, c, g, or t
tccatccagaggcccccaaatccaagagcctgtttnccctggttaaatataataacatgnccccaccacgggatcctgggtccccccccaaggcaagagtggaagtatgggttaaaaaagggaatggccaggggaaaggggaacccnagtatggtgccaaagccttgggcctcgggtcattccacccagcagtaagtggtgggacaaattgccttaaccctcagtttccttcatcctgtaaaatgggggataatggatgccctacgtcatagggttgggtgtgaagattgcttgtagcactgttgttctttgggtcagccctgttctaggaatgacaatctctgcatgctgactttcagcaggacgtgccttgaaatctttccccaaggactggttttggaaataaagccaatccatttgaactctctgttgtactgtctgcccctacccacccccatgcccaaatgtcacgcattgacaaaaaactggccaggtttagggttgtagtctgtgcatgtcgaaccttta

SEQ ID NO: 265430 - DNA, 431 bp, Homo Sapiens
  misc_feature (406)..(406): n is a, c, g, or t
  misc_feature (414)..(414): n is a, c, g, or t
cttgtgtcagttacctgtgagaggcacagacaagtctttctgacttctcaagagtgtcccaaacaagttagggttaaggattacccaggcttccatggagaagggtgccttacggaagaggtcttgacttctcagtgtggaagaaccttccaggtctcagctcttactgcttgaaggtccttggggtttcctactgagctctgcctctcctccttctaaggagggcaagctgctcaacccagggccaggggcgcttcttaaatggcagcctgtgggacacgcttttttgcttcctgtttctgcttcagcaatgcttttaactgggggcagtgtgtttactgggattggatgattggacccaaggactggcacaccttcaacgtttaggcaaacaccggggggaagntttttttncaaggggccggggcttt

SEQ ID NO: 265431 - DNA, 694 bp, Homo Sapiens
  misc_feature (67)..(67): n is a, c, g, or t
  misc_feature (309)..(309): n is a, c, g, or t
tcaagaccatgactgaaatacagtgaagattaaagataaaaaggagaaaaaaggttaaattataaancctctaatatcattactcatatatatgatatacacagagatgcatcacctaggtcctccctgagagctgtgtcagtagacaggactcagttgtgagccccttcagacgtcacctcagctgcagagcttccccctgcctaaggtcctgaggttcccagttgtggtgcatatgcaatgactgattgaggtgaggcaaggaggcaggtgaaaagaggtggggaggggacttggggccctataaangactcagtccatgtccattgccaatgtgaaaaggaatgccagtgggcccattttatccttcaaaagtcccctgtgagatgagccaaagctgtggtcccaggacttcttttcagcccagctttttccctttccctcaatccagcttccttcttctccttttcacagtgccttggattcaagggcactccctagtatatatctccatgtccaagtctgcttactagagaacattgtatcatgaatgataccattcttcaaaaatatggggtactttgagtgaaaggagtggaacggtatagaagaacagctttggtagagtagttagaatagaagctactctacattgggttgatgcatgaatgggatattaggaagtaaagttagc

SEQ ID NO: 265432 - DNA, 721 bp, Homo Sapiens
  misc_feature (352)..(352): n is a, c, g, or t
aagagaggacaagctgggtgtcgctctgtcatgtgtggtcccacctccaggagcttgggccaggagggaactgggaatgcctatgcccatcagcaataggcgtcctgggggcacctggtcagaaagacatagaggaggggagggagaaaggtccctgctctcctctttcatcgcagagatggagacaacttctgaggaagagctggaatcctggggtcagaggaggcagcccagggggaaatgcacatggcctgggcctcaatgccgttccttcagaaaaagggggttaccacgtggctctgtggtggccccaaggtgggaagatgaacttggctttgtgtctgatcatccnactttattagacaggatcacataacgtgggacacagcctttcttccgctcccagttctcaagaaacccattcctgatagcaatataattctaaatgggagtaataaaatgcataataaagaggctgggcactacattttacagaggatgggaaagcaaagttgattttgtacgtgcaactgttcctgtcaatggacaaacaagcctgtgggaagggactggggcagcagaatcccctggtgtggctctggcctcagggtcccctgactgtgtgcctcctctctcctctacctactgaggtcccctgggagggaggagaagccacctgtaacctcttgctgctcaggtattaaagcagggctgatgaggc

SEQ ID NO: 265433 - DNA, 1114 bp, Homo Sapiens
  misc_feature (622)..(677): n is a, c, g, or t
ttcaaaaaatatttccaatgggaaaatgggggggaggtggaggtggaaagcatctaagacaagagaattgcaaaacttcaagaagcacttgttgtaaagccagaaaggaaatctatactgctatcccaagccatgccctaatacagacttgctgggtaatccatgtttccaagggtggttttgtttctggtaattaaggcacactagttaatgttcatcaccctgggtgctattagttaatgttaattaggagctataacaagttaactgggaggtataataagcaaatccgttgccaattcctaatgccttttcaaattggaataaagcagagcccggaaaacatggacattaggtaaagccaattttttcaagcggatggcagatcccaagctcttaaggaacagcaggcatgtcctcaatgcatgtggggccagaagagagagctttgatcatctactagttagggcctgccaaatagatgcatagatccatactgaaaatgaaatccttttgatttttttgcctgaagccattcctgtcacattaataaaatgactgcctgacgtgagtcataaccacagaatagaagagataaaggtcccacctagctcactgaacnnnnnnnnnnnnnnnnnnnnnnnnnnnnnnnnnnnnnnnnnnnnnnnnnnnnnnnnggcagtcagttcacctgtttcctaatctgccatactccaggctcctgaccactgccaagaatttatttcctcaccattcgcgggctatacaaattggtaggcatctgaattcccttgagctctaaaattattttaacatttggagcacttgtaagcctttttcccttttagagtcaggtaattcaaagttcttatagctataaaataagtagaaacaaaaccctaccagtaaaactgaagtaagggtttgctccaatgcattaggcacccaaaaagcctaacattcaaccgtaatatactggaggtcagaatacgtattatttagagttttaacttttgttaatctagatgcagggttgcctaaatcaaactctggcctcccatactactcactggccactccttaaatcttttaatcctgaactaaaagaaactgt

SEQ ID NO: 265434 - DNA, 554 bp, Homo Sapiens
  misc_feature (11)..(11): n is a, c, g, or t
  misc_feature (21)..(21): n is a, c, g, or t
  misc_feature (103)..(135): n is a, c, g, or t
cagggaaagcntaagaaaatncagaagttaaagttctcagatcatcttttctgctcacttctataaacttccagcagccccgtgctatcactcagacacgttnnnnnnnnnnnnnnnnnnnnnnnnnnnnnnnnnctctgggtgaagtacacagtcatggtgttccccctggctggatgacagtgtaaatcatccaacccgcggggactcccagcaccaaccaaccctgcttcaccaggccccattggaagcaggtctggcagagatgtcagatcccagacaactcaggaacagcatgtcattgccatgccattcccactcaggaaactcgagcctcttcattcagggttgtatagccacagctgctgttcacggtacctggcaggctggttggctcttgccacaggcggggcagccaggagccctcctgctatttccatccttcagcctcaggagccatcagtcactccccaggtcagctccacagcaatgggcatggagcgctgagcaacagagagcactccacagagagaggagatgaaaagatttggaat

SEQ ID NO: 265435 - DNA, 806 bp, Homo Sapiens
  misc_feature (18)..(18): n is a, c, g, or t
attggccctcgggccagnaattcggcacggccccttctcagacgtgcttcgtgacttcattcagctggtgttgcaagaagcaggtcttggacctagaggaggagggtctgtggccagaactgctggatagtggcaggattgagatttgtgtctctgactggtggggagcccgacacgacagcggctgtatgtacagactcctcgtccaacttctagacgccaaccagactgttctagataaattctctgctgtgccttatcccatcccgcagtggaacaacaatgcctgccttcacgtcacccacgtgttctccaacatcaagatgggcgtccgctttgtgtctttcgaacaccggggccaggacacacagttctgggctggccactatggagcccgtgtgaccaactccagtgtgatcgtgcgagtccgtctgtcctagtccagcactacccttcttgcaagacagcctgactgtgccttccagggcctgggaccattggctgggacccctcattaaccaaccaagcacttgtacctccctggcatactgggaattcctgggtccaatcaaaggccctgacgggccctgtcttcaggttctagaaactaccagaagaagcttcttccatcttatctacctactgcagctgctgctttgcgggggggccctactgtactgaggggaaacccacaagtgagcatggggggaatgcccatcctggagaagaattcttgcccttcccctcttttcttcctcccaaccaaaaccctccgatccagccccaggcccctctgtaccatcccc

SEQ ID NO: 265436 - DNA, 426 bp, Homo Sapiens
  misc_feature (33)..(33): n is a, c, g, or t
  misc_feature (47)..(47): n is a, c, g, or t
  misc_feature (63)..(71): n is a, c, g, or t
  misc_feature (91)..(91): n is a, c, g, or t
  misc_feature (109)..(109): n is a, c, g, or t
  misc_feature (116)..(116): n is a, c, g, or t
aagaaaataccaagaagaagttcttccaatctnatctaccttactgnaagttgctgctttgcnnnnnnnnnccctacttgtactgaggggnaaacccaacaaagtgagnatggggnaatgcccatccctggagaagaattcttgccctcccctctcttctcctccccaaccaaaaccctccggatccaagccccaggcccctctgtaccatcccctcccctccgcaccactgacctcttgtctcctattgtttctgccacagggacttccttggtcccttcagggaagccctcaactcatctctgaacttagaatctcatccttagggctcagagagtcccagccctaagggtgtgaacctcacctcctggggcttccgagctacagggctgggaccaggtcatgcagctgaaagtctacgttaaa

SEQ ID NO: 265437 - DNA, 797 bp, Homo Sapiens
  misc_feature (135)..(391): n is a, c, g, or t
  misc_feature (633)..(633): n is a, c, g, or t
ctgggccttcccttcaggtgtgtgtcagtctcctctaatgatcctggtccccactgtctgcccctgcccgtagcatctccactaaaggaaagaaatgataggagggatgggaatagaggcgagatgatagacctnnnnnnnnnnnnnnnnnnnnnnnnnnnnnnnnnnnnnnnnnnnnnnnnnnnnnnnnnnnnnnnnnnnnnnnnnnnnnnnnnnnnnnnnnnnnnnnnnnnnnnnnnnnnnnnnnnnnnnnnnnnnnnnnnnnnnnnnnnnnnnnnnnnnnnnnnnnnnnnnnnnnnnnnnnnnnnnnnnnnnnnnnnnnnnnnnnnnnnnnnnnnnnnnnnnnnnnnnnnnnnnnnnnnnnnnnnnnnnnnnnnnnnnnnnnnnnnnntagtggacgttaccatgcgacataaagaaataataaaataaaatgtgattactagaaaattaaacatcacctgtgtgctcacattatagttctgttggacagcattgttagggaacatctcattcccaggagatgcatcctgtacgagccaagcccacgagctttttgaatgattaagtcagccctattggcatagagaagtagcagttgctcagttttttcagtccagaggtatgaaatgnttggataagattcagaattggagagacagcttctgaacgctatagccaggagttacatgtacaatgggcatagtgcggaaagcactattaaagcacatctgtctcagcaggcccacccagccatcatcagaagtgggaggcaggaattctcgtggtatggtaga

SEQ ID NO: 265438 - DNA, 992 bp, Homo Sapiens
gaaaggtgaggagaaagggatagagtaagggggcaggaccttggcctcccaaagggctggaattacaagtgtgagccactatgcccggccaactttaattctttacatcttcggcacatttattttctgattgctctgtatgaaatcaaatccagccataactttattgctagcatgcttcagttatctatttctgtaaacaagccagcttagccgcagtagtataaaacaaaaactgttttattatgcttctggattctgcagtttaggaatttaggcagggtatggcagggatgcctgggtctctgcatcatgatgtctggggcctcagctaagaatggccaaggcttcaatagccagggagactcaaaagattgaaatctaaaatcctctgaaggcttctttactcttatgtctgtatctgggctgagatgactaaaaggctgagctcagctggggctgtccaccagagtgcctacatgtagcctcctcatgtatcttgggcttcctcagagcatggtgacaccagggtgcacagatttcatacatgacagctctaggctcccagtgcaactgaaaagttaatctaaaaatcttatatcacatttgaaatagaacatgtcccaatattgtttctcatatttgatagtggatgtttttgtgtatcttaaagtgtgttcatgtgttttaagttatggttttatctctagagaaaaagcaatgatgacttctaaatcataaaattgagactcttagatggatggaaaaataatatattacctatatattattcatagataagtagcatttttatttcatttcaaaataattggcatcaatttgaataacgcatagtttaagaagcttgtagcataattaaaaatggcaggttttgctttgttcctgtatcactaatgaactgttagaattttgtagagagctaacaacttttggaaataggaaggcagaaaacattactgatatagtgatat

SEQ ID NO: 265439 - DNA, 660 bp, Homo Sapiens
  misc_feature (16)..(16): n is a, c, g, or t
  misc_feature (38)..(38): n is a, c, g, or t
  misc_feature (336)..(336): n is a, c, g, or t
cctgtcattggtaganccggggggccaatgtcaaaaancaaaagccgtgactcctgcgctgtacctggagtcctccatgtactcctccacaggacccccggccagccccagccctcccccgagcagcagcggtcagggaagctggtgctctacctgacaatgtggggaaaagcctggtatacaggctagaaaaagagagtaaaaactctttccacgcagccctgaagctcagcactccggggggtcttcacacgggcaggtcctggagggaaggaggcggccaccgcgcccacctcccatctgaaggcacagcaccgcagtggtggccctgtgccnagaggagggggtgaaggatggaatgtccctccatggtaagtgctgtcagaggcaggcctgaacgagaagacaggccgtggcaacggtcccgaggctgtgagtcctaggcagcctgcctccgggacccccaaagcccaggcggtgcaccacagcacacaccgtgggacctttgcttttcactcaggaaaagaaagaacatgtgagtgcttctgaaaacacagcaagaggacttgagcacaagctaaaggaaaaacaaccctatatagtttcttcgagtgagaaaaataatgccaaacaaaataattttatgtaactacctcgata

SEQ ID NO: 265440 - DNA, 677 bp, Homo Sapiens
  misc_feature (274)..(561): n is a, c, g, or t
caatgggtacagcttagttctgctttggaacatacatagaatggaaccccatttgacctctaagaaggaggaagtagctgtctataccagtcattctcaaactttatttagcatgacccaaaatcacctacagcagtggtgttgggcaaatctttgtgtagaggctttgcaggccagacagtctctgtggtaactattcaaatctgtccagatagcatgaaagcaactgcagacaacagatgctatggaaatgaatgcgcatgctgactccagnnnnnnnnnnnnnnnnnnnnnnnnnnnnnnnnnnnnnnnnnnnnnnnnnnnnnnnnnnnnnnnnnnnnnnnnnnnnnnnnnnnnnnnnnnnnnnnnnnnnnnnnnnnnnnnnnnnnnnnnnnnnnnnnnnnnnnnnnnnnnnnnnnnnnnnnnnnnnnnnnnnnnnnnnnnnnnnnnnnnnnnnnnnnnnnnnnnnnnnnnnnnnnnnnnnnnnnnnnnnnnnnnnnnnnnnnnnnnnnnnnnnnnnnnnnnnnnnnnnnnnnnnnnnnnnnnnnnnnnnnnnnnnnntagattccctttagcttatttgtaaaagggaaatagcacgcagggtttgaccctcaggctcagtgtttgccaagcccagactcagagggctggttcaaattcagatctcttaattt

SEQ ID NO: 265441 - DNA, 896 bp, Homo Sapiens
tagcccggcaaaagaagcaaatgaaggcctccctacccctcctgaagatttctccaagtaaaacgccttaatcccctttggtttcaaaattgccctccctttcctatcaaagttggctatgctcttgtaagcacctgtgcaacaacattcgggcagctgacaggatgttcacagtatataaatagaaggtccctggatggggcatggtctggtgttttgggaatttcctggagtgacatgaaattttctgagagcatcttatatagcatatcctttgcctcctttgcaggaatcattgcaaagtcttccacttgcttctgctctatgtgtttcttctgcaaaactagacggaatattctagcacagcgagacccaaatctctcctgtacgacggactccagagtggctgtggctagggatgctaatgccttatggaggttgatgacatacattcctccaccactgtcgccagactttccaacaaactctagtggatcatctgccagcagagtgagatactgatcaagaacttgcttagagatgttatagccaacaggtaagggatctgaaagatctcattggaaagacaatggctgggtgaaagggagcactagaggaagtggtaatctcactcattcggagcatggttcgcacaatctcgctgcttgtctggtccatcctgttagcaactgcgctcacaatggcttggtcacggaagtgttggtggaatctgtcaaggttggcctgccaataaatcccatcatctggaatgggctccttgttatctgtagtatattttggtctcttggccttgggctccccagcagcatcttcatcagatgatctcctccttttacctttccctatcaagctgagtttaggaaccaggtacatgt

SEQ ID NO: 265442 - DNA, 413 bp, Homo Sapiens
  misc_feature (17)..(17): n is a, c, g, or t
  misc_feature (65)..(65): n is a, c, g, or t
ccaacccttaataatanccaatatccctttggccctccctttgccaggaaatccattgccaaaantccttccccacttgccttcctgcctcctatgtgtttccttcctgccaaaactagacggaatattcctagcacagcgagaccccaaatctctccctgtacgacggactcccagagtggctgtggctagggatgctaatgccttatggaggttgatgacatacattcctccaccactgtcgccagactttccaacaaactctagtggatcatctgccagcagagtgagatactgatcaagaacttgcttagagatgttatagccaacaggtagggatctgaagatctcattggaagacaatggctgggtgaagggagcactagaggaagtggtaatctcactcattcgga

SEQ ID NO: 265443 - DNA, 854 bp, Homo Sapiens
  misc_feature (645)..(755): n is a, c, g, or t
ccctgtctagtggctcagtccttcaggctgctgtaactaactcccattaccttttaaacaacagaaattcattcttcacagttctcgaggctggaagttcagaagcaagacatcagcagatttggtgtctggtgagggcccaactgccagcttctatgtcctcacatgatggaagggaccagggatctctatggggtctcttctaagcacattattccattcacaaggagtccaccctcatgacctaatcccctcccaagggctctaccttctaatacagtgaaaccagggagtgggatttgagcatatgactttggcagagcagggaacacaaaagtattcagcccatagcactagtgttctgtggttgttgccctccaagccttccaaggcctccgtccagaactaggttttccatggtgatgcaggattctgttgcgtggttatgtcaccaacagtgcagaccctggtagagaaccatggaatagcatggctcatccccaggccttgcattctacctcccctaggacccacaaactgccaagtagagcccccaatctgtatagcagagaattgccttagatggggaaaccttatctaactccagctccaaaaaccatctaaggccaggcatggtggctcttnnnnnnnnnnnnnnnnnnnnnnnnnnnnnnnnnnnnnnnnnnnnnnnnnnnnnnnnnnnnnnnnnnnnnnnnnnnnnnnnnnnnnnnnnnnnnnnnnnnnnnnnnnnnnnnattagccgggatggtggcacacaccatgcgtagacccagtagcatagacccggctactcaggaagctgagacaggaggactgcttgagcccagcaggtt

SEQ ID NO: 265444 - DNA, 569 bp, Homo Sapiens
  misc_feature (274)..(274): n is a, c, g, or t
  misc_feature (313)..(313): n is a, c, g, or t
  misc_feature (371)..(371): n is a, c, g, or t
  misc_feature (443)..(443): n is a, c, g, or t
  misc_feature (457)..(457): n is a, c, g, or t
  misc_feature (473)..(473): n is a, c, g, or t
  misc_feature (493)..(493): n is a, c, g, or t
  misc_feature (500)..(500): n is a, c, g, or t
  misc_feature (510)..(510): n is a, c, g, or t
  misc_feature (518)..(518): n is a, c, g, or t
  misc_feature (535)..(535): n is a, c, g, or t
  misc_feature (546)..(546): n is a, c, g, or t
  misc_feature (555)..(555): n is a, c, g, or t
cctggtctagtggctcagtccattcaggctgctgtaactaactcccattaccttttaaacaacagaaattcattcttcacagttctcgaggctggaagttcagaagcaagacatcagcagatttggtgtctggtgagggcccaactgccagcttctatgtcctcacatgatggaagggaccaggggatctctatgggggtctcttctaaggcacattattccatttcacaagggagtccacccttcatggacctaatcccctcccaagggctcntacctttctaatacaggtggaaaccaggggagtggggantttgaggcattatggactttgggcagagcagggggaacacaaaagtatttcagccccntaggcattagtgtttctgttggttgtttgcccttcccaaggcctttcccaagggctttcccttcccaggaantagggtttttcccnggggtgatggcagggnttttgttttgcgttgggttntgttcanccaacagtgncaggaccnggggttggaggaccctnggggttaggcntgggtttcntcccgggggctttg

SEQ ID NO: 265445 - DNA, 684 bp, Homo Sapiens
  misc_feature (344)..(344): n is a, c, g, or t
caaatgaaatatctttccagagtgaaattttgtgcagaaatgaagcatgaaagtaattttttatttcttacctcatacctgaaggattaatgttagccaacattagctttgtaatcaatgtgctgaccttctagaataaatcataagggtacaaggaaatttaatactctaaattatagatgtgcacttgaccatatttcttccccttacaaaaccataacttctgttctaggaaggttctgaggtccccaatctactacactcagaggggaaacagacatggagggaaccccgaggaaacagtgaaagatgtgcctgggaaccgggcagtgggctttttcccnaattttcctcagcagcactggctcaaaggctcccctggcttggatgacagccgtatctgaagccgctctgcagccagcagggcagtagtgggcagagtctcatggcacccgggcactattcttggccccatgacttggcttcttggaaaactcaacctctctgagctgagctctgtttcctcctgtgtaaaatggtggaagctgtaacacctctatggtaggctgttatcaacaacatgaaaatgtaggacaattgacactatttaagtctacaactctcctttaactgacattgattgttaatatctggttttgttgaaaagatgaccaatagtcccca

SEQ ID NO: 265446 - DNA, 727 bp, Homo Sapiens
agtgtcatggaaaaagacctgcggcaaaaagtggcagaggtaagatggagccagggtttgctgtcatccacagtgaatgccgtcctccacggcatggttctgtctcacagagagggattgtctggggagactgctaacacttcagtccctttttatgagcattgattttatacattttgatatgaactttcattaagtttgcatgtttttccataggtgcacatattcagtttctgaatttttctaccgaagctaatcatgacttccttgaaattcaaaatggaccttaccacaccagccccatgattggacaatttagcggcacggatctccccgcggccctgctgagcacaacgcatgaaaccctcatccacttttatagtgaccattcgcaaaaccggcaaggatttaaacttgcttaccaaggtatggaacaacaacgagaaccgaaacccaaatctaaatacacttcttacatgtaaaatgtatttaagtataaatctccctaactggttccaagcttgtacgagtggaataattttttggtggaatgttggtttctggttagtagtggaacacttgttgtttttgaaaacagaggtaaggacacagacggaaccaccagtgggttaacctattatgctgccaagacaaaaacaatatatcaagacgggaaaaacaatagagaaagagtaataaaacaccagagccctatacagtaaaacac

SEQ ID NO: 265447 - DNA, 505 bp, Homo Sapiens
  misc_feature (16)..(16): n is a, c, g, or t
  misc_feature (35)..(35): n is a, c, g, or t
caaaaaaatgaaattnaaaaattggggtttccggntcccccgttgttggtccccaaaccctgggtaaagcaaggtttaaaacccttgcccgggttttgccgaaagggtccactaataaaagtggatgagggtttccatgccgttgtgcctcaagcagggccgcggggagatccgtgcccgcctaaattgtcccaatccatggggctggtgtggtaaggtccattttgaatttcaaggaagtcatgattagcttcggtagaaaaattcagaaactgaatatgtgcacctatggaaaaacatgcaaacttaatgaaagttcatatcaaaatgtataaaatcaatgctcataaaaagggactgaagtgttagcagtctccccagacaatccctctctgtgagacagagaccatgccgtggaggacggcattcactgtggatgacagcaaaccctggctccatcttacctctgccactttttgccgcatggtctttttccatgacactc

SEQ ID NO: 265448 - DNA, 412 bp, Homo Sapiens
  misc_feature (98)..(98): n is a, c, g, or t
  misc_feature (237)..(237): n is a, c, g, or t
  misc_feature (307)..(307): n is a, c, g, or t
  misc_feature (319)..(319): n is a, c, g, or t
  misc_feature (347)..(356): n is a, c, g, or t
  misc_feature (382)..(382): n is a, c, g, or t
cccgtgccccgagccctttgcccgcctcctggagggtgagccggggccccgtgacgagggtaggctcagcttggagtggcagggacctgtgggccagnacctttccccttcacacctatccataccagtgggcccaggagtgaggaagaaggggctggaacccactggactctaaacagcctccccatggttggctccatcccccacatcccagcccttgtttgggccagggccagnagctctcaggacaacctgttaggattccttgggccctggggatttccacctttgattccttgatttccantaaccaggcccntccttcggggttgcaggttcccaggggnnnnnnnnnncccaggctttttcatttgagttgganttttggccagggagttttggttttttgaat

SEQ ID NO: 265449 - DNA, 443 bp, Homo Sapiens
  misc_feature (357)..(357): n is a, c, g, or t
  misc_feature (377)..(377): n is a, c, g, or t
  misc_feature (395)..(395): n is a, c, g, or t
  misc_feature (427)..(427): n is a, c, g, or t
ttaagagcaggaagtaactggaagcgtcttgctgaactgcaacggaaaaaacaaaggttaaaacaccccagcaccactgccacctttcctggagggcaactgcttctcctccattccaaccatgtgattttggtggtgctgccaatcaagtaccctatctgcctagctagcggagaagaagagtaggcacatcacattcttggggtcctatgtggccaatcaagggtacttctgggaatttctctttattctaggggtgcttaatcttgggatgggcattaacacagggagtcatcttgcagtcacatcttttatggcatttatatacaggtcatgtgccccaaaaagacggttttnggggtcaacggacaggaccncatatacaaccatggggnccccttaacatttacacatatggggggcaggnaaatgccttttgggcc

SEQ ID NO: 265450 - DNA, 976 bp, Homo Sapiens
  misc_feature (618)..(618): n is a, c, g, or t
tgaaaatattgatctttgtttaatatacatcatttaataaaaccgcagggagggagctgtacaatgcagttttaagatatttttattggactggattaaaacatcactctgagaacacttagtcccctcacatgctagatttccttttcaaaatgtaatcttgatgatataataatgcataacttaaacttcccttcccttcaaaacatccttggttctactcaaggacctctaattccatagtatcttttgtagacacagaaagtatgcgttttctttgtctttgtgatgtattacacctcccagtgcagaattttaatatattccacatatcatatcttcctgtttcggttacaaaacaggtacagaattgggatcaggcaacacaattttaaacttggttaatggcaaccgtgattctatacattgtggtaaggttcgcttcccagaattgctgtggggcttcgaaggttcacagcatgctctaaaatgcagcgaatcagcaacatcacaggaaagggagtaaaaccataagacaaaagtaaactgtgatgctgaacaagtagttttaagaatcctcttcttttcccttgttttcccgtggcctttaattgtgcncgcacagccttggtaagactttccggttgcagatcaggatggtgaccaaaggtaattgcatagcctgtacacgtcctgaacaagttgaggttgatttgccatttctctaaagggtatttgtcatagcataaagtaaaattagacttttcggcatcgcaatattcaacaactgtttcatcttcccacaacatgacagcattgaagatggtttccaatatccagatggacaggctgaccatgagtgcaaatcttcttgtccttatgaaaaaaaacttcaaagggtagacaacagccaaataccgatcaacggcaatgcaggtgaggaatgctgtgctgactgtaaaaattcatgtacatg

SEQ ID NO: 265451 - DNA, 787 bp, Homo Sapiens
  misc_feature (775)..(775): n is a, c, g, or t
gaaccctatttgcctgagtctgtcccacacctggagctgtcacccagtggaggctgcaaaacaacaaagatggctgcctgctccttcctctgggggctccatcccagagaggcactgacctgatgccagccagaatgctcctgtataaagtgtctagcgaccactgttggagggtctcacccagtcacaaggcatgggatcagggacccacttaacgaaggcagtctggctgccccttggcagaggaggtgtgctgccctgaggggaatcccacttgtctggactgcccagattcctcagagccagcaggggaaagaccaagtctgctgatctatggagactgcggcagcccctttccccaggggttccatcccagtcctagggagatcaaagttctgtccataaacccctggctggagttgctgaaattcccacagggaggccctattgggtgaggagggatgggtctgagttcagcctaaagaggcagtctggccatggtctgccacaaccgctgtgctgtgctgtggggaattcctcctaggtccaaaccacccagtctccacggcaccagcagagggaaaccgcagactggagctgcagtgatggtggccgctcctcaccctggcaactcagcagtcttaggcagcctcctgccgagtggcctctgagaacctgcacagctgtgtgcttgggacccgaggccctggtggcgtgagctcacgaggggacctcctgatccatgggttgcacatatcagtgggaaaagggtggnttcccggatggg

SEQ ID NO: 265452 - DNA, 533 bp, Homo Sapiens
  misc_feature (26)..(26): n is a, c, g, or t
  misc_feature (297)..(297): n is a, c, g, or t
  misc_feature (300)..(344): n is a, c, g, or t
  misc_feature (346)..(346): n is a, c, g, or t
  misc_feature (420)..(482): n is a, c, g, or t
tacgcggccagtaattcggcacgagnaaagcttgagggtgtatgtgaagtcacagagcccagtagccaggatgtagacccagtcttcccaaattcaaacctctgctcctaccttcacacaacatccacctccatggtgtcttgacagggaacgggagacgtgtgttgattaggtccaatgtagtaggagattcattttatttctgttcagaagttcagagaaagtcagatttgtttttgatcaaataatgaaagagaaagggtcttaaagaaaaagttggctaggtacagggctcanacnnnnnnnnnnnnnnnnnnnnnnnnnnnnnnnnnnnnnnnnnnnnnanaccaacctgagcaacatatggagacaccgcctctgcaaaaattaaaaacctagctgggcgtgatggcatgcacnnnnnnnnnnnnnnnnnnnnnnnnnnnnnnnnnnnnnnnnnnnnnnnnnnnnnnnnnnnnnnntgcagtgagccatgaatcgtgccactgcactgcaccctgggcgacagaagc

SEQ ID NO: 265453 - DNA, 781 bp, Homo Sapiens
  misc_feature (353)..(353): n is a, c, g, or t
aatgcagtgaaaagtatacaaactcttatttgaagaggattagataaataaagtgataattccaaaagttcccaagggaagggattaaccgccaaactgagtgtcttcctagagtccatggctttgggtgtgggagaagctgggtggcgccatgggcataaattccacaatgataaagataagtgtcaaaggaaaagaagttctgggaaatccacacaatggtaactctagaagcatgaactgtagctgggggtaaagttatttaatagatcactgctttcctgggtattcatgaaaggatctaacgcctggaagccatggctggcggaaagtaatgtggcccctggaataangccaggtgccagctgtctcagcatctcttcttcctcaagatgaatcatgagtaaacggactcgccttccttgggccaactgggatcttacagtctcattttcaatcccaaacttctaaagcccaggctgagctgcaacctatgttgagtaaagtgacatcctatccaggttagcaaggcccacactaaaggcagtccttggaaaagccattaaatcaggatgcttacttcaaaagaaatacagcaaagctgaattagctgcacaacagcctaattcgagtatgtaccaaaaaggatcatgcatctatggaaaaagttctctgaactaagttctcccatttcaaacagaataaagcacacctacccactgagcagaaatgttagtcagtttattacccatttaattcaaaaaaagtccctgaaatatgg

SEQ ID NO: 265454 - DNA, 772 bp, Homo Sapiens
aaaccctagaaatatataaaatgtgacaaagcctttatatggttgccactcttgattgtaggttggataattcatactggcaaaactcctacaagtgtgaagaatgtggcaaaacttttaatcagttcttacaccttatctcacagaaaagctagtatccttgagaaaaattgtacaaatagaaggaatatgggaaaacctattaattcctactcacatctaactcaacataaaaatcttccttttaataaaaggcatttaaaatgggcaattactgtcaaaactttcaggcaagtataagcctttaaagtgaagaagagtatttattgtgaagacaagcattacaaatataaagggagttacatagtacatttactagtatcacagatcttattgcacacattttgtactggaggaaaatcctaaagcagttgctcaagtttgttcaacatcagggaatttatattggagatgagtcctacaaatgtattaagtttagaaacacacttttttccccagaaactacagcttagaaaacaacagagagtttatgctaaaatataattttgcagatgcagtaaatattaaaaaatatttaattcaaaatagattgtatataaatatcaagagagtttacagtagaataactaaggccccgacacttcagacattacactaaatcagagcattgaatataaaaactaatccacaactgcagtttttaggtaaatgatttctatttaactttaaaaggagtagatttttggaagca

SEQ ID NO: 265455 - DNA, 294 bp, Homo Sapiens
  misc_feature (202)..(203): n is a, c, g, or t
attctcaaagtggaaatacccatccctttgggtccaggaaaagaaaactcagctcacagtttcagaaatttggactgttttttttcccccctctgtctttctatttgaaacgtctcacaattaaagagcaagaaaaatataaaaaaggaactcaactagttaccattcaaaaggtgtcagctaaaatctcactgcaaagggnnaaaaaaaggtttaacatcttgccactggctggcatcccccaccccccttaggactttgggattaggtcattgtatggggagagtggggggg

SEQ ID NO: 265456 - DNA, 940 bp, Homo Sapiens
  misc_feature (67)..(67): n is a, c, g, or t
  misc_feature (355)..(355): n is a, c, g, or t
attcggcacaggcgtagaaagaggtagggaaggatacggcgcccgtccaccccttaaggagtgaganggggatcaggccgagcgagcactgacctttgacgtcctttgttgtgaggaaagtccatctatgtgttagttatggaattaaacactaatacaaacaaattatcataaaaatgaaacaaaaacaaaaccccagctgtttatagactccccttcccagatgtatagctgggagaggtccgtctcacactggcttccccctctctctggcccacactcctgtcaccatctccattgcacccatagtggaaatagctaggaagttgaaaacagctaggaagaagaaagaganacaaaaacaaaaagaagcaataatatccaagacaagccctccccacatctaaattacaaaattgttataagtaaactaaaaagcacattttctttagccaggtagaaaaattaatatgtccaactgtgaaaaaacttcttttgatttgatagaatagacagccatggtgttgtttttcaaaaaatatggggcagcagtagttccaaataggaatacaaagaattagtatggtggttccctcaagtaaggtatctttcttttaaaaagtgagatttgttcagggttagggttttgctgattttttttctctccctgtgaaaactgggttatagatcattataaaggaagcccatattttctgatacttttcagagacatttctcatttgaaatctacaacagctctgtgatgtcttcagatttcattttttaacacacatcattaggattgtagcaataaggtcatacagaccttatccaagctcttctgacaccattagacaatacagtttgagaaggagaaaatgaactcatttaaaaattaattgtaatctgacaattttgaaattcctttgctgaagaaaat

SEQ ID NO: 265457 - DNA, 734 bp, Homo Sapiens
cccgcccaggaaggtacttctgaaacaggtccccagtggcacctcagtttatccattcccgttttggtttcgcagctgtcatccggtcccaacgccagaataggagaaaaacctgcaggctaagagagaagggagggctgggcctgaggttcagtcttggtcatctccgactggcggcgctaggatttcccccttcctgtgtcttgatgggttcctccaacactcactttgtatcgataaacgaccctgcagttcttcacgacctgcattgcgctggcagtcctgagtgaagaactctcctctcatcccagagatgggaaacctggatctgagactgccagctagctgcggcctcctagtctgtaaagcgaagggagaccaaggacgctcccaaggacccggcttatcgcccctccctttccttcccggggacccagaacagaccacaagacggagggtggccgctggaggtcgccgtggccccgcgataccaccaaccgacagaaatggagaacagttgattcagattcagctgatattctcaggtctggagcgggcctgagcgctttaattagcccggggctaatgtcctcacccatctttgtttatagaacgttgaaactccagtactgttggtaagttccaggaagacaggaactttgcactacttgaactccagggtctagaacagcctgcaatctagcagatgctgtaaattttttaattaagcggcc

SEQ ID NO: 265458 - DNA, 892 bp, Homo Sapiens
tcaagtccacggtacccataatcaagagaaaaagtgtctcacactatcaatctgatggagggatgcaggggctttctctctttgatccaaggtatatttgaaggtaaaggttctttgctctggcctggggacatttccctttagcactgcaattagagacaaagaagacaaagcctggcagtgctgtgggaggaatgatgaataaaggagagaactgctttactttggggggcatcctctacacccataaataatccgtacatgttcatagactctaaggatggaaatgccacatctttcaaagccaacatgcatgttaatctgataccgggaataaggtgaagttattacaattccctatcaccttgcctggaatggtgagcctggaatccaagaatcttagaagccagttttggctcctgagaaaaatactgtgcagtgttggaacacaaaggtgcaattattccagtaaaaagatctgcttctccggttgtctctgggctgtccactctcccacagctctgcacagtcaatagccaaggaccctcagctgacggcaggtgtcagattactattccagcagcagtgtcagagggactgattacgcatctagtctggagtgatgtggaaaggtgaagctgcattctattataaccagagacagtgtcagtatggagaagaggatgtgtcagagacagactccagttcgagagggttatttctggaatactccaaggaagcctctggcgtggctgcccacatgcaccagacttgttgctgtggaatgtggtgttcagagttgtcactccctcaagccttgtacctaaaaataagtatctacgtattaaagcaggtttatttttactcagactcgtgccgctcgtgccgaatt

SEQ ID NO: 265459 - DNA, 591 bp, Homo Sapiens
cagaaatgaaaagtctgccttatggaagacaaggcaccgacgctttccctgacagcatcatcatcacccaactagggcagctgacccgcgtcttcctcacgacgtggaatggtttgagtcaagggttttcatggccatgagccacgtggaggctgtgctttttgtttcctgtgagaaatcttcaaccagcgccactctcagcctcccctctgccagcgcttctgtggctgcacctgcattcgtgggctgtggctgcgaagcacaggaataattgatggctctggggcactttgctgggctgcttccagaaaagttgacccctccctgcaaaccagcactgcccagcattcttgtcccgccaagcctgactgtgagctgttgtgacgttgccactttgctcggaaaggaccccttaccttttatttcccttgcatttctttcaattctaccattgaccatttctcatacgtgtggtcatcattgtatttcgcccccattttgtgaggtttagtgtattcttaaagtttcctgggttttgatgagagcatattctgtcattatatttaacaggtgttttccccagcttgaaaa

SEQ ID NO: 265460 - DNA, 260 bp, Homo Sapiens
  misc_feature (69)..(135): n is a, c, g, or t
ttagcccagcccctgtggtgcatgtctgtagaccccagctactctggaggctgaaagtgcttgagcccnnnnnnnnnnnnnnnnnnnnnnnnnnnnnnnnnnnnnnnnnnnnnnnnnnnnnnnnnnnnnnnnnnnagactctgtttccccagaataatggtatggaagtttctgttgtcttgtaataaaggcttttaatttcgattttattttaggaattagtatccgataccaatcaacatgtcaaatcggctctagct

SEQ ID NO: 265461 - DNA, 336 bp, Homo Sapiens
cccaagtgttgtaggtccttctgcacaaaagttccataccctcccttctcctttggttttctaatttaagtgtgatgagtagcagccagccaagtgaaagaaaggcccagggatttcaaaggaaagatacaaggctggcggcaaaaaggaagggctttctcctcactgggccctcttcagtggcttgaactgtgagactcctggaggtatcagcgcttggttcaaccctaaaagaagttgcatcagacatggcaactttggcctgctttgcttgtattctcttgtggccgaatgggagtatttaattaagtgggctctctggggggaagttttgcg

SEQ ID NO: 265462 - DNA, 946 bp, Homo Sapiens
  misc_feature (31)..(31): n is a, c, g, or t
ttaaagtgagacagtcacactagatgttccngtaagtactcacgctggagtagaaagagtattccatttccaaccaggagacctaggggccaagcgatatgaaatcccctgagactcagtttttccatctttcagatgggactgtgtgaggaacgagcagaacagtctgtatatggaagcactttgtaaagccttcagttctgtaggtaattgccactcttcttctctctagcagtctaaggtcctgtgctctctggtaggggtgcttcaatactttttttgtcttaaagtcacttccctccagcttctggtaatgttgtattgcttcttaattctagtcatttagaagttgataaataacaactgcttcttgttctaagcaaattacatgtcatttgatcagaactttatgaggaaggaggcttagaggggccacacagctactaggcaagccggctgtgtgctccttataccttgctgtattactgcgttgtcacaggagtttcctgaggacagggacaacgtcttactcatctttgcattcacgaaatctagtgctctgtttcacagtaggcatttaatatgtcttttatgtgaataacctgtccatatgttcaacttacattattctctccataatctaagcccctttcttctggttttgataccaagaagtaaaatatttggttggttagcctttttgtaatagtcctgtatagtattatgtttatttgatgatgtctgtatagtattatatctgcgtagtattatatattttgacagttcttttcatagaattttataagtagagttataagttaagaacagtcatacatccttaactcctgtactttacttctaaacgttgttaatggagataaatcttagaaccataagattttcccagatcctcccttctcccatccaaagagaaaaaggaaattaa

SEQ ID NO: 265463 - DNA, 782 bp, Homo Sapiens
  misc_feature (445)..(568): n is a, c, g, or t
  misc_feature (588)..(601): n is a, c, g, or t
aaactgaggaaataaaaggtcatgagaaactttgggtagacagaaccattaaatggtttctcaggcccccaagaatccactgggcatatggaaaatttatacatcttgccctcctctaagtgctgtcctgaaatgaactgtgacttgcaaagggtcacctgcttctgtaacccacgaatgccttcaagtgcagatccacagggacatctttgggaggcacaatagggatgcagatggaactggggaggttgtgaatgctgggatgtaccacgtggctttcacctgtaaaaattccttctgcaaaaatcaatactgctcggatgatgggtgtctgcagggaagagtaaaaacagtttaagaacaactccaactttgggaagctgaggtgggcagatcacgaggtcaggaggtcgagaccatcttggctaacacggtgaaaccctannnnnnnnnnnnnnnnnnnnnnnnnnnnnnnnnnnnnnnnnnnnnnnnnnnnnnnnnnnnnnnnnnnnnnnnnnnnnnnnnnnnnnnnnnnnnnnnnnnnnnnnnnnnnnnnnnnnnnnnnnnncagaggaagactctgtctcnnnnnnnnnnnnnngaatgactccaagatggcacaggtgcctctaaataccagctgtgagtactgtcttaccattagaagtggaaatgcgtaattctgtatgagcagtttgggtctcattccccaggctgactgagagcgtggtgtggagcctggtattggctgggattatgccccgatgcccatcagcctcgtt

SEQ ID NO: 265464 - DNA, 847 bp, Homo Sapiens
  misc_feature (222)..(222): n is a, c, g, or t
  misc_feature (769)..(769): n is a, c, g, or t
agcctcagcattcgccacaccatccttctgaggaccaagaaagaaaacctgagcctctggccccggcttcccaccccaaccctgtcatctggtggggtcaacaggacaagttttcctaacccagcaggggagggaatttatgtcagtcccagtggttctaccatcccttggccaaccaggcaagagtgacccatgccccagtaagaaatctggatgcatcangcgtgggctgacttaggagctcatggagttgcccctcaaaggaatctccttttctcctgcctttttcatctttggtaggcggccctgctgcctcccagcaggtgaccacatggccaagaggctgctccccctctgaaggtctcaccttacccttctgggactccaggaacatctaaaagggaacccaaactgctgtagtcatcaagcccctgaggactgtcccaactggggttccccctaagctggatcctaacactagggggctcaaaactgcttgctgtcagcctccagctcccaagaggagtccctgagggaagacatgcccttcctgcggccagtcttgcggggtcgtggcttgctcttggtgaagcagatgttgtgcttggtggacttaaaggactccagccgccgcttcatgttctgctggaagacctccttgtcctgccgctcctgcgcatcctctgagatgaagtggcgactgcagctggctttgtactggcaatgacagccccgcctggctatgaggatggatgccttggcctcccanaagaaccccaggccacagccccaacatattcaccacaggacctgccagcccagcttttccagaattaacaatggattg

SEQ ID NO: 265465 - DNA, 412 bp, Homo Sapiens
cccctccaaatgtacatatagcccttccaagctttcaatagacaatcttttgccttggctacgtaaaagacacttctaagtcatctgccctaaaaagacacccttttctcagaaatgtgtttaagaaagtgaatacctaatttagcaatgactttcacagtatgagagtacctccggggttatggttgtaataggcaccaatacagaaaagatggacattatatattttaaaaatatataataccctatttggaaatgtatcatacaagtttaaaccctaacatttattaatatactttatctctctttggcttacattctgaattttgagtaatatagtatgaaatttagagtattaaaaacaagttacctagtaagaagagttaactataattatcagtacctagtctag

SEQ ID NO: 265466 - DNA, 854 bp, Homo Sapiens
  misc_feature (232)..(232): n is a, c, g, or t
gcaggtcctcctttgctaggacgtgcccttttctgtcccggaatactctaaacttggcattttggcagcgtgaagttttcccgttgtgactttctccttgttcccttttctcctccttctttgcagacaatgagtagccactgctgtttgccctggcccatcaatgagaagatctgctcttaggagccctgctttcctgctgaaggccctgaaatcacctgtgttccaggcncacctgctaacaataaataatggctgccctgatgtggggaattagctcaagtggtagagcgcttgcttagcacgcaagaggtagtgggatcgatgcccacattctccaagctttattatttagacatcgtgtctccaaacactcaggtctccaaacccaagttagtgtctgagaacaggatgctgctttggttccaagacgtaggagccagcaataatagagggctggtgatggctcccctcttggcattccagtatagtgtagatctaccatgtaattaattctctgtttctttgaggagctgtgaaaccaagggacatatacaactgctcttttctccctgtttctacctgcagctttgtcctaaatgtgagacaattatgaaaagtgcagcgcagagccacttgggtaaatacagccccggctttctgctcaggggacagagtttgaggcactgcagaggaaccggccaaagtatgagacccatatattgagagtaacagagtgtaaagttcaaaaaaatcaaaatatttaaagatttatcatgggtcttgatgacatgatggaatctctctactctctggacttattatgtgtggtaataaatttactttttaaaagc

SEQ ID NO: 265467 - DNA, 816 bp, Homo Sapiens
  misc_feature (363)..(401): n is a, c, g, or t
tgagccaccgcgcccagcccctgatcatttcttttttgtgggtgtgtgacaacccaggaccttgtatattaaatttactatatcttcgatcatacacatttatcttagagagtgtgaaatttccaaagtacaaacactgtgtgttttatttcttgatcttcatgttttatttcttgttctttgaagttgagcaaaatgcctggcacactatatgttgtccttagaactcacagagcggttagtatttttgagcatcagcatctgtccctgatccagctccatctccgttgttcttattttttcctcataaagtttaaatgaattagaaatttgtttttattgagttttgaaaagtcaagcacnnnnnnnnnnnnnnnnnnnnnnnnnnnnnnnnnnnnnnnacatgaaagaaaatcagacagattgaccatctttgacggtaactcaaagggataaatagatatagttaaccgataaaaaaacaacaggtgaaaccatgatatttcatgtcttgaccagattataagcactcttaggataaaagcaaggtgataacccactttgttcatggtgtattgaagtatctttcttagtggacactcccatttcaccccctctcatcacctgttctgaaatacatgctgggaagttgacaaacaagattctggtaatttggagaagacagcggttcaaataaaggagaaaatttctctgtatttctgggaaaactgaaaatattcagtagataagcaaaatgttcaatttcatgttgctcttatagttataggtattctaaagaaacccatattaatccat

SEQ ID NO: 265468 - DNA, 553 bp, Homo Sapiens
  misc_feature (239)..(239): n is a, c, g, or t
aatataaactactaggcaaagactgggtcagtcatgatagacagaaaaactaactaaataagtggcactatctactgtgggggaagtcttatttttctggcctagatttagccttatgtctttcttctgtatacccttcattcccaagctgtgcagcaaaaccaatttcccagtgtaaaaatgttcaagaccaattgattacctcgttaaggtacatccccaaagaaacccaaagcttnagccttgcatcctgccttgcaactagacaaaatatttaacatagtggaggctcagttttctcattcataatatggggataataaaacctctcgcagggttggtatgagaaataaatgatgtaatgagctcaggtatgtgagatcacttggctcagtacctgttacatggggatctcagtacattttttgttgaatctgttactttgggcaacataaagaaatactatcaactaagaacagaagtcacagattgtaaactctcatcatctgggatgggtaaggttctcaatacattttggagaacagggagtgga

SEQ ID NO: 265469 - DNA, 701 bp, Homo Sapiens
  misc_feature (442)..(442): n is a, c, g, or t
tgtaatcatcccatcggcctttctggtcttcttcaatctgtatattatcaggaaaagccagtcatttatgttgtaaaatttttttgaagtagtgatgttctctctgctgaacaggtttcaaccaattcttctttatcgttttcaagacagcagtgtctcaaaattggcctaaacaccagaaggattcattactgatcaagtagccgacagaagtatgtccgaacaagagcataccatgtggtggggatgagatggagcagagctcacgtgcaggttttttatttgattttgttctaacaaggtagtcatatggcacctctcaccagggagatgcaataatttgattcaaaaggaaactcagacatgaatcacaataaagaagtaaacatgctgaattggaacagaaaatggcatgttgtcaacagagagtggtgcaggggancctctccaggagaggagaaaagagcagaaagggcaagtttgtttatgttgctgtgagagaagagctgcctggttcctctgacaagcaaagggcagtctgtgctaagcctctggggggaacctttgggcttcccagaaaagtacaagagagagcgcttcactcacgagggacagacagggtcagactcagccacccctgccccacgcagacttctgggccctttctcagctagagttgaacagggacatttgccatgact

SEQ ID NO: 265470 - DNA, 742 bp, Homo Sapiens
cctcaccatgcacagaagaaatagcactggctccgaagttgtggtttgtctttttttggaaagtcaggcttgtctgccaaagagctcgaaacacttgaccagctctctcatttatcttaacatgtgtatttattctcccttcacagatggggaagtgaagcttgcctgagggctgatatttagctaagtcttgatcctctgccttgtggtggtcagcttagataaaatggaatcctaaaacttgatttttatcccgtagtgtgaacctcctcccacattaaatctgctagtagggctgctcacaagggtaagaagtgttagtttggagtgtttttccatcatgtgacgtggcggtcttctagttcagggcccctgccttttagagatgaggaagtgccagttcgtcacaacacagttagataatgacaaggccagtcctctagctggtttctttatgctccaccagatgtaaattttctctccgtttcctccagccaacctaaacaggagttacaatcagtcaggtggccaaaaggaaagcacaatggaaaagaagcccaagatctagttctctagctcctaaataattggtatattaattaggaggctgacttattataaatcaaaacatatgaagatgacagtagctaaaagtaagaagctaaacctttaatttcaagaattcttttactaagcgctaatcaggccagtgacatataaataccatttcacaactgaactg

SEQ ID NO: 265471 - DNA, 657 bp, Homo Sapiens
  misc_feature (63)..(63): n is a, c, g, or t
  misc_feature (225)..(240): n is a, c, g, or t
taaatatctgttaaggaggtcacatgaaaagattgctccaactcattcttgctggtgggctcncaagggtaaaataatatagttcgtgtcttctcagtcatgaggaaaccattgtcactaaatctccctgggatgcttcctacatccaaccaaacaaagggagcgacagctgaggtctccaggtcaaaaacaaatatgtcaccttgctgagagatgatggcctgnnnnnnnnnnnnnnnntgaatgaagtgaaggatgagggaagaggttatatagtctgtatacagttcctgtaaacatttatgtgggcttaacaaggagtccatttcccacaactttggttcctacaactgcctaaagtgccagtttccaaacacaaaacaatacatggaaaatgacctacaggcctatggaacgttacccaaattataatcacaaatcaaggaaatacatcatctccaatcattaaggagaatatttcacaagaagctcaaagctttacatcttttacagtttttctcagagtatcatcaagagagcaacatttttacatacagcctgggtggttttaatgactttctaaggatatatctggacctagctacagagcccaactgtggagcttacattcaagtctcctgaaaagatccagcagat

SEQ ID NO: 265472 - DNA, 617 bp, Homo Sapiens
caatgcctagtttggcctaatgcatcagctgcaccaaggcaaaatcatttttgccaaccagcccagctgcagtttggtttctggtcaagtccaatttatggacagcggagaggagtggacagcttctctcagcataagtttgtctccagctttcatcccttcccacaggggaaggatttcgaagccaaaaggttaacatgagatcaacttcccatgagtattcacggataaagtgctaggttttaggcattattcaaggaaagtaatggaaatttaaagtaataatatgtattttcagtgtgtaataggttgaagatgcaagttgcaatctctaggctaaccacttaagagcaaaacatgtataattaaaggaaaaggagtaataaacatttgatcaatttttaaaaagagacaaaggaggacaaaaggaatgtgtgaaatggaaggcaaatagtaaaatgacagataaacctaatatatcagtaagcagaataaatataaaaggactaagtacttcaggtactggagtactgacattatcaactgggttttcaaatatgaaccaaattgtgtgcttttaaatataaaatatacaacagttaaaattaaacaaattt

SEQ ID NO: 265473 - DNA, 532 bp, Homo Sapiens
  misc_feature (63)..(175): n is a, c, g, or t
gctcaagtgatcatctcacctcagcctcacaagtaactgagaccacaggcacatgccatgaannnnnnnnnnnnnnnnnnnnnnnnnnnnnnnnnnnnnnnnnnnnnnnnnnnnnnnnnnnnnnnnnnnnnnnnnnnnnnnnnnnnnnnnnnnnnnnnnnnnnnnnnnnnnnnnnatgagccactgcatctagctcaattctctttttacttccctaatttagcacaattatgacccggtcttttatgttaaaaaggttgagacaataaaacaataaacaacatcttttgtaataactctcattttacagtttttagtatatgaaagtgatttcaatttatacaacttcttaatactaattgctaattgcctatagacagttttgtgaagtaaaaaattttatacacataacaaatgcatggtgcaacaatacattttactttctaacaaaaacaaccaagcaactaaaaatggcaaacatactgacacaggtcagagtgaaacatttaaataataagaaattcacaaaatt

SEQ ID NO: 265474 - DNA, 613 bp, Homo Sapiens
  misc_feature (327)..(327): n is a, c, g, or t
gtctagtcatatccataaactgtatcatcaccaagagatgtttattagggcaatcaaaagatgatttattattttttaaaaaatcaatgtggccttcccttcctctttcttttgattcccctctttgagtttttatgtgtctcttttgccttcccttcccagagtggaggagttagacctgcattgtgggatgagaggagttgtggctatgtgtctgctggcacccaagagggctgagggtgaggtgtggaagggacagggggaggagatgggcagcattgttaaagagattggtaccactgagcaaatatgttgagaatgatgatnggcaaggtttctccctgttaggagaaggtatttgtagaaataggaatgaggagagcatagaaaaccctggagtgtgggattagaatagaactcatatcttttaaatacataggaacaatagagaaattgttgggtgtgcccatatacatatattttgtgattcattctaccgagaggacataaatgcagtcacagctcagtaacagtaaacacaccaactgccaagttattatttcctaaatactatccacaaaaaaggggaccagggatgattcctagtcggaga

SEQ ID NO: 265475 - DNA, 645 bp, Homo Sapiens
aagggtctgcattctaatctgcaggctctgcttgctatcctggaaaagctgcaaggaaactagccacgcgcgtacagaaggtgaaaacaagtcacctgtaaagcagaatgctaagcctgtgccactcgtccttctaagggtcatattccctgggtgtggacatctcaacatgagaagctaacagaatagctttccaaatcagtaaaactcacaaatacttggctgaggcaaatacaaaattattctataggagtgactccacagggaccagtctacaacccaacacactgggatttctctggtaaacaatcccctcttgaaaaattaccccacagtaaaaaaattataagccctacatagaagtgagccacgttgaagcacagtgagtggatgcaactaatgggatcttttgaaccccaagaactgaagatggtagagcggtctaaaaaaatacttgcaaatataagagtttaaattgattaaagaaatgggaaaagagtagaaactgtgtcaagaacagaaaattaaattaaaatgtgtttttgttaaaagagaaagaaatttttgaaataaatatatgatcaatgtaatttttaaaaactcgaatgtttcagttcaaaagtcattaggtagagtctgagcaaa

SEQ ID NO: 265476 - DNA, 858 bp, Homo Sapiens
agaaacacagccgttcactgaagaggatttgagtgttgtctcctctgtggggtcaaaacatcatgcttctttctgttctgccccatggcagttggtgacgatggcctagcttccatcccgtagcttcttgtgtttttctattccaccagtctatcaaccctgtatttgttgtcaaatttacactgtccacaggcaaagatccattctcctttagaatttaataggagggtttggaaatgatgccatggaaaccctgagcagcttggcaatgctgaccccaaatgagaaataactatcattggtgttttccttctacttactattatcttgcccattgatcttcaaaaagttcattggtcaaattgattgagggaacgcaagacttaaatgtaatatggctctggcaaattctgagatgctaacaaaaacaagttttcttaagaacaatgtcaactgactcacagtatccgactatataaagtcgagtgctctcatgccaggaagctgatacagttcatgaaacctcagtcattctttcgtattactccctgtcttcctctttggaaaacaatcctcatgaatttggtcttgacgctgacttaacatccccaggaaacagatactcaattccactgtcttttttgagaaatgaacagttctcaaactttgtttaaatttccttttcacagatgagtaataaccaaagatatttctgaaagggctctgaaaacatgcaggcaattgatctttaaaaataagatagaaatagtaggttttataaaagaaggaaatagaaatacttcagaagaaataaagtgtgctgaatcatgttttaaacataattatatccggaatgca

SEQ ID NO: 265477 - DNA, 1017 bp, Homo Sapiens
  misc_feature (949)..(949): n is a, c, g, or t
  misc_feature (981)..(981): n is a, c, g, or t
ttattccatttggccaaagcaagaagacaagacagcaagatttctcaaatcaccttgacaaagagatagggagagggtttttatgcagctgacgagtcagggagggggagttttggggaatggatggaaagtccgtgtgtcttccgtgtcagctaacacttcaagcagccagacctccgggtgtcagcacctggtcgcagcactttcaaggcattcactccgtctgcaaacatttctcatgaccctcatgttatctcctcccgtttgacaaagaaacagtagatcagcagtttataatgatgctctcctggcacagcctggtgccaacaaacatcttgcaagcactgacgtgagccccggccagaagtctggttctgttccaagagctgggaaccaagaagggagcagagagataaaacttctgccacagggagtttattttctaggtagggaaacagaccaaaatacatgcaaataaaaccagcggaaagcagcccactgatgtgctggtcgatgtctcacagcagctctgggggatggcggcccctgacctgcagcactggctgatttctgcggtgtgagtcctcccactacagccacctccaaactccctgtgtgaaggcactgaccacggagtggggaaggggcctcactgctggccctccctgggctgcctacgagtcggctcaggccacacctgaagagttccacagtgacaagttacaggagaaggaaggtgagcccaggagttgcaatgtttatggggagagatacatttatggggagagatacgggaggtgtcactaagaaagtgccatttgatggcagagctgctgtggaaaacaggatgcctgctcctccaagagccaaacagaatgaccacatgaccccgcaatctcctctccacgtacctcccaaagaaatggaaagcagggacccaaacaggcanagggcactcccctgttcacagcagcattcttncctcgtgccgaaaacttggggttttagggccaaaaa

SEQ ID NO: 265478 - DNA, 721 bp, Homo Sapiens
  misc_feature (15)..(15): n is a, c, g, or t
aagtatcagtaaacnaagaaacagtatagtaaaacaaaatttttttctgccttggtccattgaaagaaatatttagtttcatataatgtgaacaaaaaccttaattttgaatgaacatttgatacataggaactcattcaaatcattgattttctggttaactttgttagtagtttgtttttttctgagtcttttgttttaatccagatagtcagtctttttctcctttttacatgcttgaaatggtaaaaatgaaatatttttacttattcttaaaaatatttccagaatgtcttacacacacatacacttagaaacaaatacaaatatatagtgatattctctcacattttacagagaaaagcgtagtatacatactttgttttttaatttcacagtagatcttagaggtcttttaatattagcatactgagaactttctcatttttttcataatagtattgtttattccattgtgatgaatatgctattgtttttgaaactagtcccatattggtggacatttaggttgtttccaggtccactattacagataatactacagtgaataagtttgtacatgtatcatttcatatgtatgccaatatttctgcaggataatttcccaaaagtgaaattgctgaatcaaaagatatatccacctgaaatttgattacccatatttttaagcataaaggaagagataaagggaaataaatag

SEQ ID NO: 265479 - DNA, 483 bp, Homo Sapiens
  misc_feature (358)..(416): n is a, c, g, or t
  misc_feature (439)..(439): n is a, c, g, or t
gaacaatgacttgtgactgaaagccctttccatattataaacatgaggtctgtctttatttctgattctacctgtttatgtttcccaatacatatgttttctttttgcctaaaacgttttcaataactagaccctttggaggcagggaggggtggagattggatttggatatgagggattgctatttctcccataaaatgtaaaaaattgccttaaaaatatcactttgagaggctaaggcaggagaatcgcttgagccaggagttcaagaccagcctgggcaacgtagcacagtgagaccccatctctacaaaaaaatttaaagaaatagccaaccacagtggcacgtgcctatatnnnnnnnnnnnnnnnnnnnnnnnnnnnnnnnnnnnnnnnnnnnnnnnnnnnnnnnnnnntgcagtgagacatgattgtgccnctgcgctctagcttgggtgacagtgcaagaccctgtctcaaaat

SEQ ID NO: 265480 - DNA, 674 bp, Homo Sapiens
  misc_feature (36)..(36): n is a, c, g, or t
ttttcggcacgaggggaactgcacacacagcagggnagccagattggaccacccccctacaaaccctaaagcgttagctgtaagctccggggaagacctcccggcactaagcatggaaaaaggctttcacacccgacttctcttccgtctcctcactgatctaatggattcagcgcggtcactgctcccctcatgaaacttcctaacagtctactctcaccacttttccctctctgacctctgactgtctctcttcagccgtgtcatcacacaccctcccgccagctgcaggggtcctctggaaggtcaggccctctgtgctgaggcctgtgcaacatgcagccaccttgtgatttaagctgtcacatctgaatccccagctttggcctctgcctggccacctgaaggacctcaccacggctcaatggtccaaagcagggtcatctttctacaggagtgcctccccttccccactggcccattggtgtcacagctcctgtcaccactctgcaactctttgttctcattcctcactcaacaaatatttgattgcccactatgtgccaaacacaagactagatgtcgaagacaaacataagccaaaccaagacacatctgtcaaaggcatttgagttagatggaaagaaatataaaattacagttgggaaaagtgc

SEQ ID NO: 265481 - DNA, 1015 bp, Homo Sapiens
  misc_feature (62)..(313): n is a, c, g, or t
ttggccctacgcgccccagtaattcggcacgaggtggggaagattggctcccatggtactannnnnnnnnnnnnnnnnnnnnnnnnnnnnnnnnnnnnnnnnnnnnnnnnnnnnnnnnnnnnnnnnnnnnnnnnnnnnnnnnnnnnnnnnnnnnnnnnnnnnnnnnnnnnnnnnnnnnnnnnnnnnnnnnnnnnnnnnnnnnnnnnnnnnnnnnnnnnnnnnnnnnnnnnnnnnnnnnnnnnnnnnnnnnnnnnnnnnnnnnnnnnnnnnnnnnnnnnnnnnnnnnnnnnnnnnnnnnnnnnnnnnnnnnnnnccccgtaccaatatttggagtccttagacattagattatatgaaaatgattgattgataggtaagaaagtttaaagagaaatgactttttaggaactagacttgaacgtataattaatatgtggaactagtttgcttttataattcattgtatcaagaaggagtcatgttttaaatccaaggcattgagactatctagaagcaaaaaagttggttttaaaaattctttttattagaagtgtgtttaaaaacatgtctttttttcccttgagcgacagtgggcctcactacattgcccaggctagtcttgaactcctgggttcaagcagtcttcctgccttggcctcctaagtagcagggattacaggcatgcacccacatgccaatttttattgcttaaaatggcgagttctatggatattatctagccccaagcccatatctgtacacttttgttcattttataataccagaaagaatgttctatcagtaaaagaaggttttaagtatgaatctccatttttgtggagtttttctaccctgtaaaaattaactttgtggttcccagtaattacagtaaggagtttttctatattttcacagttggatttatctaaggatatttctcagcatattaaggaatccttttctacatttgagcaaatactgaggttcatgttgtaccaaataataataaattgct

SEQ ID NO: 265482 - DNA, 1456 bp, Homo Sapiens
  misc_feature (171)..(171): n is a, c, g, or t
  misc_feature (219)..(219): n is a, c, g, or t
agatctccaaaattaactgagattaactaatgctctctagccttttaggatctttgtgttgtaacttatgaaacatgtcttagaaaacattaatctggaggaaatcattaaaaagtgtcagaggtaaaaagataggaagaatgcatgggaaggggagaacaaagaggattngagtcaaacagtcagaatggggcagcaagttccaactgtgcagtcagncctgagttttaaattttgtccttagaaaagcatgtgaactcccagggtgttagtgttcgagtagacagggcaaggaattctgtttgtcagcttaaccacatcttgtaggcgtttgacctgagcacgagtgtccaggtatattttgagtggtacatttatctcctgggcttaaagcccttactttgtttccataaaattaggacagaggcaaaaaggcattacgggatagcaccagccaattgtacatcaccttttgaatcattttcttgaaggattgtcaatattctctgacatatatcacctgacaaaaagcgaacaagcctagacaaactgaaaaaggaagcattcagtggttggagctgagcactactgtgttcttttgtgagaggccacacgttttcttattgaagatttggcttcttcggtattgtgaataattatttcttaattgtgaaaatggatgtcagttcttcttagtcactcttccaaaagctaatataaatttctgttgttgtcatttaaaaaagggataactgtattgcatttctgggtttgcagatttctaaccagtttgtaggcatttttgttttagagtggctccttaagaatctgtgagcaagttgcagaattagagtgtttatttataggtcaggggccaagaatgctcatttagctgttaattgtggcaggatgtgacttttgaaagctctgaacatatacctatatgcaacagtatgcacaccttatttacctatttagctcagtggaaaaacagcctgctctttgagcttttgagaatgtttccccaatgtattgtgcttctaaatgtaatgcacttgctttaatgcttttgttctcaatcaatctctggaagctattccaaacatggcatttctcaaggaaaatttcttgaatgtgcaaaattattctccaatgtgtaaaagtgacaggccacctttccctcatgccttatacctccacccaaaatacgcaataagcactcaaggcagaatggggggtcttcaggtggtcatttggccgtgctgtaaagatggccctgcttctcccagtacaccatgatattgaagaaggacactgtgtaaataaactcttgtttctagataaagcatggggacacaatttcatttcttcttagttccatctctagttggaaagcataatctgtttttaatatgctggatgcaaaaaataaaattcctgggaaaattttttaaaa

SEQ ID NO: 265483 - DNA, 814 bp, Homo Sapiens
  misc_feature (326)..(326): n is a, c, g, or t
  misc_feature (779)..(779): n is a, c, g, or t
gtgagaaggaacattgccactacttggatctagccttgtccctttataggtaggcaaactgaggaccagagtggttagtggtctgtttgtggtcacacagccagtcagtggcagaagacccagattctgaaattactgccctgcctgggagaaaactgggaatgacagtattcctgctcttgagacaactttgcatctcaagcagtggctgtggccctgtccaaattgtcatcctcattctcctgggttcccctccctgaccctggaggacaccaccttttcagccttgctgatctcttccatggcttgtgtgggctgggctggtngaagaatccacttgcactgctggatgcatgtgatgcctgcagtaccctacccccagggcactgtgtgcctgctatctcagtgggtcctcaccatagcccttggaaatacagcttgttttactctcattttattattctcattacagaggaggaaacagttacagaggttgtaacaaagccacccggatcggggagatgtattaattttctgttgctgtaacaaattacctcaaactcaatggctttaaccagcacagatttatcttgtagttctagaggtcagaattccaaagcggaatctggttgcattccttctgaagactataggggagaatccatttcttttgccttttccagctgttagaggccacctatgtatattggtttatggccccttcctctatttttaggtcagcaatggctggcaagtcagcaacagcatgggaagcctgntttgacttgatttctcggggccattaaaatccaga

SEQ ID NO: 265484 - DNA, 418 bp, Homo Sapiens
tttattgtactacttgattttcaagtaattgggcttatttattctagagaaaaagtcttcagtctcttgcttctgcctgcaaagcaaggcagagtcagcaacatgggcagtctccccactggagaacgctgagtcatgcatgggcttctccaagtttccatcagatgggatccagtgttgaatccagtgcaggactggagtctagctggcaaagggtaaatgcccccaaagccttcctgccatatggtttccacgaaggcctgagagtcagctgtacaactgtcttgtcttggccatgtccctgtttggtccctgccttgttctcttccctttctcaatttccaagctccacccactcctaaaaacaccagtcattctgaagtaaaaaatggacaataaacatgaatattcaagattc

SEQ ID NO: 265485 - DNA, 599 bp, Homo Sapiens
gtttgtaagaggttggattgtcgttgaaggtaggacccgcctgaaacctaggataatctcattttgatatccttagtttaattacatgtgcaaaggcccttttatcaagtgaggtcacattcacagattccagggcttagagggtggaggtatcattttgcgtgcccccatctggacatgcagtgtcctctcccctgtggggctggacctaccttcctagccgtcttcccagaacgtaatgtgtcttaaatccgtcatgctgacctggggcccctgggtgcccttggggcagggagctgatgggcactagtaccttgataaagttccttactgggcacccagaagagaataaagtaactctccttccccttctctgacttatgcccaggtgcccattcccactggcttgccgctccccagctccctgcgctttatattgttgaggcctcctctctcagctaagaaacaggaagtacacagatgtgtattcttaaagacagcattagccacggggcccccaccctcaaagggtgggagcgataactgctgctggttgaaactgacagttactactgataataaagttaattgttacccag

SEQ ID NO: 265486 - DNA, 976 bp, Homo Sapiens
aaagataaaccctttattgagacctgactttttgattttctcttatactagagttgaagaggttgataggaggccagttgctaaaagtgaagaggggctttgcatctttttcctgctaaaataaattgtgtgcttagctcagtgttgttcacaagcagccatcgaatacatgtttgataagctgatcagtagtgacagcttgttgggaatgcaggaaagggggaggacagcaaactgaatgggctagcagtgggaaatgctggaatcactaagccggcagtccagcaggcatgggatcctcattgttttgggtctgagtttagtgtctcagacttgattgtccttttcacaaggacctgtgccttgcatgcctatattcctctttgtcaggttcattgctgagcacagaatagatgtttggttaataggaggcggttgacttggttggctgaactgccctaaaattttgtgagaaatgaaataagtagctgaggaattttttttaggctgtttgatttccaagacatttagttattttagtaaatatcttctgtgcaattgtgattcaagaatttttaaattgtcctactttttccttattggtaaacaggaagtggtgacctcccccctcccacatgactttactgctctgagcgccttatgttgacatagcatttgcatgtgtttcaacagattctccttgtcagtaaccttatcagaaagtttagtgagccttttaatttcataccctccttgaacaatattgtgaaataggattttccttttatcgttttgatcctacacactctctggatagagtaggattggtagaacccctaaagaaagcagccctggaatttttgcaatcttgtgctcattttttcccttgtaagtagcgcataatctgtagggtaggatggtaaagcttttattgctcctataatgtggtctctaatgaaggacttaaaacacaaga

SEQ ID NO: 265487 - DNA, 700 bp, Homo Sapiens
  misc_feature (24)..(24): n is a, c, g, or t
  misc_feature (392)..(423): n is a, c, g, or t
  misc_feature (668)..(668): n is a, c, g, or t
gcgccccagtaattcggcacgagncagtaagtgttagcttttttaaaatgcaagttattcttctgatagaataatcttgcagggagctcaaggccatttattattaagttccttcattcctatttagcttaaagtctgtttcttgatgatatgtagtgaaatggtaagtatgataacagatgaaatagtaaaaaaaatcatcgaattatcagctctaatagcctcattttgcagatgacaatatgaaagtccataaaggttaactaatttacccaaggttgaacgatgagtttgtgcatgagaactcaggtttcctaactcctgggtcaatatttttccattatattcctttattcaatgtgtatacttcagaaacccaggttatttaatgnnnnnnnnnnnnnnnnnnnnnnnnnnnnnnnncaagtttctgttacttaagtacataattgtcatttatattcgctgactctccttggtggttttaaaaacctgtgtcccaaaagcctctgtacagtgtgcatgatactatggaaagaagatttacaatttagtgcagagtctgtactttaaaaagaaaccattctcgagttgggtgcagtggcttgtacctacctataatcccagctacttggaagactaaggtaggaggattacatgagcccagnagttagtggctgcagtgagctgtgattggcca

SEQ ID NO: 265488 - DNA, 392 bp, Homo Sapiens
  misc_feature (28)..(28): n is a, c, g, or t
  misc_feature (38)..(38): n is a, c, g, or t
  misc_feature (45)..(45): n is a, c, g, or t
  misc_feature (356)..(356): n is a, c, g, or t
acctccagaacccccgggttatttaaangtatataatnaaatagnaaaatatatatatataatcaaagttcccggttacctaaagtaccataattgtcatttatattccgcctgacctctcccttggtggttttaaaaaaccctgtgtccccaaaagcctctgtacagtgtgcatgatacctatggaaagaagatttacaatttagtgcagagtctgtactttaaaaagaaaccattctcgagttgggtgcagtggcttgtacctacctataatcccagctacttggaagacttaaggtaggaggattacatgagcccaggagttagtggctgcagtgagctgtgattgtgccacntgtattccagtttaggcagcagagtgagacaccatc

SEQ ID NO: 265489 - DNA, 709 bp, Homo Sapiens
attcggcacagcaagatctcagtaacctatgggtccgggtaacagggctcgacatagtgagtttcagtgtgcttgagcctgcgttgggatgtgctgtggccatgagatgtaacaggtgtgtcgggcacgtgttagcttcctggccagctctggaagtgcaaagccagccttggcctcctcacctgtaaggtgagagctggtgattgatgagttactgatctgtggcaaggatcagtgaggtggtgatggaagaaaggactttggtgacaagcttttgacagaggccggttctccttctgttgtagctatgtgtgaacgtgtggcggtcagtctgtaaacatgtttaatgctgcttcttccatgaggtgggatgtgggtatttttaggacttttatcatcacataatcctttttatggatgtgattcttcagacttgtcagtttttcataacaatggaaacaaagctattaccatttcttacgaaataccgattttcatagtggcatgatgagacattttatacaagtacctcatgaaaggacatctaggtagttcccagttagaataaaaactgcagtgagcagctttacagctgaatttctcgccatttctgacttgtttccaagatacagaattacttcatcaaaaggcacattaacacatttttattgtagtgttaataaataccattaaaatgtattaaaatatg

SEQ ID NO: 265490 - DNA, 416 bp, Homo Sapiens
  misc_feature (41)..(41): n is a, c, g, or t
taaaaactactgtgagaaaatccattaacataccctattantgtggcctaaaaagggtaaaaagaatgaactgacccgtacccaagtgttttgtaaaggaggtagaccagttggaattttccatatactgctggtgggagtgtaaaagtggtacacccacttcttctggggagcagaaagcaaccttccgggtacaggtgagccaaggttgatgggcagttatgcagagggagttgggatatcactgtgtgtacctgtgcaagtcctggagtgtgttgggtcctcatcagcagggctgtatgaaggtgttcattaaaacaaaactactgatagtgtggcaggagctagaaaacacccctttcttcttagatatccctccagcaccctctactggcaaagtttaactgcccctagcc

SEQ ID NO: 265491 - DNA, 609 bp, Homo Sapiens
gcaccacgtcggtgagggaccctgggaccctctggccttttagggttcagctcctttcacattctgtcattctgcttcagaccccacccctgtgcccacaccctgcccttttgtcgctataagctctgcagattctgagacccatccactgaccacagcttccctccttccccttcccttcctgcctccgccaatcctgttcctctgttcttctcctcacagacccccaagccctcaagcccaccctaatctccccactttctcctaggcttcatgtttgttttcctatcccctgcacactcaaaattaggcctaagggcttgatcattggattgaggaggtccagtttttcttttggccacctccctgcatccacctccctgctactcaggatcaatccaatggtctactttctatgcacttaaaattagatctatagttagaagagaagaattcgagtggttctagtataaagaaaagacaaatatttaaggtgatggatattccaagtatactgatttgatctttaccaattatatgaatgtattagattattgcattaccttgaaactgtacatctactatgcatcaataaaaaagaaaggaagg

SEQ ID NO: 265492 - DNA, 782 bp, Homo Sapiens
tattctccaatttcctaatgcgtcaaatggcagtattgactgctttgtgtgcctggctatttgggattaagtaccaataaataaattttaaaaaccacaaaacccagaaacatcatagcccttctctacatgagttcacagtttacgtctgggacagacacatgaacataagataaaatgataagtactactgtatgtgaaaacacttagacttatgaagtgcttctgtaagatacatttcttaaaatggttaaagtcagttgaagacctgttaaaaatcatcaggatattgcagtgtatgaaaagttttataaaagttatctttttcttggtcttgaccccgtcttggtaatagtggaagtaaaaatggagagaggcagatacactgtctcagatgtttttcttcctctcaacttcccagttgtcaaacaaaaagctggacagcatacaaaactattggacttataaactcacaatacaatactgacctcgtgttgtttgccagcctatgattgatcaccgcatatgaccactgttttgctttctagctggtggctttgtgaacaaagcatagcggtacagatatcctcaaataccctcatgtaccttgaagaggtcacttgggtagtaaacccttttggttcccgtgccactaacacaggagcaattgagagcctaaactgggtttgcctcagcaatagaggccagtagtaaaaattcagccgtaaagaccagcagtaagaaaagtagtcaaggtcaggggcaaactatctgctggagtg

SEQ ID NO: 265493 - DNA, 737 bp, Homo Sapiens
  misc_feature (482)..(482): n is a, c, g, or t
gatcatcaatatgttacttctctgtgccttagtttccacatctgaaaattgagggtaagagtccctctctagatttgtgaatgggatgaacacaggattttaagtacggttagccagcatccaagatggcctcaatgatctctgcctctggtatttatgcccttgagtaatcccattccacatgtctcgggttggtctgtgtgtcttatagaatatggcttgaagtgaggttatgtggcttctgaagctatcacaatgtcataaaggacactgtgacttctgtcttgctccatttctggggtcacttgcactagaggaagtcagctactaaattacaaagaaattccagcaaccacaaggagaggtccacaaagtgagagattgaacccctcgagctaaccaagcatgtgagtgagaccatgttggaagtggattctccagctccagtcaagccttcagatgaatgcagctccagccaacanctttctcactgcagctttatgagagcctctgagctggagccactaggccaagctgttcccaaattcctgactctcagaaactgtgtgagttactataaatatatttgttgttttatactacaaagttttgggataattactaaggagcaatagataactaacacattaaggaaattagagcctagtactaggttccgttgggtaaaaggttagctattggattattaatttcttccatttgtctctcctgtttcc

SEQ ID NO: 265494 - DNA, 920 bp, Homo Sapiens
cactcagcccgagtgggtagctgcctcttgcagttactaacttaagtgatactgcagatttgtttttttgacttttcagttatctagttaataaccataaacctagttaacagttctctgtattacattgtccctgttaaataattggtatagtttctgtcccctgactgatgtatctttataagcttaattctctattacaatacatttgtttatggttgtgatttgcacctctgggagggttaggttctaagatcagggtatcaaacaataaaacttgttggtcccccaatacactgcctccttaaatgtaatcgaaattggctgttggccctgggatggagccagctaccctagctaagacactgttgggcagtgcagagcagaatttggcagctgaggagaaggcctctcatctggctgtggtcagtgtcagttcctcagggctctctgcaaacagaactggaagtttatgctcccttttaccccacaggcagaaggtccctctgggagaaattcataggccagctctgtgctgagatttcagtttagcttatatatctgctacatttccattttcccctgctccagggccagttggaccacccctccctccctgtcttccctccctcctttctccatgaagacatttttcagctcccctcgtccttctttctcttttttgccaggggcccattgaatgcctacctcatttcaaatcactctgggttagtgccctcctcccagcccccatatcctctggcatgtgcctcattcttccctggcatggatcccgcatgtcttagatgggagaaggcatgcatggattcttatgagtcccgggtactgtgagcagtggccaagcttggcatttcttgtagcccagatgtcatggaggaattcatacttgctacctacag

SEQ ID NO: 265495 - DNA, 547 bp, Homo Sapiens
  misc_feature (131)..(131): n is a, c, g, or t
  misc_feature (536)..(536): n is a, c, g, or t
gaatgctcatatttctagttaaaggtgcagactaaagacataacattagttccacgccttccttaagtctattgatgtaagattaaaggacttctaaaaaggcataaatccactataacagagagtgggangaagacacagcaacaaaactttgaagctaaaaagaagataggttagtgatacctgggtaatccaaatcctaaaccagccgtaaagaaagtaaagaaacaacctgatttttatcacaggacctcaaaaaaggaaatggtggcaacaaggacctctggaaatggaaatgaacaaggagctaaaaattgcaaggtggttcaatgtttaagaaacagattcccggatcccctcccctatgctgtaaagctagacgactgcacctcccccactcccgtggaagactccaggcttattctctggagaccgtaaaatagagcgtctttggattggggacaccaagcacagtctaaggcaggaataatgtactgaaaacgggataaatatgtaaaaatttacaaaccaaatgntaagaacctca

SEQ ID NO: 265496 - DNA, 1001 bp, Homo Sapiens
atggatctaaataaagacatttgaagggttagtttgaattctaaaagtaggtaatagccaaatagcattctcatcccttaacagacaaaaacttatttgtcaaaagaattagaaaaggtgaaaatattttttccagatgaaacttgtgccacttccaattgactaatgaaatacaagagacagactgaaaaagtggattatgcatcttaaaaccctttctgtaaatattatgtagctaaagattgatttccagcatctgacatgacagtaggtttcttgttaaccagtttttcttctttctggataattgcatatgaatatttatacatactgaccaaaataaaggcctcaacttggtagtttactgaaagttcttggacaaatagtccataaaagctgttgacctctaaatgcactatggctggttaaatacagtgaccatccttcttccagctgtaaaggatgaagcgtattaagcattagccaggcagtaataaagctaaatagccatacagcagctctgacaatgttgtgctggatattgcagtttgctttcaaggtgcagatgtaaggatttaaaaaaataataatttggcaccaaataaatatgagtagcatccattggcctattaaatcgagtcaggatttgaagggaattgagtttgagaaatgaataaataaaggcaccttggtgcctgaccccctcaatcatgcgtgtgactttgagcactcacaggtgtgtgcagctactcagcccagggcaggtgggttagcctggggttataccttggccctgggaatagacaccattgggcctttggttttgttgggcttccttttgtctttacactccacacaggtggtagaaatctgagttctaaagcacttttgtgaaatacaagctaagtgagaattctaaagaaaatgctttggtttctgctgtctcaaataagtggcatttaaaaacaattattaataaatatttttaatggttttaactc

SEQ ID NO: 265497 - DNA, 821 bp, Homo Sapiens
acagagaaaaaagtactgtttgcttcacagtttcactaaacctaaatattctattaaagtcagtgtatggagtatgctggaaaatggcaaacattctgtgtgggtttcagaattgctgtattgggtacattttaaatatttggttatcatgtcaagttattacacattttagatatttatgattattgagatttcaataataagctattaaatattttatttaaagttccattctattttttgttgccttagtcccattgggctgttatagtaaaatgccatagactaggtagcttataaacaacagaaatttatttctcagagttttggaggctgggaagtccaagatcaaggtgctgacagattcagtgtctgttgagggcctggttcctgtctcaaatggagccttccagctgtgtcctcacactgtggaaggggcaaacaagttctgtgcctattttataaggatattattcccatatatgagggttctgcctttatgatctaatgattcccaaaaggccccaccacccaatatcatcatttttggagttactatttcaaaataagcattttggggggatgcaacattcagaccatagcagctgtacaattggcaaaaggattgcctgtttttaaatctctgaatttgattttttttcccaaatacctttactagaaagaaaatttaaacattttacatttttactttacatggagaaaattcatgtcttgctctggtgtaagtttcatattattctctggttaaaagttcccaatcagaacatattacaacaaaatctaaccaattaattaagcgg

SEQ ID NO: 265498 - DNA, 737 bp, Homo Sapiens
  misc_feature (24)..(24): n is a, c, g, or t
  misc_feature (206)..(311): n is a, c, g, or t
  misc_feature (336)..(398): n is a, c, g, or t
aaaaaatcaaaatttatggaatantttgagtggcaatttactttatatgtaaagttacacatttacaaataaaaacaaattctccagtggtagttttatactgagtcaggaaaagacattaaaatgggacagtctttgttatggcacatgttgattatgttcatttaaaaaattataggtgatggctgaggacagttgcttaaacnnnnnnnnnnnnnnnnnnnnnnnnnnnnnnnnnnnnnnnnnnnnnnnnnnnnnnnnnnnnnnnnnnnnnnnnnnnnnnnnnnnnnnnnnnnnnnnnnnnnnnnnnnttagctgggtgtggtggtacacacnnnnnnnnnnnnnnnnnnnnnnnnnnnnnnnnnnnnnnnnnnnnnnnnnnnnnnnnnnnnnnnttcagtgagcctcaacaggtgatggaacaagactctgtctcaaaaaggaaatacataaaaataaaaaattataagtaggatagtttataagccatgggtctcagtagtaatggcgaggggatccaccatcttgtcttaccctcacccaagacacaaatatggcttctgtttttaagccccttttaaatgtttctttctgaaaaaagtaaaaaattataggtaggacttggggaagtaacagtaaataatactctctttttgccttctcccacatttggaactacctgagatatatcaacgcaccagtcagatggagataattgcccctctgcccgaatt

SEQ ID NO: 265499 - DNA, 507 bp, Homo Sapiens
  misc_feature (38)..(38): n is a, c, g, or t
  misc_feature (44)..(44): n is a, c, g, or t
  misc_feature (57)..(57): n is a, c, g, or t
cccccctacctctctcctagccccagtccttttccatncccccngtaccctaccccntagtccatgtgtgcccctcctacccctaaaagtgtggccccgtccttccatttccccatccgtaaatttaggccaacctatatggagtaaccccccgggttgttttgggattgagtgagcccttaagatatgaccagctcctagcacacagtaggtacctcagaaaatgttagcctctgtgctggactgatttcatattttaccccaagtggttcatgtaactagggggagttttgcttcacactattaaatccactttaaagaattagtattcatgaagcacttagaaactggcttggcacatagtaagcactatgtgtttgtaaaataaaacttctaccttatttgactttttaaaaattgtaatttatttttatgagaataatgcagctctggttttgttacctatctcaaaaacttacttataaatgggtacagtaataatttata

SEQ ID NO: 265500 - DNA, 856 bp, Homo Sapiens
  misc_feature (415)..(415): n is a, c, g, or t
ttggatacttgctgctctactgctagactctcctcctctacaggagtcaggaatgaattcctggccattgcattaatccctttagacccaagcatgaattagctgacctgtggttatttccccttgccctggctgccaggctgctggcaaagtgaccatttgcccacttacatcctcattatgggaggtagagccctcccgatgcctgtgctgattccctccgtgtaagaaggatgcgtagttgttggtagtcccacgaggcaaatagctacactcctttgcctgggctctctgggattcttgcctcttttgtttttaccctctctgtgcttatggctctacccttctccaccttccatttcgctcacgtttggtttccttactctctctagaccaatgtctttttcatttccantgtacttaccattagtcatgtgtgcctcttacctaaaagtgtgtccgtctttcatttccttcgtaaatttaggcaactatatgagtattcctgggttgttttggattgagtgagccttaagatatgacagctctagcacacagtaggtactcagaaaatgttagcctctgtgctggactgatttcatattttaccccaagtggttcatgtaactagggggagttttgcttcacactattaaatccactttaaagaattagtattcatgaagcacttagaactgtgcttggcacatagtaagcactatgtgtttgtaaaataaaacttctaccttatttgactttttaaaaattgtaatttatttttatgagaataatgcagctctggttttgttacctatctcaaaaacttacttataaatgggtacacgtaataatttat

SEQ ID NO: 265501 - DNA, 820 bp, Homo Sapiens
  misc_feature (46)..(91): n is a, c, g, or t
  misc_feature (249)..(274): n is a, c, g, or t
ttgagatagagtctcactctgtcgcccacgctggagacctcagctnnnnnnnnnnnnnnnnnnnnnnnnnnnnnnnnnnnnnnnnnnnnnnttaactaataaatcaagcgtctggccacacatctaaatatgtgacactaatttaaacagaatatgctaccataaaccagggaaccaggtgacatattttccacatttttggagaaaataaaaattttaagtaaattctctattccgaaatagaatagnnnnnnnnnnnnnnnnnnnnnnnnnngttgctcaggtgatagggagctgatagcaaaatcttaaacaaaatttactgctacaaaattaaggtttacataaaattttaaataacataaacacaataattggcaaaatatttttgttcaatgggtttcaaaaatcaagaaggttcatctgtcatctaggtatgcctgttttctgatggttatagctaaaaaattccataaagaccacccaaaacatgtagtttttagattggcattccatattacgaacaggtgaggaatattcttaaaggtattcctacaaagctcacatggtatttaccacaggccatgtataaattgggcactcaagaagcatctgatgtaataacagatgagctacttcaaattattttagagcaacgcttaaaatattttctggctgcccaaataccattgttaaatacaattagacatttttgctcttaaactgattaaaatagtatcatacatcttttgagcaaccacttttacagaattttgaaattcaaatttcatttgaaagtcatttatgatgtgtaagtcac

SEQ ID NO: 265502 - DNA, 529 bp, Homo Sapiens
  misc_feature (23)..(23): n is a, c, g, or t
  misc_feature (34)..(34): n is a, c, g, or t
  misc_feature (233)..(258): n is a, c, g, or t
  misc_feature (324)..(336): n is a, c, g, or t
  misc_feature (479)..(479): n is a, c, g, or t
  misc_feature (481)..(481): n is a, c, g, or t
acaaattagtggtgctgtaaccngttaataattnagcttaatccttctgtcatgaaggtttcatattgttttaatcttagtcatgtattttattaactcttactcattgtttcaatacttcattcaatagatcaacggttagagacaagaagcattaagaaaattaagtcgataatgaaatactagatgatgagcataaaaatgtaaatgattctaaatatttggttcacgannnnnnnnnnnnnnnnnnnnnnnnnngagacagagttttactctgtcgccaggttggagtgcagtggcgatagagggagtactctgtctttnnnnnnnnnnnnngtgaacaaagtgaacacctgtgacccaaatttgaacacaaggtttatgaccattacactaagactggtatagctaattgggaggctgaggtgggaggattgcttgagccttggaggtcaaggctgtggtgaattctgattgtngncctgcgttccagcctgggtgacagagtgagaccttgtctcttaaaaaa

SEQ ID NO: 265503 - DNA, 522 bp, Homo Sapiens
  misc_feature (265)..(290): n is a, c, g, or t
aagagacaaggtctcactctgtcacccaggctggaacgcatgatcacaatcagaattcaccacagccttgacctccaaggctcaagcaatcctcccacctcagcctcccaattagctataccagtcttagtgtaatggtcataaaccttgtgttcaaatttggtcacaggtgttcactttgttcacttttgtcttttttaaagacagagtactccctctatcgccactgcactccaacctggcgacagagtaaaactctgtctcnnnnnnnnnnnnnnnnnnnnnnnnnntcgtgaaccaaatatttagaatcatttacatttttatgctcatcatctagtatttcattatcgacttaattttcttaatgcttcttgtctctaaccgttgatctattgaatgaagtattgaaacaatgagtaagagttaataaaatacatgactaagattaaaacaatatgaaaccttcatgacagaaggattaagctgaattattaactggttacagcaccactaatttgt

SEQ ID NO: 265504 - DNA, 672 bp, Homo Sapiens
  misc_feature (254)..(254): n is a, c, g, or t
aatttagtctgtgaagggacaacatctggggtaagagctatggaggaggtgctcagctttgtgagttttgtgccaggcatctttgctgaaaatggagatggcagcaagtgtgaatctgggggaatataagggaagacagaaaagccttaagagtagacggaggaagaagggtaccagaatagtccctgtggaggcaggcagatcagagctcagggtttgaaagtgggcctgagtaagggtcctgctagagaaanctgccagatggaagctgagccagttaccaactgctaatgtgccaagtataccaagcacagcatgtgtcctgtagaggagcattattttaaacaatgttctactatcatctaccaaaataattgtggtaaaagtgtagtattttattttttccttttatgtcagcaatattttaaaatattgatctgtttatcttatatttttatggataaatgtagtatttgcctcatattgtgagccactgagagtgcactgaacctattcacatgtctttaagatgttttgctgtgttaaaattttaggagagaaaaatacaagtgaataattatttaataggcatttattactttattttggagttgaattctgtcatttgaaaaagttcagtaatgtaataaatacaaagtgatctgcactgtt

SEQ ID NO: 265505 - DNA, 719 bp, Homo Sapiens
  misc_feature (245)..(257): n is a, c, g, or t
ttagggggatccctaacctacacagattctggttgccatggtctaattgctaccccagtggcaggaataatagaacaggcatcatagtccataggcacctaggcttccaagcagttcacagattttggtcatgtgccaggtctctagttagtacttcactggcaagtgctcggcttgaattaataaaagcagcattgaaatatctgtgggttttgtctttagcttccacttcactccagcctaannnnnnnnnnnnngtagtatctttcaactgattgtgtggcatgaattcatttagataccacaactcagaatggcattccaaaggcaagagtggaaatgtctcaacttggtaaataaaaatagcaaccagattcagccatcagacggtaattagtggagctggaagctagccattccaaggactaactatccttgataaagacgccaaggctctttagctttgcatgctcaatctctccttttctgttttcttccttcctttactcagatttttctattctatttcactcaagtaccatctgttattccttttcacacacttttcagacccttcttttattcctgcccattctgcatacctcatcgttaaaaggcgggtaattctacaaagattccaattagtgtattgtttgacggctgatcaggttttcccccttttaagatgaaccactgaataaatggtgtaaagaatgtaa

SEQ ID NO: 265506 - DNA, 722 bp, Homo Sapiens
ttacttccatgtctggaggttggtgcttgctgacagttggtgctggccattagctggggcgataggagtgatagagccacatgtatcccaggcttactcatatgttggaagtcacagaattccctggaacactaagaaagagcaagcttcagtatgcaagcactctccagatctctgtttatgccatgattgctattgtcccattggccaaaccaagttacgtggccaagcccggagaaaatatgggagatcattacccagtgatatggatattgatattgggaggcaacaggctacaacaaatagtggtagacttatttacccataatcaggcaagagccccatgtttaagggtagtgacaaaaagatgtgtttggcagaatgtgcattaaatctgattttatcactttctttagagaaaacaatcacttatctattatttatgttttaggttcaacatttgttggatttaagaatgtttgttcaggggaaactaatgttatattcattactaaccctttaaatgaggatttacagcatccaatccatgtgaagaatataaaactggttgataccactgaacaatcaaaaatatttatacataggcctgatataaggtaaaatacataaaaattgtggtttttctatctttatagtttttcattctcacttcctcctgctcaagatctgagaaagttggcatattaaaataactgccagtt

SEQ ID NO: 265507 - DNA, 514 bp, Homo Sapiens
gaatcctaaattaaataagttactcatagtcgaataatttgaaaaactgaattataaaggaagaaaaaaagttttcaatttttaacagcaaaaattctacttaatatgggattatggtttggggtaaatgaaatctacaaatgttcaaaaccaaaagcctaaaaagatctaaaatagtctcatttctctgcttcaaagatcagtgaaattgctacctgagttcatccatttcacagttgatctgcatgggaaattatatgtgcttctctgatttttctttggatgtgtcgcttttattctaactgctggaactatttgttgtacctctttctgaagatcagtttggggctaaattacaagctccatcagcgcaggggccatggctgcctcctgactgctgtaggctgagcacttggtagagcatcagcccacagatagcagcccagtgaaccaatgaacaggtggaagcaagaatcaaagtgttaaatgagagttaacctttaattaagcggcc

SEQ ID NO: 265508 - DNA, 1252 bp, Homo Sapiens
tcgatctagtctaggagctgagctgggtttgggtttactttgttgctattgctatcttcagtgctgctaaggcttcaagtttctgtaaatacgagatgtttctataatatcttgtactagattggggactggggtgttgggtggttttcttctgtgttcctaatgctccctttaccttttagctattcctgcatgtctttgccacagagggactctatctatactctcgcctcttcagggatagactctctttacttgttactctgtgctagggcttatgggtgagatagggttttctttgttgtcttgctgcaacctcaatcttagacagatataaaccttagggtggggctgtctcagcaattctgctcttccttcctacggcaattaaattctgccttgtatctgtgatggtcttggacaggagattcctgctctcccctccctcagtgtagcagacttctggttggtactggtataggatcctgggcctggaatagcttctttagtttatctcagaactaggacatttttgcatctacccttcccacagtaccaaaggattttctcctgtgtccttggggctagagttttcctacccctcttccagaggcatataagttttgcttctagtctttctataagagcaatggattttgcctgtgccctgtgtgtgggaggatgcggtcccctcccctcaatgtcttaaggcgtttactgcatagaaaggaaggatccaggggaagtgggtggggctttgttcctgtcctcaacagcagctgatcttgtctgcacaccacatacctgtgcctctgaagaagaacccctgtttctgccactcgaatatgctcttgagagcctcagtgatttgtgagtgagttgacccttgagttccagtaatcgaacttacatctggcacacttgcgttaatgatcgtacattactggaactcaaccaatgtgcacatgttccttgcagcgaagtagaacatattctggtcctgagcggccgttgaggagctttgtcgtcagcgaaggtgagtcgagacagaatgcgcagggttaatgggtcccgtgggagagttaagtacaccacgttaacgtgaatgtaccgttattacgcgaaacttctgaaaggtttaaggattgcttggggggacgcgtacgttctgttgggtatttggtgagtatgagggtgaacactgagatatcgtggggtagtgttgatgtggtgtgtgtggtgttgtggcgtt

SEQ ID NO: 265509 - DNA, 790 bp, Homo Sapiens
tgagctacaaaatacattcccaagaagctggaaaagtatttcctcccagagccagggctctgctgtgcagcataatacaaatatcccaagcttaacgccatggtttttatcatggatgctgattagaacataatttagtgatgtttttgattggaaacaaattttgaccccatggtgcgttacattcaaaatgtctccattgcaaagtgtttaaacttttattattgcatttatcacattgtattatagtcgtgggtagggtaaccacacatcctaagtttatgccttttgtcctgaagtaccatctggtttagcattttagctctctcaaaagtgtcctggtttagacaataaactctatagtcccccaattatgaggcaggtgcctggctgcagaggctgtggagcactggggtggtcctaagctaagtgtgggtctgtttgagaaattggtgaatgctggtgaccccagagatgtctgccttgttttgcatgccagagaagggcatagaggagaaacttaggcaccgagggccaagggcagaatcagtggaggagagtaaggagggtctccaagactacacctaaactctagaagaagagggctcctcttctcatttctgctaagaacacaacacattctaaggcagtgaggatggaagagaacagcttcgttttggttcttttgaggcttgtagttgtattataagacagcaaggaatcaagggcaatgagacaaaacttagaagatgccttgcaatcctaaacctcagtgaagtgtgaaaacaac

SEQ ID NO: 265510 - DNA, 815 bp, Homo Sapiens
  misc_feature (81)..(81): n is a, c, g, or t
acttatcaaaagtttggtaattcagtggtggtgatggtacaggaaggtggggtctcacgtcgatttgggcaggagtgtacnatgccacacccccaaggaaggcaatttagcagcctctcaaagtgaagatgtacacactgatctggacaccccacatctaggaagttgcacacagatacctcagggcaccggatgacccacaccttgtgtttcattgcatcagaggttgttttcagtctttactgttaggatgtaaacttgtgtctatctgtcagggtctcgctaatcttagcattatttgtagtatcatagactaccctggcaaccattaatacaaggaatggggaatctcttcctgcactcatgggaatcgtaagtcaagatatcctattaaataatcaatgtaattatataaagtaaatatatatccttatcagggtacagaggaatgcaatccatgaagttatctttgttaggaggaaaaggaaaaatacattgtgtgtgtgtaaaacacaactggcccagtggccacctgccacagtagggactgaaggcagtctctgggcatagggatgaggggaagaccttaccgtattttgtatattaatctagaaaaaaggattctaaaaagctgagaaatagaaattgacttgttttggggtgtgattcatttgctgatcagtctccatttgattgggtctaaaatgaaacagttacatttttctcccatccctatccccagatggactttgtccagtctcctagggagccaagcccttatcataatttcagatttaaagttcagatctccagtt

SEQ ID NO: 265511 - DNA, 708 bp, Homo Sapiens
  misc_feature (266)..(534): n is a, c, g, or t
ggcaattactaaattattgactcaggcaaggattagcaattgtcaaaaactagcaaatggagttgatgggggactggatattctccgactgcaggaggaaaacatgactttacaatggtgggatcagacccccttcaaccatgccagtggtccatgctagagttactaataatgggacatccagatagcatgtgtcctctgccatgaaaaaacatcacctctgatgtagtctggtccaaaatgttgtggttttttgtgctttgcgnnnnnnnnnnnnnnnnnnnnnnnnnnnnnnnnnnnnnnnnnnnnnnnnnnnnnnnnnnnnnnnnnnnnnnnnnnnnnnnnnnnnnnnnnnnnnnnnnnnnnnnnnnnnnnnnnnnnnnnnnnnnnnnnnnnnnnnnnnnnnnnnnnnnnnnnnnnnnnnnnnnnnnnnnnnnnnnnnnnnnnnnnnnnnnnnnnnnnnnnnnnnnnnnnnnnnnnnnnnnnnnnnnnnnnnnnnnnnnnnnnnnnnnnnnnnnnnnnnnnnnnnnnnnnaatgtgactctaatcaagtgtgtagatctaacctccagttcacaggaaatgtgtatcgaggaaccacccatgaggatgtaattagacccaaaaggtggaacattctataggacaccagcccagactggtcagcaagtcaatagcaaggagaaggactgggctagattaaaagag

SEQ ID NO: 265512 - DNA, 437 bp, Homo Sapiens
caacaacaacaacacaaccccccaaaacaattacatgacactgtgcggattcaactgtggcctccagcaaatcagtgcttacaggctatggcttcctcatctgtaaaacggggaataagaataacagtattcattcactcaggagcttcatggagaggcgtgatgaggcagggaaagcctgacagagcatggacagccggagcctctgagcgtgggctgttagagcgagtctgattgctgagattcccatctgttttcagcctacaggctgataatggcaggtcctccaacgactttcgttcagcgtcatcttattatcccaggccggggctactgtctgtgcagattacaccttctcggcaggtctgcatgggttttctctggctgcgctcatgtcctcccatgtccccagactgcacatgttagggtcacctggg

SEQ ID NO: 265513 - DNA, 939 bp, Homo Sapiens
  misc_feature (74)..(166): n is a, c, g, or t
  misc_feature (771)..(771): n is a, c, g, or t
  misc_feature (830)..(830): n is a, c, g, or t
agtatactaaatatgtaacttacacttcacaagccagatatgtgatttctggcttgtgatatgtaatgtcagtnnnnnnnnnnnnnnnnnnnnnnnnnnnnnnnnnnnnnnnnnnnnnnnnnnnnnnnnnnnnnnnnnnnnnnnnnnnnnnnnnnnnnnnnnnnnnctatatcttgcatggttttatgaaactggtaataattatgtatattagatgttagcacctggtatggtagtaattatgagaatttcattattttaatttgaaagttaaattttcctctggtctttttagaatctggaggtgaactggatattgtagtgacctcaaataaagaagtaaaagttgctgctgtccgagatgccttccaggaggtctttggcttagctgtggttgtaggggaagctggacagtccaatattgccccacaaccagtgggctatgcagctggattaaaagtgagtaacagaacaccattttcaggacatggaaactggcatttaattttttcacaattctgataatctgttgtctctatggagctaatagacttttacatactgaaataacaatgaactttgcttttagtagacagccctatcgtattatgaagatatagtggagttttaatttaaagaaatttaagatagggttttgattattgtgggagggaaagaaacattgagagagcacaaaaggaatagttagtcctaaaagagatcttcttaatccagcattaacattcaaatcaattactgagatgataatancccttgaatcccataagcttttattatccctattgataatgcttaaaaatatgtaagtnccaggaattccgtcctctctttcatactttattttcctctctttgtgttattaccagcatacagtcatgcaagaacaaattaacagttcattggcatacaaacatcttt

SEQ ID NO: 265514 - DNA, 905 bp, Homo Sapiens
caagcataaaatcagccttcaagggcttcttcatctctctccaggctgtccttagtcatcaggtctcacctggacaacagaggcccttatctgatggctgccctggtccagctgttaaccccttctaacctgtcctgcgaaaccaaaagaccaaactaaaaaaccttattaaacaaacacacagtgtcctcctactgaacaaaaggcaccagttctgatcccatggatacataaataggacactgactgggcagctcccatgcaaggcacccttcccagggctgcacacatcctaggaggaaattctcacaagccgctgcagggctgctaccctcatgatcttcattttatagatgaggaggttatgatgtgattctgggctgactcatgcccttataaatgcacaattgcctgaatttcgggctctcctgcctggtttcattcaatccaattgataattttctgccgggattgcagggctctctactaactgtgcttatgtccctcccacatctttgctgctgcacgcctccttgacaccaccttcccggcccctcctcttgtcatataacagtctttgcctttgaggcctactttctacaataagccctgctggtgcccctcctacatggccgggctccatgtccttcagtcagaccagtgtaagccctgaactgcgcacaaatcttctcacaggtgtcatttttcttctccaattagccatgtgctttcaaaggcagcaacgttatcttaacttttggtacgtcctatggcactcagcacggtgctgggcaaaaaaatgctccaaagtggtgactaagagaaaaagtattgaacacgttttcctacttctttctccttttatgtccccagctccttttgtgcatagtaataaattgcctaac

SEQ ID NO: 265515 - DNA, 780 bp, Homo Sapiens
  misc_feature (434)..(434): n is a, c, g, or t
  misc_feature (610)..(658): n is a, c, g, or t
  misc_feature (677)..(704): n is a, c, g, or t
gaaaatgcagggacagagaaacatgttaagacagcaccataaggatacaatcagcaaagtgtaaatgtgagagaaactacaggacaaatgaccttcaacagataaattgcaaacacaaagctggtggggaaaccaatagattaaaatatttaagagacttttcaactaattatggcaaaaggctttatttgaatcctgattcaaacaagttaattttaaaaatctttttagaaacttcagggaaatgtgtacgctgggatattgtatgacagtgcgggaattattcatttagggcatggaataatgggtaccgtgggttgtttttggaaacctatcctgttaaaggatactatgatttatggattaaatgataaaatgcctggaatttgcttcagaataattcatattgagtggatgggggttcaaatgaaacnaagaactggctctgattttggtaaatttgaagctgactgatggaatacttgtactattctgttttttaatatagctgaaatttttataagttataaaagaaatatgcaatctaggtgtagtggcttgtgcctgaatcctggttacatagaaggatcccctgagcctagtaattcannnnnnnnnnnnnnnnnnnnnnnnnnnnnnnnnnnnnnnnnnnnnnnnngaagtagactccatctctnnnnnnnnnnnnnnnnnnnnnnnnnnnnttatacagtaattttaaactgggagatgaaatgctaatttctagaagtccatttggttttgaagggtctcatgtca

SEQ ID NO: 265516 - DNA, 460 bp, Homo Sapiens
  misc_feature (340)..(340): n is a, c, g, or t
  misc_feature (348)..(348): n is a, c, g, or t
  misc_feature (405)..(405): n is a, c, g, or t
  misc_feature (424)..(424): n is a, c, g, or t
  misc_feature (449)..(449): n is a, c, g, or t
tatttaagcgaaataaacagttactctttggtaaagcctagttgtatgcttacatttttaaattatactctcattgtaagctcatgttaaaacaccaaagaactggtttatttggcatttttatattagtagttgttgaggggaattgcacaagtgtgtaggatctttgagcatttagatcaaatcctcattgataactgggagtaaatgaagcatactttaaaaaataacgttcaaaatggaatactctggggccctgaaaaccagtaaaatgttaggttcaagtattatgtgaattaagggaaagaagatagtgtaaagcaaaaggccttcaccagantcccaagngatctgaattctagttctgggctctgccctggattttctgtgtgaccttgtgttgantctggggtcaccacccgtntgggaaatttgaaggggtgtgaccnaatggcttctt

SEQ ID NO: 265517 - DNA, 328 bp, Homo Sapiens
  misc_feature (274)..(274): n is a, c, g, or t
aaagttcaatgcgaagttccttatgatgagactttcttacaaaattaaaccatcaattaatttgtaattttttgagtatagaaattgaaagaagagggccgggcaaggtgctgggattacaggcgtgacaccttgcgcctggcctatagaattcttaatgatgaaaatcttatgaacatatcaatctcctagaaagtttttgttgttgttttaggtttttagagcatacatgacgtattaccttgctctaaaagggttgttgcattctgtatangaagaacttaaaaaatgattgttccttatgactgaaatttgctttcaatcagaa

SEQ ID NO: 265518 - DNA, 959 bp, Homo Sapiens
tcaatgatctaaaggtagtatttgcaaaagccaggaagagagttaaatctcaaaaactgtaactagaagggttaagaattgtgagtttgtggcatcttggctcaaggcactgctcaactcccacagctattgctgcaaaacatgggggcaaacaaaagccagttcctcaccaactaaaggtgccagatatcaaaatctggaattggggaagcagctagaaatttaaagcactctgacagcactagaatatagaggtgacactcaaattcagagcataagatgctgaaatccctagctgacagcttgaacttacatactacatatgtgctgaggaaaccacaagcagcaaggtgaaaaagcagtcagaaaccagaaagcaatatttttaaaaaagagtaacatggagccaaatctgtgaatatgatgctctttcccaactatgctcaagctagggcggcataaagcttgaaatgtcagagtacagagctcaaagctggtggagtgctagaaactaggggaatccccagaataaagacaaccacagagaaaagtccatctctactcagatccttagccaactttcaaattttgcagacacaggggagactcacagggtgccacactaaaaccaccaccagtgcaaagacctaagagcagaggagagctacaagcggctgcatatcacaggaaaaacaaagtgtgtagtttgaccaagcagtttattaacagtctgctacaataaaaacacaataatcctcagaagaacacaagagttcagactcactacagcatatgtccaactttccactagacaagaaaaaaataggaaatcttgaccctctgcaggtaaaatgatagtcaacagaaactgattccaagtgagccgaaatgttggatttaacagacttcaaacatttatcataaatatttcaaaaacgtctgaaaaacctgtgccgaaa

SEQ ID NO: 265519 - DNA, 385 bp, Homo Sapiens
  misc_feature (166)..(166): n is a, c, g, or t
  misc_feature (190)..(190): n is a, c, g, or t
  misc_feature (294)..(294): n is a, c, g, or t
  misc_feature (343)..(343): n is a, c, g, or t
  misc_feature (362)..(362): n is a, c, g, or t
  misc_feature (374)..(374): n is a, c, g, or t
agtaacccaaatgttcagaaccccagcactgtgctctttcttgtaggtcagattatgcacatcagagtaccatgtgatgaccatatattgatttctgaatagtcctcatctttctctttttgtcctttgctatgctagagttgaaagatctagggctcggcacggntgggcttatgcctgcaatcccagncactttggggaaggctgtgggtggggcgggatcgctttaaggattcagttagtttggaggacttaggcctggggccaacatgggtggaaatggccgttcttttnacttaaaaatattaaaaactaggccaggggcatagtgggccatatgtcntgttaatcttcaggagganttgggggagggntgtgggtgggg

SEQ ID NO: 265520 - DNA, 337 bp, Homo Sapiens
  misc_feature (22)..(22): n is a, c, g, or t
  misc_feature (32)..(32): n is a, c, g, or t
  misc_feature (44)..(63): n is a, c, g, or t
accccgggtcaaacaatagtgnagtacccctncatcctccaacnnnnnnnnnnnnnnnnnnnntttaagcccaggccatggtggcctccgtgactaatagtccccagcctactccaggaaatggaggtaggatgatccccttgagccccaagaggtgaaggctgcgcaagctgtgatcacatcactatattccagccctggatgatagagtgaaaccctgtctcaaaaacaaataaagcctaagggaatatgcagattaatggaagagaaggctattttgtgcagacaggaaacagatgaaagacaatttgacttttaaaactatgagtaagctcat

SEQ ID NO: 265521 - DNA, 693 bp, Homo Sapiens
gcacagaagccccacaggtttaaatctagactcaaagtttaaatctagagaggcataagggtaagggagtgaagaaatacagcagatttgagaactgagtcacaaaaaagaactgagtgtggcttctggcccatgttactgattgcaatcaatcaggtaaaattcctactacatttttgaagcttattctgacaaaaataaaacaaactcacaagcccaggttccagaagtgtctgttcaaaacttaaaatattccttgggtctccaatcgcctagaggatgaggattgagaaggctgcacaacctccaagaaattcttgaatgtctcttttgggtgtggccgaaaaggaggatggaaagggaggataatggaaatgaaagaacctagcagagggtgaagccagaggccacagaggacaatggaaatggggagacccctgcctaaagaatggaacccagtcctaaacaagcaacatctgccagcctaggtgaagtggccccacaggtggctgcctactgggattttggaattgctacgggccaggaatggcaaggtttcacattcctccctgttctaatgattcctgttgcttatcaggtgggatgttgggcagacaacccgagttttcttaggtctaacagaggagctgcctagtccccactgtagagatgtccctgaaccttgggttggaa

SEQ ID NO: 265522 - DNA, 893 bp, Homo Sapiens
ttcagtttgtttatagggctagctttgcttactgtgctcagtttctgctgtagtaaaataatgtaggctggctggaggtggtctctgttcagggttattatgaactggccttgttcttccagtgtgcaggccctggctaatcagagaagtgtacctgtcccatagctaggctctggaaagaccttcaagcatggcatgtgaactgggccctggctcctccccaccaggtccatttggagtcagtggtttctaaatggtggcagtgagtgctttgctctggccctcagccttcttagctttctttaccactgtagagccaggtagctaaaataatcttgccctgtttttctttccttatgaggacattttctggaatttttatcccaccttatccattcttctgaaaaacttgtcttcagacctcatttttctaactcccagataaccagaacctacatgcagaggtctaggagatctctaccctgcaagcagaggttcagaaaagggagcagagtgagcaaatgcagataccattgttctgttcccctgtctaacaccccctgtaactccccagttgccaaattcaagactcctttctttggtctgtaaagcccagcctgatgggttcctgcgccctctccagcttcttcctgtgcctcacacactgaatgcctcgagtactcacatttccagggacttgataacctctggacttttgacggtgcagtttccttgccgaatgtccgcaagaatttcttcccaatttaatcagtgtaattaaccaaaaaaacctcgatgaaggtagagcactaagaaggaagtaggtaactgttaaaagattttatgtctggaaaaaatgcccccttttttttgtatttgcaatattccattac

SEQ ID NO: 265523 - DNA, 746 bp, Homo Sapiens
acaattctgatggccaacaatttcaagacatcacttagaaaataatgtagagatggccagagtcccagagttggccaaagactggacaagtggctaacatccttttctacctatctgcctgtctcatcagggctctcattccagacaacctccaaggggctgctgaatgtaaatttctaaagcacagctctgaaatgttggattaaagatgtttctcagtgacccccaaaacatgagtttcacagcataacccttcatagtctggccaaaggacaccttttgagcctcctatgcgggattctccttctgtgccacttgttgagcctaaacaccattttttcacttgcactgtacactgtacatatactggttcctcttactgagatggcttttccctcatgtacctgataggtgcttagttttcctctgagatcccctcaagtgtcaccttctcttgacaccttcctgcagtgcttgtgcaggatgcagcaaatagagtataaggatgtgggcttggatttgaatcccagctatatcacttaagagttatgtgaactctgacaagttatttaatctctctgagccttgatttcatggtagtgaataccttatagggttaatatgaatattaaatattattttatgtatacatatatagtacaaagtatatgagcgtttaataaacattaattattattaatactatctcttatttattcagtaagcatttcttgagcaccaccgtg

SEQ ID NO: 265524 - DNA, 497 bp, Homo Sapiens
cagcggtggcccgcgcgcattctgacccctgactcttccagccagaaagatggtggttttctaaaggaactttagctgtcctgcacaatgccgatctgtgtcttgcattttgggtaaaagccataaaaataagaaactcagcctgtggcctttctttcttccaaggctgggcttctttttttaagtgacttcatgcagtttgttgcttttaaaaatttgtccagaatcgttttctgcagaagcatggtctgttaggagcttactggccgtagcagaagcaattgtttcctgaattcttgacatttatctttgctgtattcatttagggcttgggagagtccgaagataaattcagtcactgtcagattaataattttgtcaggacaaagaataccgttatgattatttaatcctttaaaattgtggtctccagagcttgttctcagaatggcccagaccaagccttaattgtgatagtgaatattaatggtcacttt

SEQ ID NO: 265525 - DNA, 944 bp, Homo Sapiens
  misc_feature (721)..(729): n is a, c, g, or t
  misc_feature (836)..(846): n is a, c, g, or t
ggcactgtcattattaacaaaaatcatattcattttcagtaaattgataggtttaaagaaaatgagaaatgcacatctgtccttgcagaagttttcccaattactgtgtaactgtcccttcttaggttataccttcttaggttatctcaaggtctttggttggttgattggtctaaacatttgaaactcacaggtaggttttggcaggaaactcatttacagaaagggtgagaaatgttacctcccttacagcaacacaaactgggaattttaaaagcaacaaaagccaaaacataataagacaatcaaaagattgtccctgttatcattctgctgcatgaaaaggggaaactgcaagcattctccgcattctcggctgcaagtgccagcactgatcatgaaatgtttacatagcccttactatggggagacaggaaaggagctgtgaaggacaagtgtcagatctgctgctgcggcttcaagactcagcctccctgaaacatcactctttcttagcaacctgcagggagacaaccagatttttccatcagaggtttcttataccgtctaaacatattttcattctacgtgacaacacacaaatcggaccagtaagatagagatcaagagtttatcttgtcactgagttgcctcttctgctaactagcttcttcctgtcttcccatcttatttgtcactagtgttttcccctttccatagnnnnnnnnnttttaatagattattttagcattaagcaactgagtgagattccaaagctactctttccttttcctcatttcactttaattactaattgtagaaaggatttgggtttnnnnnnnnnnngttgcaagaactacggatttaatttctatctctcaaaagtaaacacctgaattagaaaactccattttatccattcactctttcttttttagaaaaaa

SEQ ID NO: 265526 - DNA, 840 bp, Homo Sapiens
  misc_feature (575)..(575): n is a, c, g, or t
tgttacccaggctggttgcaagcaatcctcctgcctcagcttcccagggttgggattacaggtgtgagccaccacatttggcccaggcatgcatatttagaagtaactgcctgtaaattatttctgaatggatggacaagaaagttctttcacctgcctagcttctcagataatcaaagaaagaaagaaatatctctctctgttacacactacatcaagggataacatgcccctttccttacaggactatgatccaagaggcaaaacagctcaagcaaaatatagacactatcgaataacagattacttaatcagagtcacttctttatcctatcacccctaggtgaaactgaagtcgagggaagggagatacagaagtcatgacaaaagtcagggaggggttgaagatttgaggtcagacttaaagaatgtgttatgtggggaaggaaagcacaccctaatgaaatgtaaagctgtagggacaatagtatcatgaagagaagacattaggagtgtgaaccaaacggagtttagtcagagttttgggggaaacaacagaaaattactttttccanggtaatacaggccctaatattgttgagatcccttaagggacaaggaattaaaattccctttaggaagtaaaaggtaaccaactataggcttatcttgtgaggctagcgatgatatcaactggaaactttagatgaagacatactgcaaatccagctaggactcatagcatgacagcatctagtctttgtttacattaagtcaaaggaaactgaggatatacagaggacaatgaagacatttcacactggacaaaatccagtaatc

SEQ ID NO: 265527 - DNA, 507 bp, Homo Sapiens
cataagttcaacagcaaggcctcctatacttgatgtcttactgcagcgtcctttgtgctgggagctaaaaatggcaggacaaaggaaaggtgcgcacggtagaagggccttgagtatttgggaagtactcatggagtcacctcctccattgcctttagaacttatttctgactcctggtggtcagtgctccctaagtctttattttaaagtggaggctcctcagcgagcctcagggaatatgttactgctcacctgggctctgaaagactgagtgtcactgaggctttagaaatggttctcgaagtgtggtcctcagagtacctttgttggaattgttgcatgtgcatatgtgtctgttggtggggggtggtacataccaaaaatactggattctgaacatcacatcagagtctctgaggatgaggtccaggaatttcactgagctccccagatgatgtttatgggcagtagcatttacgaaattctgttttcatgtcctgtttaca

SEQ ID NO: 265528 - DNA, 594 bp, Homo Sapiens
attctatcaattacatgtaagtttcattccatacatgtgtccggtgcctggtgggaggttcctatattaaagtcatctaccttccatccattgtctgccttacagccacagtttactcatctgtacaacgaaataacaccactttccttttcctatgcccaaatgagctaaggatgtgaaggtattttgcagaatatagagtgataaagaaaaataaggtgctattacactgtgtgaggcatgccgcaggaccacaactggcacttgttagactggaggcttatgagaaaaacatctcaccttgtagaaaacatgcatcttactatctctgataacttgtttttcaggatgatgaagtaataaggagtccagcttcagtgctacagagcattttaaaggaagcagtgttgggagggagggatatggaactaatggaaatgaggctagtttatgatggtctcagttatcacagtagatacagagctgagtttacccacaagatcttaatttaggaacactttgaaaccctgtaaccctgctgggtgctctctcctctcactccaccaaggcagcgcacagaaacatacatggggc

SEQ ID NO: 265529 - DNA, 734 bp, Homo Sapiens
  misc_feature (176)..(176): n is a, c, g, or t
  misc_feature (531)..(541): n is a, c, g, or t
tgttgtgttagaggcatctgccacaagtctatgtacagtgtttgctgcgggtgtgttccaatattcattttacctctgcttgggggttttgtgtgttcccctccccccatgccctgcctacccccttttccctgaaccacgtccttttgaataatttccagatggatttctgtagnccataccaaagccaggggtgttttcattcatgcgggatactagtatttataggatgtctgacttacctaactttaatttttgtttttggaacttctaattggggggccagtgtaagggtcgatccccagagggctgattttggcaaatcaaggctacatgtatttgtgtataaggaccctgtgttcaggactgggtgacttttctaagaaatatggggtttagaatggggttgactgtattttttaacctaattctggagagaagattgtattttttacagttttttgggtttggcttccttctcacatttctttagctttgaatttttactaaataaatttcctcctgattaannnnnnnnnnnctcatctgggaatttgaaatcctcggtgccttactgttacacccaatttgtcccaaagagttgaaatcactttaatgccagaacatggtaaatttgcagccatttcaagcaggtggtggtctttttttataacatcgttaacgggtaccattaaatattctgagaggtgaatgtaaaatataaaaggtatagg

SEQ ID NO: 265530 - DNA, 1147 bp, Homo Sapiens
  misc_feature (23)..(23): n is a, c, g, or t
  misc_feature (752)..(804): n is a, c, g, or t
aaaataagaaccggaaaaatttntaaatggaaaaccaggaataagggtaagtggaaaaatttccagagataaatcccaaaactcctagatggtgttaactgcctagcgggtttattttctttctggttgaaagttagggtagaggcagatcagctagtctaatctcagtgggcttgaatcttcatgaccgtcctttgtttctggttccctattactcctgaaatgaatcccatccagggttccaactgaaatgctgggatattttgtctgcttcttattgggtcttaagcttcccatgttattccttatccccgtgaaactcttagaatatctgctcagctccttcatctttaggctgctgtttaggagttgacaaatgcctcaaggaaaagtggcaccgaatactgagctgacctctctgcacacccttctttctgctatcttggcttctcagtcttgctgccttgctagttttctgatgcctttcagcagatgtttttactggattatcctgttttgcagttgttttcatggaatggttggtctccacagagctattctaggtaatgggaaaacatgccagccattttcttatcctgctttattgaatttcttatttaattcttcagattgaaaatgatgttcctgatttttctgagtaccagaaacatctgagaaagaaaaatataaatgttggaaagaatatgttttgaatctttattatgtagagtaatatgctaagagcatttcannnnnnnnnnnnnnnnnnnnnnnnnnnnnnnnnnnnnnnnnnnnnnnnnnnnnttatcatatttgtgaaatagacaacttcatagagcatgctcttccatggggtgaaagtcaccccatcaagaaagaaatacttttcttgaaactgtgttttcactgttgacgtttttatctaccagacagactcaagaattctttgttaattcccatgagggacaaaagaggatgtttaaatattaggaaacaaaaagatggttcttatcagaatccatccttttaccctaagcaagaaagtctagttttgtgttatttgaaaaattttagaagatacaattttttattaactcatgaaaatcattttctgacccatgaggtatagttgctttgctccatttct

SEQ ID NO: 265531 - DNA, 658 bp, Homo Sapiens
  misc_feature (144)..(200): n is a, c, g, or t
  misc_feature (341)..(341): n is a, c, g, or t
  misc_feature (389)..(390): n is a, c, g, or t
cttcaataccctgcagttttgtagtttccttggtctgtctccgggagagaagttgttgcaaacccagcagttatttccaggcatggattaagcaaagccagctattctggattttccggtggctggattctactctctctgtcnnnnnnnnnnnnnnnnnnnnnnnnnnnnnnnnnnnnnnnnnnnnnnnnnnnnnnnnnttcaaacaatcacttcgattccttttgcattattaaaagaagagtcaaggtttattgcaaaaacttgtagacagtacttaagaataaaattcaaacatgttcccaaccaccccagacagaggtaagtcactgctggtaaanagaggtctaggagtccatcctgtcctgcagccttcatctgggcctctnnccccaaccccagagggcaggtcctgtttggtccagaccttcccaggcggtcccattcttttggccagggattggttgagcggtgggcggcgctggtgaatgagaccggaaaagacgctgctgggtgaggtttctgctgctggatgcggtttctcgttcctacaaaggctcacccaggtagggatgggcagcttctctgggtctgagtctggatgtgatgcctggaatgcagcagccatcttgggtgacaagagtgagactctgtctcc

SEQ ID NO: 265532 - DNA, 538 bp, Homo Sapiens
gaaagcctttgcactacagtaagaacaacgcaaatagaactttctgattatagtccatcaatggcattgaccaccgaaaagtacttgcatgtcatctttgtattgccaaacaataccttgattttgaagtctgtaatctttgataatagttaaacacttttcttggcatgaattgagacattcagttcattcactatacatgtgttttggtccagtctttgctttacttatgtctctgtggcgtcaggcaaatcaggtaacttcttacttacacccttgattgtaaaacagattatacttgtcttgcctactgacctagtgtgggcaatttgggggaaacatcttggtgctgaattaggttctaggctcaggcactaaacatgatttaaaacttgatcatttgaactagaagccaagtacaaccttcaagacaactctgtataaggtcataggtataatcactattttacagatgaggaaacgagattgactacaaatttggttttgaaaataaatcacatgctcaacagaagcagtt

SEQ ID NO: 265533 - DNA, 706 bp, Homo Sapiens
tgtagtgtctactatatgctagtacagcagtgagtaagagagaccagaacctgtccttagagagcttatcattctggcaggaacactcaacattactaatgaaaaagtctgggttctttgattgaaatcacataaagagtagagcactttaaaacacaaaacagttatctgccctccttgttaacagctactatggatcagagaacccatactcatcagcacattcccaaaataccctaagagcttgaggtcaacttggttttacctgtctggacacaggtaaaccaatcctcttctaaaaattattcaaataaatctccttttcttgctttaagttatccttctcataactggacaatgaaacaacccaattagatactccctggttgagaaacaattttatggagagatttatattcagtgaggttttgacaacacactttttctgcgtgattggggaagtttctacagacagaaatcaatcaagctgaaacagtttaaaatgcctaaaatgcacttctaaactcaagaagaggtcatggatagacgctagccaagacagtacaaaaagtctcccaaaaatttaaccttggctgggcacgtgtgtcacgcctgtaatcctagtgctttgggagactgaggcaggacagcttgagaccagggagctaaaaccagcctgagcaacgtagaagaccctgtctcttaa

SEQ ID NO: 265534 - DNA, 738 bp, Homo Sapiens
  misc_feature (361)..(413): n is a, c, g, or t
tatatagatagatcacagaattgtcggacaggctgaagaaacaggctgcaggtggagcttcttgatagtctgcagaactggtctgccaagagagctgttgcctatgccaccatcgagaagcttctcccacaactgcctctgccagattgggaagccactgggtccacagttgtgtgtctctatcctagcaggaagtggggctgggcagtttgttttcagtcctattttaggaaggagggactttacactaaggtgaactatcaaatgtggagagaatgtctaaaagacggcagctacaattagcaggcatccaagaagacagctgtgtgttgtgaacaccttgggatataggtcagaaaannnnnnnnnnnnnnnnnnnnnnnnnnnnnnnnnnnnnnnnnnnnnnnnnnnnnccactttcaaacttgcgatctcatctctaaacaggatataactcactgacttggagtgaagataaaatgaaagtaataggtgtgaatataccagggaaaactataaagtattaaatgaaatcagtaaaaagtatttttcacaacccaggtttgtctctagaccaggggttggcaaactttttctgtaaagcactagctagtaaatatttttggcttgttagatgatactatccctttagtacctattcaactctgcaagagcagccatagacaatatgtaaatggatgagcatggctgggttccaataaaactttatttatggac

SEQ ID NO: 265535 - DNA, 440 bp, Homo Sapiens
  misc_feature (35)..(35): n is a, c, g, or t
aaactgggggtgtagccctggccttgccctcttanctgctgcatgacccttgggccaagtcccactttcaaaacttgcgatcctcatcctcctaaacaggatataacctcactgacttggagtgaagataaaatgaaagtaataggtgtgaatatacccagggaaaactataaagtattaaatgaaatcagtaaaaagtatttttcacaaccccaggtttgtctctagacccaggggttggcaaactttttctgtaaagcactagctagtaaatatttttggcttgttagatgatactatccctttagtacctattcaactctgcaagagcagccatagacaatatgtaaatggatgagcatggctgtgttccaacaaaactttatttatggacactgagatttgaattttgtataattttcacatgtcatggaatattc

SEQ ID NO: 265536 - DNA, 373 bp, Homo Sapiens
  misc_feature (34)..(34): n is a, c, g, or t
  misc_feature (69)..(69): n is a, c, g, or t
  misc_feature (74)..(74): n is a, c, g, or t
  misc_feature (91)..(91): n is a, c, g, or t
  misc_feature (134)..(134): n is a, c, g, or t
cgggcagaggcagttgtgggaagaaagccttccncgaagggtggcaataggcaaacagctctgcttggnagacnagttctgcagactatcnaagaagctcccacccgcagccctgtttcttcagcctgtccganaattctgtgatctatctatatacctcaatgcattcttttgtgcttaatctagctactctgtggattctgttctccacaacgatgaccagagaccaacacaagttcagaagaaatccttataatactacagtgtttcctaaaaccttccagaacaacttcccaccatcattactatcttctaaaatccaatcccatttccataagatgttaaaggattctgtagttatgtaaataaatta

SEQ ID NO: 265537 - DNA, 786 bp, Homo Sapiens
  misc_feature (510)..(510): n is a, c, g, or t
ctctagcaactattgccaccctggccccaaaagttatttatagagtacattggtagtaattatacttacaatttagtccatggagtgcaggaccatgaggaactatagctagataagattgtgccagaattagaagaatagacattttactttcagagaccatgactaaaagaatattaacaccaagatgctccttccatcagctggatgtacctttgggcttggaaagatggcaagtataggagttgtactggaacggctggatcaaataggttgaaggcatttttgtcattgtacatgtggggaaaagcaaccaagtaataagacacaacagatatctcttaaggcaccgacacagctcacagtgacacctccctccccagcacagcgtaagggtggaacagtagcaaaatatctatacacataacttgcagatgaatcatgcctgagtaacatggaggtggaaatatgacccaaattgggcaaacagacttgttttcccaagaaacntggaattttgatgtgagatgcatagagggtgagttgtttacagcccaccaggaggacagtttatggattcctaccagtgagtttcccagagtttccctggttattcaacagttcccaagattccatgagataccccagtatccttccactaaagtcaactttatgagctgcagttgttgtttgagccagaaccttaactactacacttccccaaatagccttctctcatgttattcctttatgtgttcctttctctccaccaaaatagcaaaacag

SEQ ID NO: 265538 - DNA, 905 bp, Homo Sapiens
aaaataatatattgcctttgaataatgcctatctccttaaaatcttttggcacatttcttccagggacagagatggctgtttatttcataaaggagacattgagcacagagaagctgtaattaagacacgattgagatatgagggcaaaccagtttcaataagtcacttttatggaaaactattcagatataggaagaatcaagtcatcctgtcagttaacttagtgtatctgaattttaatggattgctgtgggaatatttttctttgagagggaagagagtgcttggtaggattccagtctatgttggtggttctcaaacatgagcatgcgtgagactcactggcaggcttgttaaaacacactgctggaccccacccccagagtttctgattcagtaggtctggggtagacaggagaatttgcatttctaacaagttctcagatgatgatactgctggttcatagaccacagcttgggaagtagtttaggtaatcttcagtgctgaaaataactaatgtactgaaagcttgctgtcgggttcagtactttcataggagtttgcaatttactgtctcaaaaactctggaatagatttggacctcattttacaacaaagagtttgaagctatgagaggttaagttgcattacctgtcacatatctaacagcaaataaaatgggggaagccgtgagtagaacctgggcagcctgtttcccagtcccaggcactcagccattttattgtggctagctgttgctttaagaggctaaaattatacatttgtaattctgaaataagtacccaagaaaatgttctgtatttatgtttttagacaaaatcctgatcagtggtgaataaggggaaaaaaaggtagacaaaatattgttttaaaatacttaac

SEQ ID NO: 265539 - DNA, 383 bp, Homo Sapiens
  misc_feature (285)..(285): n is a, c, g, or t
  misc_feature (326)..(326): n is a, c, g, or t
aatatatgtcagctgccattatcatcatcatttttttattattacagtattaaataatttagtgacaaccatgtcattggacatttaggctgtttcatgtgaatcattatcacagattatgctgctatggacatatttgtgcatgaaactttttctgtatttgttttcttagaatagatttccagatgaaaattaatgtgttttaataagtataaggatgtttcatatttggggatacaggctgccatattgttttctgggcaggagcagttaatacaatgtttngaaaccagggttgctaagaattatttctttatttttgctcntgtataacagagatggactggagagagttgtatatgtgttagaatttacctagaagg

SEQ ID NO: 265540 - DNA, 752 bp, Homo Sapiens
agcaggagagcaaggatgtagattgtaaaaaaaagatggcatttcaatatgccaaaccacagatatgatctaaggctagatttgcatgtaataatgaaagtggccaccgtgtgtaatgtgagtcaggcccttctaagcactttacttgcgaagtccaagctattactacgttcttctgaggcagagcccattaaagctcccacttagccagatatgttcctgagttgccacttcatggttaagtgctgccccaagtaccccaggtgcctggccactgtcctggcagtggcctttgccccttctggatacccaccagcctctcatgattcacaaggggccagcagggcttcttcagttccagctctagccctgaggctggcatgtactctgattgttcagtgccttggtttcttcctgcggctataacaaaataccttagtgtaatttataaagaaaatgaacgtattgttcagagttctggaggctgggtcgtttaagatcaaggtgccagcagatcccgtatttggtgaggactgttctcaccttccacgatggcgccttcttgctatgtcctcacgtggtggaaggaacaaggcagttctcttcaacctcttttataagggcactcatcccatttatgagggtggtgctctcatgactttatcactcccccaaaggccccacctcttaatactgtcaaattggatatcaggctccagtaatacaaattttggggggatactggcattcag

SEQ ID NO: 265541 - DNA, 637 bp, Homo Sapiens
  misc_feature (44)..(126): n is a, c, g, or t
agagagctagcaccatgagcttcaataccctggggtcgggggcnnnnnnnnnnnnnnnnnnnnnnnnnnnnnnnnnnnnnnnnnnnnnnnnnnnnnnnnnnnnnnnnnnnnnnnnnnnnnnnnnnnccatgaaagaaataagctcagtgaaggcgggcattctgcctggctaacgcaggtcgctccttgccgtgcctggaacattactgtaagtgctcagcaaactactttaaggtaggaataaaatctgcaaggttgcttttgtttaaattggataaccttttgtgttccaagtctttggagtaattttgtgttcccaagtccttgggaataattgtgtccttaattattatactagtcactgttaaattttgaaactcccagtgcgtccccatgaaggtaatgatacaaaacatttccagctgggattgttcccagggaatccagactaatcaattatctgggctcattatatctatggatctttatttttcacctctttccttatgtttttcttaatccttctagctgatagtgatcactccctttaaaactgtcattcttaaaatcagaacaacatagtttatcatttacttattattttcttcatgtgattgttctccttaattaagcggcc

SEQ ID NO: 265542 - DNA, 755 bp, Homo Sapiens
  misc_feature (625)..(713): n is a, c, g, or t
ggaactagaagaactgagaatttggtaaggactgacaagctgtgcatgatgacaggatcccgttcaatttacaagtagataacaaaacctgaaagacaagtacaggaccagaataataacccataagaaggtgctatagtttttataaaatatctttctacagtcatcccccttttttgatccaaattaaccaaagtaagattattcttgtttacaaaataagtcttgtctcattatatttgacttacttatttgcataattgcagcaagaatggcaactgaccaggtaggcttatttaagtttgcattgctggaactttttacaagtaatctcagattatgctttcaagagttcttgaagctataaagccaagtcaagcaccaccaggccttatctgcaatgcctagagattcagatgggttcttctcttcttgaggtcctaaaaacatcctgagtttctttggcctgccagaaagtcaccttcctgactcacctgtaaggctgggaactccataatccaggtaccaggcagactttccgggagggcttcatatgcattggctccataaagttaaccttagttcctcaaaactgtctgttcatatgtgattttatgtcttattnnnnnnnnnnnnnnnnnnnnnnnnnnnnnnnnnnnnnnnnnnnnnnnnnnnnnnnnnnnnnnnnnnnnnnnnnnnnnnnnnnnnnnnnnaatggacccccatgtcttattctcaaataaaacattttggtc

SEQ ID NO: 265543 - DNA, 122 bp, Homo Sapiens
aactggtaaacctagcagtaaaaataaaataccaaaatgtttcccagtaaagtgtccatttaggacacagtgaaggcaaatttggcttaatctcttactactctaagaaatgtattatttta

SEQ ID NO: 265544 - DNA, 656 bp, Homo Sapiens
tattcctatcttaaccaaatcaagtaagggacttgaccaagattatgtacatttaagtgtttgagccaggattcaaactctggtttatgcctcagtatccatgctttcattattattttgtgatttaaaatatgtttatttttctaatttcactaacatgatgaagaagatacaaggctaaataggtatctactgatagaaagggaaaaaggttgcccaagtgttctgacctccttagtgcctctagcactgtagatactcagtaaatatcaatttattacatggaaaagtaattgtaatacaggggcttgattgatacagcaggccttgaatatttataggttgggtacacacaaacctaatttcccatccccaagatgcctgaatggtaggcatgatatagactttattctactctagagcgttcaataagatgtttgccatatggaaagagtttatgctcagtataggtgtgtataaacccaactctaaaagcttttagtcttatttctcctttcaggtgaattcaaatgaatttgcagagtaataattccagggaagtgtttagggtttgagagatgatgaaaatctgttttctccaggcatgatggcagagaagatatagtcatatgcctcataatgatgctttggtcaac

SEQ ID NO: 265545 - DNA, 360 bp, Homo Sapiens
  misc_feature (85)..(85): n is a, c, g, or t
ctctgcccatgtccttaagctgtagggacacctcaagaattccttaccctcccccctaacttgctttcccctgttttccgggcanactcctaccctgagatattcaagcggcatatgcactgatgatgctccggccttcctcacgtcagtgcatgtcacaagcatcctgctcccaggactggtttcctagcctcccgctaagactagcacttagctcttcttggaaaaggacccaccctgcagcgctccagctctgttgtgtatgggaggtgctggtgtcagggttcacaagccatggaactaccttgcttcacatcacaaggcaaggtgaactcaactcccaataaactgcttgctgga

SEQ ID NO: 265546 - DNA, 897 bp, Homo Sapiens
gaatggggaagaaggacttgggccccagcaggcctttttgtggcatccagtcagaagttaggaaacaccctctagggcagtgctgcctccagctctcacacatgactggagagaagtgagaagactcccagaatctgccttttaagtttccatcagtgtcctcgggtcagactgtgggaatgctgtacttctaagacaaaggttcgcatcttacagtttttccccaagtgggatctgcctatgcacatcctaattcacagacattgtcagcattgcattattccaggggctgttttgaggtcatctccagctccatttcccatctcaaacctacactttgggacacttgttttaaacattcacatctggaatttctctgtggcaaccgcagggggctctgaggtgagagactgaagaagcagagcctgtatcatgggacacacaccccttgaccacacagcatccacttctcctgcggttaccagccctgcaccaaccaccacagtcagaataatctcaaaactgctagtggagtcacagacaaactctgccatgtcttagctgtaggacactcagaattcttacctcccctaacttgctttccctgttttctggcacattctaccctgagatattcagcggcatatgcactgatgatgctccggccttctcacgtcagtgcatgtcacatgcatcctgctccaggactggtttcctagcctcccgctaagactagcacttagctcttcttggaaaaggacccaccctgcagcgctccagctctgttgtgtatgggaggtgctggtgtcagggttcacaagccatggaactaccttgcttcacatcacaaggcaaggtgaactcaactcccgaataaactgcttgctggagcctccg

SEQ ID NO: 265547 - DNA, 716 bp, Homo Sapiens
  misc_feature (345)..(345): n is a, c, g, or t
cattacacatgattagcaatgtaatcagtctacctagagaggtaaagtgtaaggaaagtaatctatttgaagaatgtaagccattgttaaattaggaatttctttcattattcagatctgattagcatgaaatataaatcacaagtgtgatactgatttaacagacaaatatatttacttgtataaatattctcagtatttcttagctttcagaaatgttaattcttaatgcaaattacactgacatcacatttttctgtatttgttaacgtaagtatatatcttaaaaatttaaaaagtaatatggcaacaacgtgacttaaaacactatcctccaaaaaaganttaagaggtgtttattatttgaaaatggaaaataatttaaatgaatttttgtagagagtaatcctgaagatgaaagtgcttcatttgattgtaaagttaagttgtgaacgatgacttttctaccagccagtgtcaacatgggtcaccttgggatgttatccatgaaaaaaattaagcgttctaaaagatgctgagtcctataagacctcacatggtcttgacctaactcagtggaaagttgtgtcatacaagtttcttcttgaatggttaaagaaactgtgtaagttgtgtatagaactataatgttttctgatgataccaatttaggagatcatccaagcaacttcagaattttaggggtttcaaattta

SEQ ID NO: 265548 - DNA, 770 bp, Homo Sapiens
  misc_feature (21)..(21): n is a, c, g, or t
  misc_feature (41)..(41): n is a, c, g, or t
  misc_feature (50)..(84): n is a, c, g, or t
  misc_feature (419)..(419): n is a, c, g, or t
  misc_feature (428)..(428): n is a, c, g, or t
cacagtcagaagtcctagggnaactctgcctgcacttgganctggtactnnnnnnnnnnnnnnnnnnnnnnnnnnnnnnnnnnntgatgaacttaatgggaagaacctgttttcaaacaggtttttccatagcaacgctcactggataagacatcgaccctgaattcatttgctctgtacaactcttcctcactctttctcaccttattacataaagaaactggagccgccgtgtcataggccggctactgggggaaccacacctctgatgacaggccatgctaccagaaggcaacccacattcccatctgaaaagagctttctaagcagttctggagcatctactgtaaaaccacagcaaaggccagcctaacacaagtctgggttgatgccctcatttaacttcaaagacaggcagnaaagttctnctttatcctgggtgccaatgccactgatacagcttaccaaggcagtaacagttcttgagatttacagagctaaaaatgaacatatgggcccactccatattcatgaaattaccagtgccacagtaaattatcagtgttctgtactcttctgaagtttacaaatatgctgactcactgctctcaccaccaacttgaaaagggatcaggcctgcagctcctgacagattcaacagaaacatttactggcataaactataaacacccatgcagagctgggccacagtgtccagcctgccacttcagagtgagtgcattattgatgaaagagtaaactgctgagtc

SEQ ID NO: 265549 - DNA, 824 bp, Homo Sapiens
tgtgtcaagccctgttctagaagtgggaagaaacaagtgaggaggaagggagcagttagaggggttcagagaagaccaatgtgaagagctgacatttcagctgaaatccaaataacaagaaagaaaacagccttgataaatctggacacacagcgctacaggcacaggaatagcatatgcaaaaatcctgaggtagaagctagcttaatattttcaagaaaataaagggaggtcactacctaaaaatcaatgattgtgggggaaatagggctcttgaaaatgtcaaaaagtttgacaaggtccagctcctggagggcttggattttattgtttggaataggaagccataggaggattttaagcaatggagtgatttcatcgaattctcagtagaaaaactattgcactggctgcagatgggaaaaaagttgaagggaagcaagagagtatacaggaggtccatcaccccaggggagagatggagagatggtggcttagatcagggcaggagaatgggagatgggggagaagttgatggacccaggatacatgttgaggtaaagctgatagaatttgccaaaaagactttgagagaagatgaggcaggcaggactcaggtttttggcttaaccctttgggagccatttgtggagaaggggaaccagaccatctaggggaaaatcctgcacatgttctaaaacttccctaaacagatagagccaggtgccagagccagttctcagatgtcacctttgggaactattcatttattctaatccttatttttattcaagaaggcacagctcgaccactccacgccgagc

SEQ ID NO: 265550 - DNA, 717 bp, Homo Sapiens
acctcagtgcccatatggagagaagcctggtcgctcatccctgtgagcactcgaacccccactcctcaacaagcagagccagtagaacaactgtctcacctcctggctgaattttcccagtagcagtggctctacatttttctgaggtagagctcctgaagtcaaccaaaaggccctctgctactgccactgcagtggtagtgaccttgctgtccttgaattggagaagcagcgaagaccctgagtgctttaaccacacctccagcaagctgctcttgcactagggagaagaggccagtctgtctccctgttacctgtccctgacaccctctcatcaccaggcgggccttcctagcttgagcccaaagcacaggtgccccatccagggccaattgcactgattaataatgggtccacatctctctgggttggaaccccaagaggcaagtgaaaggctctctgccataaccactgctaagatcccttccccttctgcccaagagtcccaagccaagatttgcagtcagcactcaagtgggagaggaacccatactttcaaagcactgagaagaagcatggctgcaatcatgaggaaataaagaggagccacactgttgattaagtggctgcctacaggccactatgtgtaagtgccacctactggatcacagcccaaaattcaataccaaaaatactttactaatatttgaaaccaag

SEQ ID NO: 265551 - DNA, 477 bp, Homo Sapiens
  misc_feature (354)..(354): n is a, c, g, or t
tgtctaggaagaaaatgatctttaccttcaataaatttataatgtagcactaatccagtatagattggagactgaatgcattcttactcttagggttcatacctctaattcatgtggttaagacagtgttgtggtgaagtaatagggccccttgaaagaatctacagaaacataaattatactgagttgtgctgtactggtttgtgagaacatcagtgtattaaggagaatggtagtttaatttgaatatttaaagaaagtaatttgaatggttctagtactagggccattattaactagtaacatagattagtgacttcaactgggtgtccttattatctgatttgtctgaangtgaaaactgttaaggtgctcttttaaaatgtatttggaaacaccatagttagggtaaatacaatgtcacaattcactcttgcatattatttgcttagccaaatttatgaattctaagttagg

SEQ ID NO: 265552 - DNA, 832 bp, Homo Sapiens
  misc_feature (812)..(812): n is a, c, g, or t
acagctcaaaactggaagagcttaataataaatgtgagacaaataatacacggaccctatcttagtaaagaaagtcatcatcatcctcagatgcctttagaaaagactcttttcatctagcataatagtatactattaacaagtttatctagtttaatctgggcataacatgtgaaaatgtcatttttccaatgatagaaacagaattgtattgttttcaccaagaaacaaacatatgtttcagtaaaaaagagaaaattgaactgctttcctttaagtacctataaaaattttaacgtaagattataagtaaaatgaggcttgttaagcttctagaaatcagattaagatatttaaaataaaaacataactgtgggtctcaggttctcaactcaggcttcattttctccttacatttgtcctttatatttccaaaagttcttcagaactaaaaatgtgtactaaataaggaccagcttcagattcatcggtgtctataggtttcctagtaatacggccattaaaaataaattccaaagccagaatgaacaatgactttatcaaggcccctctgagtgagagactagctttgtaatgtagtgaaattccaggcatgccaggtttttctgcgtagtatgggaagccacccctgagtctgttcacatgcgttcacctcatcaccccttccatacttctatgtgtatgcaactctgaggtttgaattttagaaactggaaatcttacaaagcaaaatgtgtggcaattaataagattgaatatggcaaattcttaatgatctggggaacaacagnttttaagtctgggaataaca

SEQ ID NO: 265553 - DNA, 438 bp, Homo Sapiens
ttaagattgaatatggcaaattcttaatgatctggggaacaacagtttttaagtctgggaataacatgtgaaaccagcagctacatttctaagtggcatctccattctcactgtgggtgaacggtaaactgttggcaaattcattttatttttaacctaaaaaaactgaaatcacaaattacctaggagaaatcaatcacatgacgcactccaaagttaaaggtacgtcagcgtcagctcccctgactctctgtcagtggctgattctccactcccacccaccagccatctcgattctgcactccagtgcttttcagtcttctagactctgctgaactatgagagaaatctggggcttcaacaaagtcagtgccaactttttaaacttaccttaccaagttagaggaaaaaacaaaaccacacgtaccatcagaatca

SEQ ID NO: 265554 - DNA, 587 bp, Homo Sapiens
atttttctctatgaagtaaaataagggtccagttgcattcttctgcatgcaaatatccagttttcccaacagcatttatttaagagatcgtcctttccccattgtgtgatgttggcacctttgtcaaagatcagttgaccatgagtttggatttgtttctgagctctgttcttccattgtgtgtgttttcatgccagtattataaccgtaataggtccgttgccccatgagcacagcatgtcaatacagcaggttgcagcaaagaaagacggtttactgtaaggctgcagaacaaggaggtaggatgaaaatgaaatccgtcctcccagggagtttggagctagggtttttaagggttttaaagtgtggaaatcactgcttaaagagtgcagtgtggagtcatgagacaggaagatgaagaaactattctcatgctgattctgttcctctgtggttgtcttcagactgcttggcatcagctatttcactggaatttgggacctgagaaacatcttgtgcaattcttaaaagcctcatgattctaacattagaaatcctatgtatgggaacagtggggactctgtctc

SEQ ID NO: 265555 - DNA, 730 bp, Homo Sapiens
agaatcttcagcagtcaaaaaagcaaaactatcttggaatttttgttcagaagtctttggagatgtggtgttattttgctcgggtatttctttctctgatggtgatagaagcttagcttggtctttctcatggccactgccactactgggagggaaaactggcaagattctcaaattacttctggttcttgtcttctttctactggaatatgattttagggatttctttttctggttactggtccaagatagttcactggtacttgaatcttgattactctcagagaagagatgttttctgtaatgagacttctacaagcacagatcataaatgagaatttttagaggggtgttagtgcctcttatgtataactaaacatattcctacaaagcctagagataagagaagtacccttctagaagactgggctctcttatataatataaaagcaaagaagtatggagtggaagaaaaggattattccatcagtcaattctcaaccaagttgctgttgtataggatgacaaaatcctttctaataaaacgtttgcaacagaagagatggtggatgactgttcaaaagcagaccaatctcaatattgtgcctaatactacttgaaaatactaagtcagatggcaaaagaaaagtatgggaatattttttgcaaagacaagcctctctacattttagaagaaccaaaaccaaagaggagagttatttctttttct

SEQ ID NO: 265556 - DNA, 1076 bp, Homo Sapiens
  misc_feature (173)..(185): n is a, c, g, or t
  misc_feature (205)..(264): n is a, c, g, or t
actaactttccgtgtattgattattgttggaagctgtagggttttactttctgtttttcctccccaagattttccactggaattgtgatcaagataacattaaaccttttaggctaaggtctttataaagtttttagccttcccatatatgtattcagatctttgctcccaannnnnnnnnnnnnctgagatggagtcttactcnnnnnnnnnnnnnnnnnnnnnnnnnnnnnnnnnnnnnnnnnnnnnnnnnnnnnnnnnnnngttcaagtgattctcctgagtcagcctcctcccattctttcggtgtttgacttgggtgttctcctatagaattaatacatactaggtatggtagaattcttatttttagtcactggccttactgttccttaaacatttcaagtttttgccttagggcctttgcatttgctgatatctctgtctggaacattcagcgcccaaataatcaggtggtttgccccttctgtacccatagttaatgtacacagcttgctagcttactacatttatgtcatgcttattccttgaccctccccacccaaatggtgcccccccttccatcactctcctcttacccttctttatttctcttcacagcatttgtcagtactttacattattccatactagaaggtgagtgtcagttctattagaacaggaacttggtcttattccctcctatatttcggtgcccagaatagcacttggcacacagtcttttgagtgagtggatgaccttgtgcacaatcagttattatcattgaacttcggtaaagcattaattgtggcatctttgtcagatgtttagataagatggttggcgtacgcatagtctgcatgttgtatttttagtctttgaagatatgaagtcaggtaagcaacatcctaacatagtctatttcttgacatctcttacaaacgtagagtatagcctatcctcaggtgtgtgctgaagtttatattagggcttttgggtaccttagaatgtgggtattgcaatctttattcaggatgttatcagtcactggtacagttagtcttgttattaaaag

SEQ ID NO: 265557 - DNA, 395 bp, Homo Sapiens
  misc_feature (98)..(128): n is a, c, g, or t
  misc_feature (264)..(277): n is a, c, g, or t
aaactctgtccggttccttggacttgtgtgtctcctatcttatcaagaataattgtagattgtggaagagttgatatggaaacatcttagaagaatgnnnnnnnnnnnnnnnnnnnnnnnnnnnnnnnctgtccagttccttggacttgtgtgtctcctatctaccattaaacccttatgacttaaggtatatgtataaatacatatatacatcttggtggcattgatttttctatgttgtgtattaaagctgctaaaaaacannnnnnnnnnnnnncaatgagaagactagtgattactttgactttaggaattattcttctaaggagtcaagtatttgatctgggcgaggatcacactgaaatataaaacatctgagtaatttgggttcacta

SEQ ID NO: 265558 - DNA, 797 bp, Homo Sapiens
caaaaaccaagtacatttgctgatactttgaagaaatgttttaatgaggtactatttacagagatacaaccagatttaagataactaacaaggattgtagaggcacctgtggactaaaagacattagctctggagaccaagttctggagactaagtggtctggaggaagagacaagagtagttgagcccagtggagagttggaaccatgaaagtgagactcctaaacagaagctgcagttcagtaaccatgccaataaccgaatgaaagcagaaaagaaatagaggaccacatacttccacctctttccttctgcagtatgatcacctactgataaccctcatttggtcaaacccagccaggagccagaaagcaagggagagtagctgatgcgtttggtagagtttggcctcccagagcacagagcaggactaagatgaacagagaaaggatctagagggaaatggtggataatcagttttttcaatgggtttttaaagattttttaaactatatttctgaaatgtgaagataaatattttatctaaaattgggcaagataactgtatggatttttttaacttatatatggctacttgaaaaggaattatgcttctctttaatacagcaggattctctggttataaaagtgttttgacataccgtgttaagagtaacatgggtttaagtcatgtacagagagttcggaagagaaatttagatacccaataaaaatatgacaaaatcgttgacctcgttattaatcaaagaaaaaattaaagagtaaattaatcaaag

SEQ ID NO: 265559 - DNA, 238 bp, Homo Sapiens
  misc_feature (225)..(225): n is a, c, g, or t
gtgtgagccaccataactgggctggaattatttgtacctggaccttgtgttttgtttttttgccctactatcttttctaaataaacatatccatgttcctggagatagcagtaatatacaattatggtaaaatagagctttatatgaactctgtacatgctctaagctctttttgaatgatattttaagaagtttctaaaccaaagggcttaagaaaacatgaanatgttaatttcat

SEQ ID NO: 265560 - DNA, 432 bp, Homo Sapiens
catgagctcaataccctgacccacagtcactacatttatgatactttctcccgtctgcattggaagaaagtatagaggagagggcaagtggggctttcacaccacagggcaccccgctcaacctccccttcctccagcaaaaggagttagaaagtcaggaacaggccaaagggcaggagtcctcttcagttattagataacttgctctgagaaaaacagaaaagaaccacctgagagctaagtagtttccctgaagagtctggggaactacagagtacagaacacgttggaccccatgctttcaactctaagcatataaaccacaacctcagtcttagataatgaagggggagaagtgacagaggagatagactctgacttcaagaaaccgtctgttcaaggatacacagtatcgctctggggaatggatac

SEQ ID NO: 265561 - DNA, 782 bp, Homo Sapiens
  misc_feature (23)..(23): n is a, c, g, or t
gcccacttagaagtgcccctgcncccacctggtgccgaaggtgccagattacgtaagatttgcagagtgagcgaagattttatgcaataataaaactccaaatgagagctggcaaagagcttaaccatcttctagaccacgcttctagccagaacaaaccctattctgaagaggccttggtgaatatccagagagggtgcatggcccatcctattaacaaggagcactcaagccccaccactgtccaccagtgaacagctcagattccttagaaagagctttctgttgagtaaaatctggttctcacaattcgggcttgaattctttaattccagatctaagattctgcaaagctttggaaacttctgagagctgctgcctggcaaacctctggagacagttgttaaacttcagaaagatgcagagattttagacattccagaagaacaaggatggaaaagcaaatcttgactgcacaaaaccctcccttccctctgctacccctaggaccacctaaccacggctggaggaagaggtgaacaagcatcattttctccccagccagtttacacccatgtcatgtgagatactctgaagtcactgtacaaaatgcatttaaataccacatttgtgtagcttcatctggcttggtgggcatatctgacttggggtctgagcagcatgcaatatgctgaaatagttctccatggaaaattagtcccctaaaggtaatgttctactaggagcaatgtagttctaatgtaaataaaaatccaaatttt

SEQ ID NO: 265562 - DNA, 762 bp, Homo Sapiens
ctgctggtggtactgtttcaggaccatcatcagcatgcaaaccaggtcgcagcaccacaggagctccatccaccactgcagattccaaattgagtaatcaggtgtcaacaattgtaagtctgctctcaacactttgcagaggctctccggtagtaacacatgatcttctgaggtcggagcttccagattcaattgaaagtgcattgcagggtgatgaaagatgtgtgcttgatactatgcgtttggttgaccttctcttggtgctattatttgaaggacgaaaagctttgccaaagtctagtgctggatctacaggcagaatcccaggactccggagattagatagttctggggagcgctcacatcggcagcttatagattgtattcgaagtaaagataccgatgcacttatagatgcaattgacacaggagcctttgaagtaaattttcatggatgatgtaggtcagactctattaaactgggcctctgcttttggaactcaggaaatggtagaatttctttgtgagagaggtgcagatgttaatagaggtcaaaggtcatcatcattacattatgctgcatgttttggaagacctcaagtagcaaagactctgttacggcatggtgcaaatccagatctgagagatgaagatgggaaaactccattagataaagctcgagaaaggggccatagtgaagtggtagctattcttcagtctccaggtgattggatgtgtccagttaataaaggagatgataag

SEQ ID NO: 265563 - DNA, 710 bp, Homo Sapiens
ttggtctaaggggcctcagcaaggctggctcaccactgctcccatgtggtggctcctcacccccgagtagggcaatttgagattcttcaggtttgcaaagagcagcaagagagggtaagcttcaaggcaggctttgcacacttctcaagcttcttattgattctctttgctaatttccattggccaaagaaagtcacgtggccaagttcaaagtcaagtagtagacaaagagacgctacttgggatgggaggaatttgtggctactttgcattgtaccacaatgaaagaaaacaagatactatgtcatggaaaccagtacgcaaggacaggataatatttgtgtgttccttataaaattatatctgcagatgtgtgtatatataaaaccaaagtgacttttaaattgtggattcacttgatagaaatattcaataagaaacatatttgatagacatattcagtaagaaacatttgatggacataattattctaaatttgaaaaaaaatgtaatattcctcctgttctgcactgtgttctgccacaaacaccctatggaactgaaagtaggtctactcaccagttatattattttgctgcactacctttcattttgttatcactttaaattgcttaatataacacagtaaacctgaccatcatttacataattttgcactctccttcctataaagaatttggtaacaattt

SEQ ID NO: 265564 - DNA, 411 bp, Homo Sapiens
  misc_feature (372)..(372): n is a, c, g, or t
tctcacaattctgtaaatcagctggaataactggtatggctcttctgggctaggctggctcagctggggctagaggtcttggaaaacctcactcccaattctgacaattggcaggctacttggtctaaggggcctcagcaaggctggcctcaccactgctccatgtggtggctcctcacccccgagtagggcaatttgagattcttcaggtttgcaaagagcagcaagagagggtaagcttcaaggcaggctttgcacacttctcaaggcttcttattgattctctttgctaatttccattgggccaaagaaagtcacgtgggccaagttcaaaggtcaagtaggtaggacaaaggagacgctacttggggntggggagggatttgtgggccactttggcattgtaccaca

SEQ ID NO: 265565 - DNA, 846 bp, Homo Sapiens
  misc_feature (338)..(352): n is a, c, g, or t
agcagagatgaaatacttcccaaactgtgatcttaaaataagaacaacaatagaaaaacaataaaactctccatttgtactttgttgggctaaacacgggaacaataatacagtctgtctcctcttatgttctttaagagatgtttgaaaatcttgtgacacttgagtaaggtcaagcagagaagctttctttgttagagtgagtcactataaatgatctctttgttctctcagtttgccagggataaagcaatataaggtaccaactttttctctgtttttctgttaagaacaataaaaaataatctcagaatgaaatcttcaaaaataacttctcnnnnnnnnnnnnnnnatagagccagcttataaactacccctgctctaaacaggctatcctatccagcaaggtcactcaatcctgtgaacagccagtgccattccaaggggaaggcatattaactcagaaaatgctgacacacctgacctttcatccctgccactcagcagttctacagaagaccaatttgtatgcaaacaattcacttacaagccagaattcctacaagcataatacagtttttctttaaactcttagtgatagaatatgtatttatgaattccttgggaagggttgcaaactcgaatgaccacaagggccagccagggatggagtgggaactgtgggcaggaggagatgctttgtagagtccagaggtggcagtgactgttcagcaccagaaacattgccatatgggaactcagacttcaggtagttgggtctcctgcattttgagagaagctagaaatgtcttggtatttaaatgttcacaactaacataggaattt

SEQ ID NO: 265566 - DNA, 451 bp, Homo Sapiens
  misc_feature (234)..(398): n is a, c, g, or t
  misc_feature (406)..(406): n is a, c, g, or t
  misc_feature (425)..(425): n is a, c, g, or t
ggaaatactttgctatgtgttgtgaacactacaaccctttcccacatcctcctatgcttcgtaattttgataatttcacatttgtcatttgagccaagtttatttttctctaaaacagcttaaaatttctgttaaaaaacagatccccatctattctagcttatagaggttggaaaaatgtttaaaatctaaacgtgattaaaggtttgtagaaatcacaaaataaagattttnnnnnnnnnnnnnnnnnnnnnnnnnnnnnnnnnnnnnnnnnnnnnnnnnnnnnnnnnnnnnnnnnnnnnnnnnnnnnnnnnnnnnnnnnnnnnnnnnnnnnnnnnnnnnnnnnnnnnnnnnnnnnnnnnnnnnnnnnnnnnnnnnnnnnnnnnnnnnnnnnnnnntgttactncccaactacttggggaggntgagggcatggggaattcacctgaat

SEQ ID NO: 265567 - DNA, 1017 bp, Homo Sapiens
  misc_feature (711)..(814): n is a, c, g, or t
  misc_feature (839)..(849): n is a, c, g, or t
attaatttagagaaatctctaaatttgtgtttttgctgctctttttctcatccttattactgccatagcccttctagtttcacagtgaggtggctattttatgatttgtatttttacatttctgctgtcatatatatttttctctcttttaggcagctctgacctgtgatatgttcaaaactgtattaaggttttagttacaggatactctgggttggggtagtgggagcttcaaaccaaaaccaaccttctctctttggtggtggaaatggaagctggcacattctgtgttccagtatgtcctggggcctttttatgagtagctgcatttcttaaaaattgcctgtgatgaagtaaacgtgcatatataaatgattttcatgactaattttgattttaaatttggaaatacagttttatagtgggaaaacattggtacctgacacacaataaattttcacttacgattcctaatatttactttaaagagccattctgcttgtaactaggcagttttatatttcatagtctctgccagtggtttctaattttgggccacgaatgctggagaggtatatgaagttgttataagggatttgattatccagatgaacccctatctgcagactgatttgtactggtgttttcagatgtatatagggatttgtgactaatgaagaattatttaaggctggatcagtggttcatgcnnnnnnnnnnnnnnnnnnnnnnnnnnnnnnnnnnnnnnnnnnnnnnnnnnnnnnnnnnnnnnnnnnnnnnnnnnnnnnnnnnnnnnnnnnnnnnnnnnnnnnnntgacagagtgagaccctgtctgggnnnnnnnnnnnttacttaaaagtacttcctgaattcataaaaatgttttgttattgtattttctttagtgatattaatgaagatccaagacacttaaaaaccttccaaaggttcatacacacaaaacttgaaaaacatccttttctaaaaccatgtcaagcaaagcatgatgtagactt

SEQ ID NO: 265568 - DNA, 1068 bp, Homo Sapiens
  misc_feature (549)..(549): n is a, c, g, or t
ctggaaacggagtggggccggcattctgaggaagtgcgcgaccttcaaaacacaggctgagagggacggccacacagcagctaatgccacaatttcaagaatagaagccatcaacttcctgcaacgatcacattctagtccctgcatgggggagggaattgtgtgagatgcaggtcatgctatgaagccactgtaaggtcatcttttcataggaaataatgtatagatggataaaattatgtaagacatcccttctagcaacaacgtcaaagcagtgtctggttttgtttctcctttcttgaaaaagtcaaaggaagtatgctttatgctaaaattagaaaatgatttcagctggtcagagttggatcacagaatacatcatcccacacaagaaactctgtaggagaatgcagaacattttaaacatgaggcacagtgccttccccgctgaagggatgcctttcccagccaccagtgaaagaaacactaagacggagggtctggccacagagaaaagctgacttgatataaaattgtatgaagtagagnttcaggctgctgttgaaaacctgagtgaagcagctcatccactgttctttataaacacacgtgtacacacacatccctgggataaactgatctccatgaaagaatggagaattttaaaatggtagagcccattaaaaatgaaatgctagctaaaagccaatgagtagttacaatctttactgctgaaagaaatcagatggactctgaaactctgatgagaatatcagagtacagcaatccttcttgagctacaaccttcacatgaagaagaaaacatgaaaactgagcacacgacagagctgatcctaatagcctaataaggatgtgaggaaatctgtaagcagaaaacgcctgtgtcatcgtcattcattctttaaaagctctgccccagtttttcccggtattacttgataaagatgacgactgttaaaacaacccgataccaacttcttgagcacaaaacaccaggagaggtttaaacactgaagcttcagtgttcatctattctgaaaagttgta

SEQ ID NO: 265569 - DNA, 594 bp, Homo Sapiens
ccagtgaagcccttcagctaaaggaagaggagctgggagctgacatcggccccctgcagtggtgactcccgtggcagcaagtccgaatggggcctccagtgctgcccctcctcccttcggcctctccagggcgtttggggcacccctctgcctccccccaccctccctgtcccctgttggccaacctgcctgcaaacatggagggcatttggccacagataggcaggaggagctcagttgtcggacagctatgcagtcccctgtccggtggtgctggaggctcccactctccttaggttcatagtctctccccttctttcccttccacttctagagcagggaggcttggggaggggaaaatttagctctgggtagctcttaaatcttagcctcagttgtggggtttggtttcatgtgttagataaggccaagacttagagaatcagtgggaaaaaaccttgagatctccaacacgctgggcccctccctggggcggggactctaccttccagattcagtccctagtcttgcgatgaattctgcattgttcgggtgttttttgtacatgtcaactcgtaaatctgattaaattgg

SEQ ID NO: 265570 - DNA, 823 bp, Homo Sapiens
  misc_feature (108)..(128): n is a, c, g, or t
aatcattggctcacatggagccttttaggcaagtgctcatcgccgtgcacagcccaacactatttcttattcatctctcttcaaaattgtccactgaaggcaattccnnnnnnnnnnnnnnnnnnnnngccattccaaaattcttccaagcagtggcagcatcattagaataacagtatgatccctaaatttaacgtagaagttctggtatgtctactgaaaaccaatattattccattaaaatcacacttcattcagggggttaggactgtcttttccttcatattttcagggtgtttccaaacaagaggatcattttgaagccagattgctaatgtacctaaaacattaaatataatgtgaaatccttattttctaatttaaaaaatgtaattcactttgtagctgaaatcaaaacagaaacggatgaaatgcagttattaaaattcaaagctgaaaataagtggaaaataggaaagataggtgatgagttgactactgtcccataagagacagcccctgtttgtggccatttctggacatgttttcctcaataaagtaacatggatgtgggcttttagggtgagtaaagtacagttttataaaaattttgtaatgtgcctagtgttcccgtactttttactgtctggtatcctaagcatgaagcatgtccaagtttaaagtaggaaaacaatagtcctagtgatgccgagaaactcaattattcctcagaatgccatggtcatctgcacacaaaatgtacctttaatgtgactgtgtaatttgtaaagttgacaaataaagtgctatgaatactcctcat

SEQ ID NO: 265571 - DNA, 611 bp, Homo Sapiens
  misc_feature (161)..(161): n is a, c, g, or t
aggccgggccttggctggctgtggaagggttaaaacgcacacccagaggcaggagagcagactccagagacccccctgggctaaagtgcatctccccctcagcctctgccttggttttgctgttgctccaatggttagttatacccagttaacgaagtgtntcagattcctttttctttgcttaaagcacagacttttctgtgaaatctgcttcccccattttcttgtttataaatttttaattctaataccagaggccacccgtgtcatggaaacagcggtgacctgggtttccaggtgcccctctgcgcctgcccagtgagtgactgtgggtgagtcctggaacacacctcccctaaccccaatctcgtgttccgatgggtaaagagaagtggtggcacgtggcaactcctggaggcttggaaatggggtcctagaatattaatccaaagtggctgcagggtgcgccaagtccagccatcacacttaacggaggagaggccctggagagattgaatggcctgtaagctgtgatgttgaagggagaccctcaaacctggtgtatcgtagtttggatttctgaatataaagagcatttaaactactacaag

SEQ ID NO: 265572 - DNA, 811 bp, Homo Sapiens
  misc_feature (25)..(25): n is a, c, g, or t
  misc_feature (35)..(35): n is a, c, g, or t
aatcctttcaaaagaggacgcctgnaagcctgggnaaggcacagtgggtggggtagaagactgggggctgaggcccaggccattcccaagcctggaagagctgattgagtggggatttgtagatcttcatttcccaaacttgcctgctgagaagaatcgtcccacccatggcaggttcctgcactgcgccttcagggccctgccctgagatctggactgggcgggcctgaggtgggccaggaaatctgagctggaggcccactggggaggccgcgagtgaatcttgtctctgtggatcctttgtaaggattgccatactaaacaacttgccctctcatccgtgaccggagagaattgggtcactcttccagacataccacagaactcctgcttctaagaacagcacttggctggaagccaggctggccttcagggttggtccagtctcccacaggggactctggcctcccgtgggctgccacagggccaaccccagtgaaagaaatgaaatgactgaatatgttcatgtcattagaaaaaggatgcagcagggggtggggaggagttggttaatggaatcaaatttgcagcaagataggagtctagtgtttggcggcactgtagggtgactattgctaacaataatttactgtgtattttcaagtagctagaagagagaattttgaatgttcctgtcaacctaaataacaaagacaggctcgctaaagatatttaatcaaaagtagggcattgcaacaggaatatgtgtgctgtagtaaactgtgtgcatattccaggaggtaaagaaaaa

SEQ ID NO: 265573 - DNA, 951 bp, Homo Sapiens
  misc_feature (25)..(25): n is a, c, g, or t
  misc_feature (536)..(549): n is a, c, g, or t
aggacagcagcagactgctgtgaanctggatctgggactgaggaggaggtcagactagagataaagattcagacctattggcaatcccaacaagtaaaagctggcagagaggaaggaacagcagcaaatgcagcagcagtggtaaacaagctaggagggaaaaaaggagggcccaggtcacagaagcccagagagggcagaggttcaatgggagactggtcaaatgttgtggagaagttggaaacctcgggtatggaaggaggctattgcatttgacaataattccgaccttttctaaagcggttttggtacagctgccttatgagagtgggtatattgtgcagtactaattagcatctccatccttagatgtcaaataactacattggaagtaggattcagaacattaattatttattaaaagctaataaggggattcaagtctattaggtttagtcattgcaaatataaagcaatatataaaggtatgcaactaattacctctgtaatttcaaatcattaaagatgcaggattnnnnnnnnnnnnnngaaacgctgagaattaagagtcatgtagtgttggcttccaccccaatatgagcaggcacagtggttcaaagcaagcactctagaataaacacacatgggttcaagtccagctattaccttacttggtgggtattcatgggtaagttaacttttccaagtctgattgtaaataataaatacacatgaaaactctcagcatagtgcttaccacataactttctcaataaatgttgacttactgttataataaacttattagcataacaatgccttgtatccaagttaaaattatatgaacttagttacgtgtaatttcaaacattcattctttaattttttatgagctccacactctaaccaactgagctaactggccacatgattctttattcttttttaaat

SEQ ID NO: 265574 - DNA, 806 bp, Homo Sapiens
aaaaaatacataattaggattttattacaaaagtcaacagttcagtttgtgttctggaagtggggaatggaaggagggaaagaggaggagcagggagagaaaagatgaggaacctggtaactgcaaaaaacaattcaagcagttatatttcaccatgtacagtctggaaagaagagttttctagaatcaaggaagaaaataaaagctctgttagtttgctcctgcatttgctatgcctttctaattaaatgattgggaaggacttcattattgactcctgctggccgacatgacactaaaatgatatgcatctcaatctgcatactccaagccaaaacccaacatgccatatgcattgcacatgtccttccaaaggctttgggtctggatcctccttcccaccgtggccaacattgctttgtcctcatcaagaactggcagatccaaggagcatacccaagatgacgccacagcctacatgctctctcgggcaccctacatgctctctcgggcaccctacatgctctctcgggcagcctacatgctctctcggcagcctacacgctctcttggcatgtacagcaggttcttcagccgtgcccaggaggcctggggctccgtggtctatctctgagctgggttctagacctcccaccccacttccaccactgcaacttctgttttacatgttggaaaggggcttcttataatatgccacttaaagaaaaagactgaatttttttaaaataaaaaatatactggcctatgtcattaaaatgaaatatatcccaataaagttgtaaagc

SEQ ID NO: 265575 - DNA, 671 bp, Homo Sapiens
  misc_feature (15)..(15): n is a, c, g, or t
  misc_feature (508)..(508): n is a, c, g, or t
tcctaatatttcaancaaaattaaaagcattccaacattttttccttacccaccctataccttcccccatagaaaaagataagaaaaagattaatgtgactcccacatagaatagcagctaattccagcaattcgcactgtatggttgttgacaggactaggaaaggcagcctagtgccccaagctgtaggagctggatctgcagaagtgtgcaggtcctgctgtgttcacagcactcagggaaagaggggaggaggtggctgatgagggtgcacgttcggagaagtctgtatgtgtttcatggcatattctgccacagcaacaaaacaaccaaatcagcagtagatttgactgtacccttcgatttcaaagaagtctgcgcccctcgcccactcgccacctacacttcatgcaggaaagatagatcactatcatctatttgaatacagggcctcagaagaggtgggctggtatgggtacaaacagcgtattttataacaaaacactntttttgaaaagatttatataactttaagtattaaaatgaatgctttacctctacatatgtatcactgtacagtcttgcacccacacgattatggtcatatttgaaagcgaactcaagcacaaacactgaatccaaaaggcagttttaagggagatccaacgcc

SEQ ID NO: 265576 - DNA, 737 bp, Homo Sapiens
  misc_feature (46)..(386): n is a, c, g, or t
tatagaaacctgggagtttgggagtgttcccatcactccctaactnnnnnnnnnnnnnnnnnnnnnnnnnnnnnnnnnnnnnnnnnnnnnnnnnnnnnnnnnnnnnnnnnnnnnnnnnnnnnnnnnnnnnnnnnnnnnnnnnnnnnnnnnnnnnnnnnnnnnnnnnnnnnnnnnnnnnnnnnnnnnnnnnnnnnnnnnnnnnnnnnnnnnnnnnnnnnnnnnnnnnnnnnnnnnnnnnnnnnnnnnnnnnnnnnnnnnnnnnnnnnnnnnnnnnnnnnnnnnnnnnnnnnnnnnnnnnnnnnnnnnnnnnnnnnnnnnnnnnnnnnnnnnnnnnnnnnnnnnnnnnnnnnnnnnnnnnnnnnnnnnnnnnnnnnnnnnnnnnnnnnccctagctgaaaagaatggctcattgtgcctaaactgttgtacagtgtgatttatggtgaacatctgctttccttctgggaatctagaattttgatacatgctaaggcagtgagtacctggctttctccctggcttggagaaagcttccaatagtcctctcccagtgaagtcacatggaatatgcttaattcctgcagccatggtttgtgagaagtgttaagtgttgcctaccagggaagctcattagaagctcagtgcccagggtttttattgggggctggtcaccagggcacccactgcctaactctggactgcctaactttggactttggacttctgccccatgagtc

SEQ ID NO: 265577 - DNA, 677 bp, Homo Sapiens
  misc_feature (603)..(611): n is a, c, g, or t
cagtggccgtgcccaccccaaggtcacactggcggaattccaggactactacagcggcgtgagtgcctccatgaacacggatgaggagttcgtggccatgatgaccagtgcctggcagctgtgagcagctccggctcagccctgctgccctggcctgtcactccccacccctgccggagacctcccttccctgggccccttctctcctgggcagccacaccacagagcggggaggggcaggtgggggaatggaggctgcaggactggctagaccaggtccctgccggtccaccaggcggaggtgggacaaaggtcctaacaggagtcactggctcaggaccccagggagaaacgctctccccacccacgccatgctgaccagaggtcttgcagcccctgtggatgcccccgccgaggtcccccgatccccgcacccggactgctgctccctgcccccctcttgcgggtcccccaggaagccaggtgaccccaggtgggaggctgtgtgtggaggccatcctggaaggaagtttagacctgcccaggtgtggagcgaggggcacaggggcatcctaacctcagaaactgaaataaagcctttgnnnnnnnnntctgtaaaacatcaacccccaatcagaagatggcaaatggggaataaaaatagcaggtaacacgaa

SEQ ID NO: 265578 - DNA, 813 bp, Homo Sapiens
  misc_feature (42)..(42): n is a, c, g, or t
atttcggcacagcgtaaatagtctaaagaaatcttgccaagnactgcaagctgcaggctgaatgacaacggagacccaggcagaaacggactgttgttacccagtacaggagccccgggagaggttggtgataacagagttagagaattagagagtgaggttaacaagctgtcctctgagctaaagaatgccaaagaggagatcaatgtacttcatggtcgcctggagaagctgaatcttgtaaatatgaacaacatagaaaattatgttgacagcaaagtggcaaatctaacatttgttgtcaatagtttggatggcaaatgttcaaagtgtcccagccaaggaacaaatacagtcacgtccagtttcaacatctaatatataaagattgctctgactactacgcaataggcaaaagaagcagtgagacctacagagttacacctgatcccaaaaatagtagctttgaagtttactgtgacatggagaccatggggggaggctggacagtgctgcaggcacgtctcgatgggagcaccaacttcaccagaacatggcaagactacaaagcaggctttggaaacctcagaagggaattttggctggggaacgataaaattcatcttctgaccaagagtaaggaaatgattctgagaatagatcttgaagactttaatggtgtcgaactatatgccttgtatgatcagttttatgtggctaatgagtttctcaaatatcgtttacacgttggtaactataatggcacagctggagatgcattacgtttcaacaaacattacaaccacgattctg

SEQ ID NO: 265579 - DNA, 698 bp, Homo Sapiens
aaggaatttaaaacaatactgaaactgatgggctttttaccatgaccatgagctggcgattctgatttaaacataatccaacacctcccccaacaaccttttgtctaattctgaacaattgctgcattattcttgacttttaataatatatgtaagcttcaaattcacacagactaattaccttttcataaacattacattctctatggaagttaattcaaataactcatattaatagttgcaaagccagccccctgacacccgtggactcagctacccatgtttcaagagcaagttcacaggattcggtatcagtggcactcactttggggtggctcgtcccccgagtcctgtggtacgatgtgttcctaagcttgaagaccagacccaaaaataaaggctggaagcacagtcattgtaaagacaaagaaatagaacctgggctattccatccactcattctaccagaccacttgggagtttctatttatgtttctgacttttcaacaatgagatgttaatcaatcctgaagaactgaagaacaggactttgttgcaatgtctggaatttactgtgaaatgggattgttgtgaatttctgccaaattttatgtttaagatttatcctatttgtatatctgctgtttcaaccaaaagaaatttttcaaaattaacaggaataaaaagtgctctgcgaa

SEQ ID NO: 265580 - DNA, 554 bp, Homo Sapiens
  misc_feature (357)..(358): n is a, c, g, or t
  misc_feature (389)..(481): n is a, c, g, or t
  misc_feature (485)..(485): n is a, c, g, or t
aattcggcacgagcggcacgagcagttgagtatggatacaggtgaaaagataattaccagaaccgtctcttgtactctacataaaggtgaaacctctatcctaatttctctttagattagtttttgaactttatgtaagtgatgaaatcatgtagtttgtattatttttgtctggcttctttcgttatatttttgtgacattcactcctgttgttgcatgtagcaatgctttattcatttttattcctgcatgattttttttgtattactattcatttacccattatactgttaatggatatctttgtattaactgttagactattacaaataaaactgttaagaattctttttttnntgtgttttttgagatggagtttttctcttgnnnnnnnnnnnnnnnnnnnnnnnnnnnnnnnnnnnnnnnnnnnnnnnnnnnnnnnnnnnnnnnnnnnnnnnnnnnnnnnnnnnnnnnnnnnnngaangaaatagatgttcctgactaatcctccatctcatgggggaaaactttaaagtattcaccattaaatatg

SEQ ID NO: 265581 - DNA, 872 bp, Homo Sapiens
ttctagtgccaaaagcctacggaggcctggggcagcacctagagggtgcaggacccatgagcctgagctcatttgactgctggccccagctcagcctggccacttcctccccacacccctttgggtcatgctcagaaaacatatgggaagtgagactttcagaatgacttgactgaagcgtgggggacttgtgagccctgggatcagccacctctccatgcacagtggaaataatgaaagctccaggtgagagctcttgtaacccacattgtttacaatggacagcatcccacaacagacacatgccaggacagcagcacatggaatgtggaaacagcactgaacttgaacttggagacagaaaacccaggttctgtaaccttgattgagccttacctttctcatttataaaatgacaaaagaagatgcaagaagtcaatctactgaaagtggttcacaagctaaaaggctctcttcaaatggaaggtcttactgtggtcaagtgctacagtgtcccaccatcacaggacgcaacctgggtctgatgtgagcaggctactcaagctacttcccctctggcccaactaaggtggccacacagccataataagccattggttactgcagatgcttacaaaggaaacctacctttaatgttgcttcatccagaaccttcacctcctcgatgagtttttttaattcttctgagctcagcaggggagataacggactgaccagactgaagggaactgtggccccatcatcgtcttccttggcttccgtgagaccctctgtatattctctcagctctgaaaggctttcataaggagaaacaacacacagtatgaacaacaatattaaaaagaggttta

SEQ ID NO: 265582 - DNA, 580 bp, Homo Sapiens
  misc_feature (340)..(340): n is a, c, g, or t
gcaaaaggtaaaggttataagatgtaaatattagaccaaaatagccttttttaacaaacacaataatgctgtaagtctgtaacaaaacaaaatttgaaaaattgaggtaatgtacacagcgatgcacacacccccacaccacaccgtgattcctgagttttgatttggttgaattcaccttgtagttccctttcctgagagaatacaggttcaacacatctagtccacgatgtacgtacaaggggaaggggtgaacaggaaatagactcccttattctgctcacatgagctgggaacctgtactagctgcatatttcatagaccccagaggcttcacctncaattgtactcctatgataaaatgtctctagcatttgtcatgagagaaactggctagaaatagtttgttcattgcgtccagcaagacacgcattgctgttgatatctttgtggctaagatggagaatgtgactggataatagttatccaggtggattactagctattgaaacagtctgagatagttgcatgatgattaacgttaaactgggagtaatttcaagtcatttggctaaaaatg

SEQ ID NO: 265583 - DNA, 667 bp, Homo Sapiens
cacttggcctccaattaaactttacttacaaggacaggtgcttggcctgatttggtccatgggcatagtttgacaaacagtggtttgaacaaatggacctagggacttcagcagtaatccagtcctgaactaagcaatactataccatttttttgtatagcttttatatttatacatgaagtgcaataccacataacgttagctctgatctagtctgcctggctgtaagtcctggcatctcctggttattgacagtgtgacattgggcaaattaacttctctttgcgtcagttttttaattttaatctttaaaatggggataatagtacttcttacaaagggttgtaaggagtaaatgagttaaagcacataagtgtagtgcttgtacatataataaaagctcaatatgtgttaacttaatattttaaaaattattcctatatacattattaaaggcagatctgagagatgttttaaggtagaatttactggcttaatgcatctctagctacggaggaaagacagtatccaacacttcaaggcaagggccgttcacatagaggtaatatggaagtcataaaagtaaattaagggagagagggaggtaggaaatggaggattaaggactgattttgatgggatgcacaggagagaaagtggggagagt

SEQ ID NO: 265584 - DNA, 577 bp, Homo Sapiens
  misc_feature (25)..(25): n is a, c, g, or t
  misc_feature (577)..(577): n is a, c, g, or t
cgaggaagggaggtttacagccagnacatactggatcactgggactcccgtttttctatacaatgccatgggattgtaattttatggaacaaactttaggaaactctagaccagattatttttaaaattacttccatatataaaattctataatcctgtgaagaactcaggaagtacttacgattaattctcccatttattgttccggaaacttcagtttttataatcttcctaaattgatcctttatgttgataaacagtgtcgatattaaggagctcattaattttgggaagatccatatctatccaaactggtaagaggctttaagataccaaatgctcagctttcaggagacgtctaaaatgaaacttttaaatcatattccattctgatatttgatcaagagaaaagttttaggcagaaaagaagaggtagctgagcttaaaccgtaagaagaaacctagtaaaggtgaagaaagtttctccaaaataatttcattgacatttaaagagcagcagtggtgccctatcaataggcaacataaaaaattacaggccgggcacagtggctcaccn

SEQ ID NO: 265585 - DNA, 623 bp, Homo Sapiens
  misc_feature (464)..(481): n is a, c, g, or t
gacaaaatcatctaacacaaagcctactttaaaataaagtattgaatatctcatgtaatttattgaatactgtactgaaagtgaaaaacagaatggttgtatgagtactcaaagtatggtttctactgaattcatatcacttttgcaccattgtaaagtcaaaaaattgaaagtggaaccatcataaattagggaccatctgtacattacccatgtcaatgacaaataagacaaaactaatttctatttgctgttgaaattatttttattcacaaatctctccatcttgacattagtcaccattgaatctcaagtgcagcgtaaactgagaatgcatctataattatgggttgaattttgcatgagctacaggaggcagccaggtggggatacccactgtcctgggggcaggagacactggttttgatttttgcagtgatattaagatcaaatagctgagggannnnnnnnnnnnnnnnnnggaacccgggttgtaggggagagaaagtgtagggtgggaaagagataagaagatgggagaaagtggatggggagctgatgataacttacatttgtgaaatggaattggagtttgataaataaaaaatactgattttattcaa

SEQ ID NO: 265586 - DNA, 303 bp, Homo Sapiens
ctggaatttaaatgattcaaatgttacgttgccaaacaactgaacaagaaatggaattattacaatagactgaactaatggattgttactcacccacttgtatattgagaaatttctgcaaagaaagaagatgcggaatgagcctcttcactgtcttcttgaacctgagcaaggggtaggcctgaaaaagaaattctgcaagatgaattatgtatttgctattcagtttacaaattagactttaatttcattggtttccaagacaataaacaacgtagatttcattcaactgaggttctttcc

SEQ ID NO: 265587 - DNA, 684 bp, Homo Sapiens
agaacatggaaagagcatggaggtgcccatgagccaggactcgcatggagcacctaatttccaccacattttattcacagaatcagccatgtagcagccgctgactgcaagggaagctgggaaatgtagtctacctggtttccctggaagaaaggaaggtggttttagtgaacacacagcagtgtctgccacatgaccatgctgcattggttattacatatttgaatatcacccctaggtaaagtcacaaaggtagccaagtggcagagccaggagtaggacctaggtctgtgtaacctcagatctggattctttgcagggcctctcatactcctttaatggctggctcaggttctgcacctctggatgcagtgggtgttgtgattgcctatgtggactctctttccaggcaccaacaattctataaaacatgtgactgctctccctttcccttccatggactatctgggctacaaatttgagagtaggttgttgggaatttttgtgagcagccaactcaggatcaggtctgtgaagctcctggcttatgtggtgctcagtggctctcttgggagtgaggggcgatagacaaactgtgtcactctccccaggagggctgggctgtcattagcattcagcaaggctgtgagtcttgttgtacaaatcagctgtttaaaggcctta

SEQ ID NO: 265588 - DNA, 627 bp, Homo Sapiens
ctggaagaattgctgttgtggttatatgttaagtagaactgtgttactacaaggaaaagtaaaggcacttgtacaaattcccggaatgctttcttgtgttttatatgtatgaaagaagaaaagaagcagaaaagggctaatggggaaatttttttaaattccagagatcctgaccaggcatcgaatcaagctgctatggatacacgaagcaggtttcaactgcccacagctgagttaataatcagtgtcttaatcaaagacctcggcttccaagcctgggatgaaccattttcccttggtagcgtgctgttaccagagcaactcctagaggagggacaacagctaaaacctaggctgaaactcaacaaatgagcttatctgcaagctttatcatcagactctcccccaaggcattacctttcacctaagccctgtgaccttaactgacagccctccctccaccccatgcaatgcagagctctcctggctacagaggaaaggtagaaaacctctcaaaagtcaggcttcccctgaccttgcaacctggatcactggtgggtaaaagaatacaaatgactaagatgggccaagagtccaggagtctagattgctacccccacccatcca

SEQ ID NO: 265589 - DNA, 238 bp, Homo Sapiens
gaatgagccaccgtgcttggcttaattggtttaaatgttattttaaaaagactcttgcaagtaatcaggttttctcataagagagacaccaagatttaggctcatttacatttacattcacattttaaataagtattagggcacagcctgctaactgacccctaatatccattctacccttctttagtaatagaactcttgattttcagctgtaacacaactgcccagaaaaatgata

SEQ ID NO: 265590 - DNA, 781 bp, Homo Sapiens
tgagtaggtatttccagggctccacaaagttgcttatgggaatcctgagctgcttttcaccatctcaagaagcctaagaagttatatatttaatcaggtagacaaaacagttcaaagcataaggtccatggtggtggaaaatggatgcaagtgattctaagtttgtggatttgtggatagcagagggatcgggacctcttggaggaaccctgggtaccaagctcccaggcccttcctctatcatggatgctgggtgactttgggaagtcaccacctcttcccaagcctgtttcccatatcacagatgtggggccatggcctcgatgatggtctccacaggtctttccacctctgtgagtccaagtcaggtcaatcagcaaggacccatctctgccctgggtcagctcctcagaaccaacccccagcatctctaaagcaaaagcctcacctcaagggctgctcagaagagagcaccttcagcatgagttgttgctggaagatctaataagctgtgtttcctgggaagtggtgctttacttagccctgtggacaacttctctatgcatctgtgtgagcagatgatcattgtattaccttttatcggtagtaagcttggaaaaataatttaagaatacaatggagaaatgtaaataagtatctatgtaaatttgtttaaaataaactgaatgtatttaatggtccatttatatgttcttttatgtaacatgtagtttaataaagttcctgtttatgagagtcatgtttcatctcagcttcttcc

SEQ ID NO: 265591 - DNA, 441 bp, Homo Sapiens
  misc_feature (28)..(28): n is a, c, g, or t
aaaaatcccaacaaaacttaagaaatcnacttgcaatcccattttcccaccaacgcatgggacccttaagcctttgaaactgttttgtcctacccggattaaatatataacttccttaggccttccttgagatggtgaaaagcagcctcaggattccccataagcaactttgtggagcccctggaaatacctactcagggctgtttttacaagaggttttgtggtcaggtgctttactacttcagccataacgtttacctttaaaactcagctgacttatggaagctcagcatttccaattcgcttagatgacaggcaacagtctgcagaagggaggttctaacgtcaaccacgtggattccccacaaacgcatcatatttgcctaaatccatctatctaccaatgtcagatctaaaatgaggtttcactaataagtgacc

SEQ ID NO: 265592 - DNA, 697 bp, Homo Sapiens
  misc_feature (431)..(439): n is a, c, g, or t
aaaacagttctgaaatgttaacagtgcaatggaaatagaaagtgttcttttttaaaactactgtatagtagatttccaacaaactatcgttgctaattaaacttttccatcacttccctcaatatccttttattccctggcctctctcctcctcttctcttaataaagcccccagacgtggcctgtgatgggacagcagctgcaggttgggaagtggggcgcgtccaggatacccaccacatgggtgttaattgccctttgtgaaattctggggtgagaggtcagccctctttgcccatctttgtcacttctcagtcatctgtatcctggtggcagttgtgttatcccagcatccttcccctacccccaccttccctcccttctcctggagcccaggaaaaaaccatctgctgagttggctttcagaagannnnnnnnnaaataccaatttccctttgttccgaggcaacctccaatcagggctggtgtctgctgggtttggcgaaaggctggtattgtgtttcatgctcccggaggaaaggttgtccacttgcttttctttttgattcgattccctgccattctgcaggagagtcagtggttgcagctgctgctgtcagctataagtgggggatccccttgtttaagaccctatacgttaatcccttggcaggaggagaaaaacaaaacaaaacaa

SEQ ID NO: 265593 - DNA, 769 bp, Homo Sapiens
  misc_feature (287)..(287): n is a, c, g, or t
cacaccctgaagactgctaatttttgcatgcatatgattttcacatgaatggatgaaaatactaaaatctcttccccctggaattgtctaattgccccgaccctactctaacagcaactagtgggtgggggcggtggagactcctgccattctctgtggcaccccacttccctggaagctcagtcggcctccgtctgctcacgtattggcacggttgtcttccaaacccattgatgccggaacatgggtcaggaagaatacagtcagctctctggtgctttccatangcgttcctttttgccaggcttctgagatttttaaataacggaagcaacatctgcctctgaattagctgacaatgggaaacacacattgcagagattatcttaatgtatagcaaatcaaggaaaacaaaactttgacttaaccattggtttcagcttcctatcccaccaagccaccaacttcgtttcacttctctttcttctctctctggccccatgtgctcccttggtggagacatgaaggagcaggcaagtggcctgcagggggaccccgggatgctttgcccacttgacaggtagaggagctaaggccctcagcatggaacaggttcccaggctcacagaggaaggtggtggcaacacggagacttctcggtcacctggaacacaccccgctgtggacaccccctctgggactttttttctgcctctccccttaggattttgcaattcttttcaaaccagtgtcacaaaactttaaaaaa

SEQ ID NO: 265594 - DNA, 773 bp, Homo Sapiens
  misc_feature (648)..(648): n is a, c, g, or t
  misc_feature (706)..(706): n is a, c, g, or t
cgtggctatactaagagtttaaaagaaatcatttatgtggctagacatactgacttctgtagcagagaatagatagggagcagtggctctcattagctttggagatgataataaaactggaaaagatcagaaaagtggaaaatgatctttgcatctgagtgcactgattcatgatgtggaaagataaaagaaagtcctattttttttaatagtccttaaaacgcaaatggaaaagtaaaaaatctgcagaaagtgagccagcttttctttccttttgatagaacgaagaacattccagtggaaggtgtagaaatacatggctaatttcctgtggactaatttagctttctatggaaatgaggaaagtaaataaatcaggatcaaataatttcaacatggctacaggcatttaccaagtaccccgttttgataagcaccatgctggacattgtgggaaatatgtaaaaagaaggggagagtttaatagtttacaactattgaagttgcctggaagaggtatttaaagtaattgtaactgaaaacctagtcatataccgtgataataaactgtgtgcctgtgtggggctgtacctttcacacctcacctgtcttcagccacgcggggaagagtacaattatcctgtatgntccaagtgggatcctgaagtttaaaacttaggtaatttgcccaagttcgtgcagtggnttcagtggtagatttattatttgaacccaatgcagttcagctgcaacaaaatgcctgtgcgaataca

SEQ ID NO: 265595 - DNA, 444 bp, Homo Sapiens
atacaaagttgcagtgtgtgtgaatgtctgtgtcattgtttgccaattcccctgcctctgctactaaactgagcacctctatttccctcatgtctttctcagtggttacaaatggcaggtctaaggacaggtatctaattaaagctaggccaattacagtatctctggccttggcatggtgaattgatacaaaggtaggttcccaacgccaatcacgttccttctctgggattgtatatactggaataagatgagattgagatctaatggatagacataaaactcagaaactatttgggagctgtgtattaggcagcatctatagtggaaagaggaatgatattggatgctatgatgaaaaataggttggcttgtggaatttttaatgcgcacggaaggctaggaccctaaggggggaaggccaaagtatggacaggcttccat

SEQ ID NO: 265596 - DNA, 588 bp, Homo Sapiens
gagaccctgtcgcaaaaaataaaaacaaataaattcatcatatctttgactaataaacagaagaacccccttccccagttaccataggtgattgatttgattaagatttatagagcaatctaagtttgcctaaaaacaaatgttggttagtctagccacttataattcaatttcccaaaatacctatggatttttagggtaaacttatagagacagttttactcataaaacaaatgaaagataatttcaggaaatgacacatagctgcataaccaccctaacctagcagcaaactttaaaaaaggttatttaatggtttaagtgaaacaatctccctcaatctaatattattttaactttatgcgtctattaccttatttctatactactatgttaaacctactactttaatgatctggctaccgtctgccaaatgtcacttttcaagtgagaacagaagaatgagattgtgaagattctgtggacaatgtctatataatcatttaagtgttaaatataaactaaatgacaatagcagcttgtaaattaatgctaattctggctgggagcagtggctcaggtgctcat

SEQ ID NO: 265597 - DNA, 742 bp, Homo Sapiens
  misc_feature (298)..(298): n is a, c, g, or t
  misc_feature (648)..(659): n is a, c, g, or t
agcattagaaaattagaacatttacattcataatctgtttaatcttctgttgaatgcccttgtgcactctctttgccctgttttagttccctacttgctgtagattataagtgcccttaatatctccagtatctccacagagaattttgtcttcaagccttggcatcctgttttccactgtgccttcaacctgagacttcagtgatttcacaaatgctctgaacaatggagttttgaaatggttaccatttgtattagtttcctgtgggctgctataacaaactaccacaagcctggntgacttaaaccatcagaaatctattctctcacagttctggaagccaaaagtccaaaatcggtatcattgggcgagaagcaagatgtcagcagggctgcattccttctggatgctctaggggagaatccttttctttgccttcctcagcttctgctgaccactaccgttttttggcttgtggccacatcactgcaatctcagcttctctggtcacattaagttggcctcttctgtccatgtggaatcttcctgttacaaggatacatagaattgtagttagggcccatctagataatccaggataagctccatatgtcaaaattcttaatttaattatacctgcaaagtcnnnnnnnnnnnncatttaaattaatattcagactccaagagttagaacgtggacacattttgagatgtcattattcagcccaccacaccatgttt

SEQ ID NO: 265598 - DNA, 870 bp, Homo Sapiens
tgcgtttatttaggtagtttaattctctacttttattatgttctaatacaagtaactttagtatttactgaagttttaacaaataacctaaataaaccaaaacaatgttgagagaaaagtatacatgcaaatgagcaaaaagcttaatatttttaaaaccaaatttttaaatacctcagaaactagttatatcaaaagaggtagtaatcttcaccttcttgccaccaacatcctagataaggatatgggcctgtagtgggtagaattgtgtcccccaaaagatatgtcaaatcctaaacacatggtaccctgtaaatgtgaccttatttggagacagggtctttgcggatgtagtcaagatgaggtcatattggatccatggtgaactctaattccagtgctggtctccctagaaaaagagtttggacacggatacaaacatagaagacagggtagaagaccacttgacaacaaaactgagattggagtcaagccacttataggcttaaggaacagcagggattgctggcaaccaccaaaagccaggaagaggctaggaagtattctttcctagggcctaaggaggaagcatggcactgggacattggtgagtctggacatttagtctctggaactgttaagagaataaatttctgttgtttaaagccacccagtttgtggtaatttgttctagcacatctaggaaactaatacagagttttttataattaataaaaattaaactcttatttggaatgattttccccctttcataattaaacagtgccctattttacataaaataatttaagtaaaaggcataatatttcatgctaataaaccacatttactcagaaaaacatgaacctt

SEQ ID NO: 265599 - DNA, 483 bp, Homo Sapiens
  misc_feature (261)..(317): n is a, c, g, or t
aagcatttcctgatatcacaaatgagagctccgtgttaatgacttctacagccttgcccagtttcatctcttctgcttgcactgactgtcatcaccccctactctgcccgtcgaagacccactcaggccctccatcccaagcccctctccagttctgtagctctcaaaaaccttctgtcttcccaattctcggggcatttatacactacattatatacgttgatgtccagcatgagctaccttgtgaaattcactaatgcnnnnnnnnnnnnnnnnnnnnnnnnnnnnnnnnnnnnnnnnnnnnnnnnnnnnnnnnngcttttcctgcttgtcacttgtactgtaaagcacagtggtgaaagcatgggtctgttctgttcacgcttttggctgtcagtctaaatttattgttttgaagtgactttcttttgcttatagaactttctgaggtaaagaaagaatcaccaagagaaagaggcgttg

SEQ ID NO: 265600 - DNA, 790 bp, Homo Sapiens
  misc_feature (154)..(262): n is a, c, g, or t
  misc_feature (266)..(291): n is a, c, g, or t
  misc_feature (371)..(406): n is a, c, g, or t
  misc_feature (432)..(474): n is a, c, g, or t
  misc_feature (485)..(507): n is a, c, g, or t
  misc_feature (605)..(631): n is a, c, g, or t
ttaatctgagcatttatgattctccacttaaagaaaataagttgcttatatttgaaaaattttagaatgtcacatgatgttttaacaggcttaaaagggtgtgaaattaggctgggtatagggctcatgcctgtagtcccacactttgacattnnnnnnnnnnnnnnnnnnnnnnnnnnnnnnnnnnnnnnnnnnnnnnnnnnnnnnnnnnnnnnnnnnnnnnnnnnnnnnnnnnnnnnnnnnnnnnnnnnnnnnnnnnnnnatgnnnnnnnnnnnnnnnnnnnnnnnnnngtgtatgaacttagtgcagtggctcgtgctgccatgagctataattgcatcactgcactccaacctgagccacagaatgnnnnnnnnnnnnnnnnnnnnnnnnnnnnnnnnnnnngaacttagccagtgcagtggctcatnnnnnnnnnnnnnnnnnnnnnnnnnnnnnnnnnnnnnnnnnnncacagaatctnnnnnnnnnnnnnnnnnnnnnnngtgtgtgtgtatgaacttagccagtgcagtggctcgtgctgcagttagctataattgcatcactgctttccagcctgagccacagaatgagaccctgnnnnnnnnnnnnnnnnnnnnnnnnnnngtgtatgaacttacccagtgcagtggcttgtgcttgtaatcccagctactcaagaggctgaagtggccctggagtttgttttttagtacctatggttttgcaagcagggtccatctgttttttcattagttgtcacatgaaggaatgaagtagaggcat

SEQ ID NO: 265601 - DNA, 512 bp, Homo Sapiens
  misc_feature (195)..(212): n is a, c, g, or t
  misc_feature (469)..(469): n is a, c, g, or t
agagctagcaccatgcttcaatacctgtgcatctctctctgttgccctgttcccccagccagtgtctccccttatttgttctctacttgtattaggtaaaaaggccttcgtgatggtctggccaggatcaaaaggcaggcttctccattcctacccactcccacacttcctggcttatgagtaatgatattaccnnnnnnnnnnnnnnnnnnaaattgagacagggtctcactatgttgctcaggttggtctgagtaatgatattatcttgcatttatgtggtgctttactttttgttacacattcacagtaattaacctcatttgattttcaacatctctacaacagaggtttgggcaaatattttttgagtggctgctaagtggcaatcattccacaaggtatttttacatttgtttacttcactttaatcctttcaacaatcccgaggaggtaagcatttgctttnacttaacagaggaggagacggagactcaaggaacttaaatctt

SEQ ID NO: 265602 - DNA, 830 bp, Homo Sapiens
  misc_feature (37)..(37): n is a, c, g, or t
catccccccaccaagtaaaggtctaaaaaggagaaantttttaaaaatcgataaattgcaaatataaataagagcaaaccaaagagagcagaaccagtcaccttgagaaagaaaatttaccaagtactattaatatatgttaaacctagaaggtaaatatttcagaggaaacaatcaaaagaaaaccaaactgtttttcaattagaatttcaccatatactaaggcttaaatattcaggcacctgaaatgcaggtgggaacttagaaatgaagaaaaaaattaaggctagcaactgaatataaaaaaactgtctgtatcaacaccaataaactttaatagatgtgtagcctcacccagacacattatgtattaattatggcaatgtatctgatacaatgagggagccattacagaaagctagaaagaaatggacacccaggagagactgaatgggaaagaaccacagagcaataatttataccaaaacaagactggttggtagtttagctgcacactatgagtggttcacttttctgtttgttacactccattcataactggaggccagttaccaacagggcaaacagcctaacatatactaaaagttagaagacattaatgtgtaaccactatataaacaaagctaattaataacgaaaccccaacagtcacaatttttaaagctatgttcagtacttctggcagggatctgtataacagacatcacagttatctgtctaaagaaagaaaaaaagtctgacagttccgtttacctccttcttggccatactcatagaaaaaccaaatcttgaaaaatcctgtgccgaat

SEQ ID NO: 265603 - DNA, 978 bp, Homo Sapiens
  misc_feature (169)..(169): n is a, c, g, or t
  misc_feature (788)..(850): n is a, c, g, or t
ggcagaaagaactgagctttccccgaactctaagaattctccaaaaatggtcattaatgctgggaagaggatcagcattgtaatctcattttatacatgaagaaactgaagttcagattaacttcatactcaagcaataaataatttgtagagccgggcaccgaacganacaaagggctgtttactgagagacctgagcttcttattctgactttgcctcctgttggaggttcaccactttgggccttagtttccttacctttgaatgggtttgatgaattagataggtgcagcagactttctctgtaaagggccacatcataaatgtatttggctttgtggggccaaaacattcctgcagagactactctgcaggaactattcaactctggcttttaaaagagggaactattcgctgaaacttctgtttacagatagcaggtaaacaaatgggtgtgagttatgcctgatgacagttaatttacaaaaacaggcagcaggttggacttggtccatagggtatgtttgcagaccactagactggatgatgtagaagtttgtttataactgctaatatttgatgactcagcttgttttaatagcaatgctattttccctaggaaagtcagcttgattattcaatcgtctgtggcttgtgcagtttgtggagtacttaaagatttttctgcagcttttcctttcttcttccatttttgaatgcctgctgtgtgtattgcaattacaaattattatcttaatgtcattctgcttagggtttagggtttgtnnnnnnnnnnnnnnnnnnnnnnnnnnnnnnnnnnnnnnnnnnnnnnnnnnnnnnnnnnnnnnngtgtggtctcctgggtaggatgactgacttggaatgaagacccaaacccttaggagaactttctgaatgttagttctgacctcagatgataacagattagctgcttttgctatattaagcaaggcttg

SEQ ID NO: 265604 - DNA, 734 bp, Homo Sapiens
tttttttcttttcacagctagataatccttgctaaaaatcattttcataaaaggagtactacgctttcacccaaagaaaacaagaaaagggttcctgcaaggaagcagcattcattacctctcatcagggaacagcctgcacttctggtctggtgcaccacacggggaacagcccacctcagcaaaaaccggacactgggttttaagcagcaacgccgtctggctgggtatagagtaccagctgcactagctgaggcatcagggcatccgccatgatcagagtctgtaaatttggatgcatcaaggaggtcagtaacactggaagaaggtgaccaagcatagtagccttagttaacttgtttccaagcctttttaacctctgcttcacggtctgcttatgtcactatttatgagggcagttgtgacctgctgtagcatttccaacacttcatcacatccagtcaggatttgggtggcaagagccaaaatactgacttttagctcctaggcagaaaatatcatcatattatttttaagctttgtgatgaacatacgttcacaatgacaacatgaaatgatgtatttaatgatgtatttccaaatgaaataatgaggtggacagaataagcccaaagcagtaaattctgctagaaataatgaggtggccagaataagcccaaagcagtaaatggcaagtagcaatttgggaggccaaggtctggagagctgacaga

SEQ ID NO: 265605 - DNA, 1149 bp, Homo Sapiens
  misc_feature (802)..(802): n is a, c, g, or t
aactgcacatttaccttttctctgagatgagggggcacatttaaatctgtgtatgtccagagtccgtgaggattgggaatcagtctaaagctgtgctcgcttctcctcttccattgcgatttgccttctttatccagtcttttggaatgctgaacaaaaatgtttttggcacaaggcaggcgtgaaaacataaagttaataaaaatcgaatgcataagctagagcagattatccacagattcttccatctccatatagattatcaccattgcctgcacctgttttccttctccagcctatctgatggaatggtgcttccatgacatgtggtatttggaaggctcttagctctgatgtaatcagggtttgacccatagtcacctgaaatagttcttctgtttctctttgttctatgaactgaagggtctcagaagcccgtgttatgcaaatacccttccatccccttccctctccccttgcctctatccatgttccctcagcctcagggtgcttgcaggctaagaggattgggtctctggcatcctggagctgaacagctcgtgtcaggaattccccaggcccttgagtctctggggtgagttgtaggggtgtgtagggtgctggggattaagatctgctgagtaggtgcttaccagagttatactgaaggacctgaagacagatcatcttcacataatcagcatgacccataatctgtgatgtcactgagcttcttttatttctgtagtcaaggaatgtgcacaagtaatgcaaatataattacttttagtcctgaggattnggggaacttgggggatgttcacattacctgatgatgtcaatattgtgttatgtttaattttttttaaaaaagatgcttatttattactgaaataatctaaactgaataaataactttttaaaaaaattacattggccagtattaggttcctgatacgtatttggtgttttgtttgtactgctgggttttttctctccagtattggatgcgttaacggggagccttgagaagttatgaattttggtttgttcggaattgctttttataagttttctgtgacctcatgcactaaatactgatgctaccacactcctgcaagtatgaaataaaagtatgtctcttcaaaa

SEQ ID NO: 265606 - DNA, 455 bp, Homo Sapiens
ccattacccacctgtccttgtgaatactcatcggttacaaatgggagggtaccacttagtgtttcaatgtctggattaggaaactctgtccttctttttcccacagcaacccggagatatatatggccttggtgggttgcctgatacccctacttgggtgtcaaggtttatttgaggctaaagtgatttgaggcttccaaagaagttattttacttgcctaggggcttcctggcaccatccacgtgagcatgtttggagagactacctcatctctccctttttcaggctttgagttttattagtctgctgaaatctgatagaaaagaaaacaccttgctgccctgactgctgctataggcagaatagcacggtatccttatatacaagggggttgcttgaagttggatcttttattccttttaacaagaaatttcaacttgattaaactaaaaaa

SEQ ID NO: 265607 - DNA, 480 bp, Homo Sapiens
  misc_feature (14)..(14): n is a, c, g, or t
  misc_feature (77)..(77): n is a, c, g, or t
  misc_feature (82)..(82): n is a, c, g, or t
aaaccacagactgntccctgaaacttgtgccctcaattaatcctcctgcctcccatctcccaaagtgcctgggattnacagncacaagcccaccgtgccccggcccagtttcctcattttttaaagtgggggcccacctcatgggtctgctgtgagaattaagtgaaaaaatcaatgcaaagtcctttggacagtctctaggcaataactactgttagtatctgatctggaatacggatttgggggttttcggcatggaggtgctcagcaaagcccatcagtgtatttcaagccatgggagtggatgagatggcccagcacaggcaggaaggatggacccagggtgactcccaagaacactgatgtttaattgatgggcagaagaggggtgcaaagagctggtgaggcagaagacaaacagagcacaggtcaagcagccggggccagagaacattccagaaaaagcatacaacagcgtta

SEQ ID NO: 265608 - DNA, 870 bp, Homo Sapiens
  misc_feature (26)..(26): n is a, c, g, or t
  misc_feature (353)..(409): n is a, c, g, or t
  misc_feature (624)..(624): n is a, c, g, or t
gcccagtaattcggcacgagccaagnatgagctgggcgaatgagtgggagcggacagaggcttttggccgactgtgatcgctattgtctggagtccccttgaccctctggaggtactgcctctcctttcatttgtacacaccggtttttctgcacggttccgcctcttgtcagctctgtgagctctggggacaccagcttttccgtttcccatactgccagatggctttgagcaaacaagaggaaggccccagtgtgggtgcagcctgtggctgcgttggttcctgcctgtttacccggggggtgaaagcggaaagggagcaggctttgcagggaacccaggtggcacccctnnnnnnnnnnnnnnnnnnnnnnnnnnnnnnnnnnnnnnnnnnnnnnnnnnnnnnnnnaagtggtgctgaaaactgtgttgatagcacggacctcactgagctgttaggagtagctgtcgacactgtgtacccgagtttctttccagtggaaaccaggttagccttcgattccttttctttcatctgtggttggtcacccttttgagagctctgaccccaaaagaagtgtttttcaagattggcccaaagttcctccaacgttgggccccccnaagacagactgactgagaagggagtggagctgtgggcctcctgattccttcccagactatgtcccttccagagtggtccaggtgggacgctgactaccagaggcctggccctctgttctgaggcccagttagccatggccttcatctgctcacattctgtgggattgggttgtgtaattttcgttgtatctctctgtcctcattaaatctgaattcctccaaggacaagaaggctgctgctgctta

SEQ ID NO: 265609 - DNA, 745 bp, Homo Sapiens
gcccaagtgaaaagcctcctactacattccacagcacttcatggtaattataaccttggctagataatacctgctgtatggcacagaatagtgacattcaattacctcatatataaagagagctccatggagagctggaaagtgcatgccactacaatattaacacatcccatcttccctttctttttgcaaggctgttgaatttcagcccggcatccccacacactaacaccatcaggtcttccacatttgatggttacaccacaggagcccacaccagactggctgcttccctgtgagctcaagagtgaaattggtctcagggggatttgcaaggccttgtcatcagttaaagactagcagctgactcccaggtgattctacccccgctgtcacctctccaaaaggggaaattgaatagtggtattgctcactgtggtgagtgttctttgcaccaccagaagaaactggttaatgaatgtactatttagaagaaaagttttgacatttaaagattactagttgttccctttccccaggaaaagaaggtcaaagtacagtcttccctgttgcagagtttggaataactctgtttgccctgatgctttccagcaggagaactgtattatgtagaggggtccttggccagcatcaaaggaaaaaaattatttttttcctagacctgtatttttcctattacagtcttccatttatttcttcctccagattaaaagtgcctcttcct

SEQ ID NO: 265610 - DNA, 629 bp, Homo Sapiens
  misc_feature (131)..(175): n is a, c, g, or t
  misc_feature (269)..(290): n is a, c, g, or t
  misc_feature (296)..(376): n is a, c, g, or t
cccctcaaggtaatttccaaaaattatgcagtgcaaagagttttatgtattaggtatacatttttcataatttacacagtattttcacatacattatctcatttgatcctaaatggactttgttaagcagnnnnnnnnnnnnnnnnnnnnnnnnnnnnnnnnnnnnnnnnnnnnnaacttgaaaatcctgttcttcaaggtgggagaattgcttgaggccagtagttcaagaccagcctgagtaacagagggagtctccatctctccannnnnnnnnnnnnnnnnnnnnngatatnnnnnnnnnnnnnnnnnnnnnnnnnnnnnnnnnnnnnnnnnnnnnnnnnnnnnnnnnnnnnnnnnnnnnnnnnnnnnnnnnagcagtaagccatgactgggtcactgcactccagcctagatgacagagcaagacctcctctcaatcaatcaatcaatcaatcagaacaatatgcatttgacatctatggcccctgcattttcacgagaggattactaccttctttacagatggctttagatttggaggctggctaagcataaaattaaaagacgtcatgcttggaatagcccttttaagaaacacttaactcctttacttaatagacaagtgc

SEQ ID NO: 265611 - DNA, 511 bp, Homo Sapiens
aattcatgctatgaattgccatgatcttagtaaactagaagaatgaggaatattggggatgtcaagttcatttatgtgactctttggctcaacttacataatctttgttttgatatcacagttgtctaattattttactttgtagcttaaggcaggctgaattgttgataaaatggaaaaagtagtatattgttatataagcttctgaggtgtgttttgttgtataagccctgggaggttaaaaagtcatcccttatgtatagtagctaaaggcataaaactgtgacttttagatattccacagaaccagacttatttggatgtgggataattaaccaatgatttagccattttggtttgcttttggttttattttatcccgggttcattttttactcttcccatgtacatgaaacaggtggtggcgtgtagagatcagctgatccttgttttatggttaattgaactactttgtatccagggtttctgcaaatccaaaagtgatttttca

SEQ ID NO: 265612 - DNA, 829 bp, Homo Sapiens
cctttggataaacagcaaaaaagacgtcattcttagcaatgacgtcatttttaccaattccttcctgactcactgcctagcagcaggatctgccctggttgggagcactctcacctgtactcactagacacaacactgggatgtggcaggaccacctgagcagcccttcccttcaactgccccaactcacagaagggaaaccaaggccccaaagagcaaggggactcgcacctggtggccccctaagggactctgacccctccccattcacctttcttcactaaccatttctaaatggatggcctaggctgcttaaattaatcctgattatgtaacaaagaaaacttagatagctggcagagaggtggggcagggaaatcactattatcagtttacactggcacagaggcccagacaaaagtgctctgggaagttcactcacctgctcagagccaagggcagctctggggacctttgaccagtgctgaagtccaggccagggctaggcagggaccttgagggccaagattcccgacactgctgactggtctggtgtggccaagttcatactatggaaaaggccctccctgctgctgagagctggctagcctctgaactatagggagaccagccctgggggcaacagccagaggccgcccaagttcagctataggactgggcaccaagaagcccatgctccacagcagccctggaggacctgggctccccccagcccgtgggtgcgggcatgctctctggtcccttggaatctgggtactacagggcacagatatttacaccaagtgtgtctcactagaccaaacagcag

SEQ ID NO: 265613 - DNA, 749 bp, Homo Sapiens
  misc_feature (81)..(81): n is a, c, g, or t
  misc_feature (84)..(84): n is a, c, g, or t
agtaaaaaggtgatatgattgggtatgtaaaccattcttctactaggattatatttaagagaaatgcagcacattttcacncancaaatatctatgaaatcaaagaacataatccccaaattattagtttagcagaatgtttaaataaatggaatgtttagcctgccaacttctcatacaagtagaataattattccacaaaaacgtcacactctaaagcctaggatttgctggtgtgctcttgcaaatacgtttgcacctaagaaaattccaagtatcggagcttcaaagatgagaaacactgaagtgtccaatcaatttctttgacccacccaaggtgttacaatctattcttggtagttatgttcctactgaaccataatggaaacactgaattagggaacactgaaccatggatccccaggagaaatacagtgttgggttcctgcaaacgtcgatcacaacatttctatcaatcaagacataaccttgctttatgtgtttgtttaaataaaccttatttaatatattattgattcattaccattgaactcagaactaaagcaccttaactcctacctgaataaagcttatctaacacacgtattttctctgtaaggcacttcacagccttctgcttaggaatactggacactacttcaataccaagcttcggaggagggaggcattttaaacagcaaaatcactaggaaatagcacaaaaatgggaaaatatggcactaagcaga

SEQ ID NO: 265614 - DNA, 313 bp, Homo Sapiens
ttataataacgaaataaaaagaaccccccagctgccaggcgggttttggtgtttgaaatgcggggcaaagcactacatcactgcaaatagatacagagttagtctgcatgtctgtaggctgtgtgattgcggaaaatataaatgctgctaatatatttcctttttacaaaagcatatctaaatagatgattgttttgatgttaatctttgtaaattatgtattaccaattttaacattggatgtaattgcatacaaagcttgcatctcaatccttgaaagtctagtattaaatggaaaaaacttttcctaaaa

SEQ ID NO: 265615 - DNA, 575 bp, Homo Sapiens
  misc_feature (38)..(38): n is a, c, g, or t
  misc_feature (52)..(108): n is a, c, g, or t
  misc_feature (129)..(157): n is a, c, g, or t
cctgtagtcctagctatttaggagggctcagcggaganggatcacttgagtnnnnnnnnnnnnnnnnnnnnnnnnnnnnnnnnnnnnnnnnnnnnnnnnnnnnnnnnnatagagtgagaccgtatctcnnnnnnnnnnnnnnnnnnnnnnnnnnnnngtttaccagtaagttgaaagaaccataataaacactaatatagctgcaaccttacattcaaccagttaacagttggccagattagctttatctttatttttctgaaccatttcacagtaggttgccgatatcgtgacacttaatccttaaatattttaacatgcgtctccctaagaatacacaaattctttttaaaaaccacatccagtactcacttcagcaggacatatattaaaatttgaataatacagaggttagcatggcctctgcacatggatggcacaaatttgtgaagctttctgtattttttattacctgggtgatgagataatatgtataccaagccccaagacacgcaatttatttatagaaccaacctacacatgtacccctgaaactagaataaaatttaaaaatt

SEQ ID NO: 265616 - DNA, 589 bp, Homo Sapiens
  misc_feature (121)..(140): n is a, c, g, or t
  misc_feature (143)..(143): n is a, c, g, or t
  misc_feature (171)..(452): n is a, c, g, or t
  misc_feature (479)..(479): n is a, c, g, or t
  misc_feature (488)..(488): n is a, c, g, or t
  misc_feature (540)..(540): n is a, c, g, or t
  misc_feature (545)..(545): n is a, c, g, or t
  misc_feature (550)..(550): n is a, c, g, or t
  misc_feature (561)..(561): n is a, c, g, or t
ttcagtaaaggcgggtttcaccatgttagccagggtggagaatggacagctctaagagttttgcttcaaaatggagaaaggaaatggagtaatagctgataggaggaagttattcagaagnnnnnnnnnnnnnnnnnnnnacnatggaaaatttgggggttaggcaaagtnnnnnnnnnnnnnnnnnnnnnnnnnnnnnnnnnnnnnnnnnnnnnnnnnnnnnnnnnnnnnnnnnnnnnnnnnnnnnnnnnnnnnnnnnnnnnnnnnnnnnnnnnnnnnnnnnnnnnnnnnnnnnnnnnnnnnnnnnnnnnnnnnnnnnnnnnnnnnnnnnnnnnnnnnnnnnnnnnnnnnnnnnnnnnnnnnnnnnnnnnnnnnnnnnnnnnnnnnnnnnnnnnnnnnnnnnnnnnnnnnnnnnnnnnnnnnnnnnnnnnnnnnnnnnnnnnnnnnnnnnnaagtttaccagtaagttgaaagaaccntaataaacnctaatatagctgcaacctacattcacagttacagttggccagattagcttancttantttcnggaccatttcncagtaggttgccgatatcgtgaccctaa

SEQ ID NO: 265617 - DNA, 430 bp, Homo Sapiens
  misc_feature (241)..(334): n is a, c, g, or t
  misc_feature (358)..(358): n is a, c, g, or t
attcggcacgattaaattcaaggcatgaaaaagttaggctctggagaaaggattccaacacaataaggtgaattcaataccctgacctttgcctttgtcccgtgatactggattttgtcttttcctaacccggcttagtctcccatccatgcactgagaagggcacaagagaatgtactttcaatagtgcctgggatttcatcttttactttatacagagaatattaaacttaccttgaannnnnnnnnnnnnnnnnnnnnnnnnnnnnnnnnnnnnnnnnnnnnnnnnnnnnnnnnnnnnnnnnnnnnnnnnnnnnnnnnnnnnnnnnnnnnnattaaaattccatggagtccattncaggattaatggaacaatcagctgggggcacagtaggcttcacggcctattaattcccaggcacctgggggg

SEQ ID NO: 265618 - DNA, 824 bp, Homo Sapiens
  misc_feature (131)..(131): n is a, c, g, or t
  misc_feature (351)..(351): n is a, c, g, or t
  misc_feature (389)..(389): n is a, c, g, or t
gtcaccaagtgattttgctctcctcagatctcagcccatattttaaactgtttcccaatttaactatctattgaaatcaccattggaattttttttaggggaaaaattctttatttgtcctgggggaaganaaaacaaaaaatgttattcttgaggaatttttgtgaaactctggatggggataagactgaattcagggatggattgcctaatccaaaatttatcgtgtgcagaggggaatataaaaagtcactaggacgatataagacccatatacaactctgtagcttgggcagcagacctgggaagaaggaggcaacttgtggggactgcctaattgttgcaactaanttagggcagtaaagctcgatcctgaaatgtcttgaggnaaatgccctctgtgctagatctcacaggcagctgggacagtgtagtagtatctactcctgcctttctcttagcagcaagacctgtaaagaaaagctcaagctttgctgaaataacttctaacaacaacgcctgtgttggttagagggcgggagcacagtgcatgctgttagagcaaatgcaaaaattaaatccctatagtaggtgatgatgctgcagtgatggctctccacctaggtgatgatactgcaatgatggctctccacctaggtgatgatactgcaatgatggctctccacctgtttctcacagttaacctgaatccatagctgagattaactgtgataaagaaaaatcactaacagatgaaaactttcagtgattcggagaattgtacctaagaaatctaaacaaatatttcctttaaaatgtcacag

SEQ ID NO: 265619 - DNA, 1098 bp, Homo Sapiens
  misc_feature (519)..(519): n is a, c, g, or t
  misc_feature (633)..(633): n is a, c, g, or t
  misc_feature (784)..(812): n is a, c, g, or t
gtaacagacttcatcaaaggaatactctcttcagtaatggtgattttaaaatactcggcaatttttgtttttcattgactcagacacagttctgtctaattctgaccttatctattcctatcatcctgttgttcaaagtaaatgtatttttaccaactgtttgagagaggaaatcctgggataattagctgaaggatatagtgtaataaaaaaataccaagttttgatattttgaagcctctgatctactagggatgtttagatacagtacaagcctgagtcagagctgaacttctcaaagttctttttcagacttgggattctgtggtatattctgaaactggaaaatagcttctagggagattcacagtccccaccaccactggcccattggcgccactggggccaaagtcgaaggggcctagaacagctcacacctttttctgagagctatagcacagctttaagaagagagattggtccgcagccagtgacccatatcggggtactcatagaganggggttttggtttaataggattacccctgaccagatatccatgatctgtttcacatttttccgttagattatttggcacagatgtgatcagattgcccttaagatgctctttgntctgtgtactatttttcccctctcctaacacaagcatcattaaaaaagtcttggagcattgatacatcaaaagattcttctttctacctactttatccaaaatcactatgaacactttggtgtatgttcttctagactcttttctttgttnnnnnnnnnnnnnnnnnnnnnnnnnnnnngcctagttttgcacagagtatcacagcgtgcacttccttgttaacctgttatttccccctacaaacaatgtgttgtgaacaccttcctatgttagcagattgatttctacagcatttaaaattggctgtagagttttgcattgtatggataaaataccttccaagttttcactgtttcatactgtgatgtatgttttcatacattgttctaaaatatcttaagccacatcgtacatattgccagtttggttctctgtgaattttactggtaacaatacaacctaga

SEQ ID NO: 265620 - DNA, 691 bp, Homo Sapiens
tcttaaaatgctagaattacaggcatgagacaccatgcccggcctgattttctttaaggcaatagttcttaatcaggaatggtttttaaaactaggcatgtaaaaatgcccatgcccattccagaatgttccaattcattagtgtatctgagtaaaaaatccaggtatgaatattttattttttacttccaatagaaacctacaggtatgaatattttaaatgttcataacatgattttctttttaccgctaaaattaagaattcctttggcactctaaagcaacgatattaatgagtatttataataatcattttaagagcaataaaaacagaatcttaatgtgtacttatataacttaaatcctcgattaaaaataaaggaattactacagcttgccccattctttatctacatagtaaaattaaatttctctttgcctattactctactcctcaagtaccacaggctttaagtgtcagtaaaccaacaggtaatgattcagatactctaagttgagacacaggctatgaggtatactcaaaatcactttgaggtgaaacaggtaagaactcagactcagtagactttggcatcatactgactctaagtttcatgtaaactctgccatggtgcaagctgcggtgggacttattttaaaatggctaatgagccttcaaacagcaacaggg

SEQ ID NO: 265621 - DNA, 765 bp, Homo Sapiens
  misc_feature (370)..(370): n is a, c, g, or t
gtatttcctaaaattaatattcatcttcccctaattctctttttattggctgctaagctttcaggtccttacttcaagccgagtgagacacccaacacaccctttccttgctccagtaacaaattttgaaacttacaggacttccaacagcagttattttaaggatttagtcagaggctcacacaagcagcctctgaaggagcctcaatatgaggttctaggcagccaagaaagagtctctgagatccaccagatccctctactttgccccaacctgcaaatcaatctggttatttaaagtcatccttactctttctgatcggagggccagtttctaaattaaaaagcaacataattcatcaccttggcngggggtttatttcttattgcaagttggtccggtgttttgaaatctggaaataaaatctcatcttcttatgtacaataaggagaacaaaagcaaggggcttccagtgttaggttaccatttcccaaggccagccaaataccctcccacctttctctaacagcttctaaggctttggagctggaacaaatattctcatgcacaagttagtggaagagattcttccaatcaaatttcccaccacatgatatcttgggctaggacgctcttttataagtgtcaatgagttattccctcatggataaagatgaagagactacttttctttagctgtaagaaataatttttatctttgctcacaccttctttaaaagcattttttttaactcagaatatat

SEQ ID NO: 265622 - DNA, 615 bp, Homo Sapiens
  misc_feature (403)..(403): n is a, c, g, or t
tccggccactctagaatctttttaagcaggtcagccagtatttgcaacttccacaggatgaattgcttgccaagtttctggcactcttgtctggttggaagagtacatccaaagggtacttagtgatcctttgctaagaagttttttgctgtttccgggttacagatttggccatatatttctaaacagcccctgtaaagttgaaagaaaaagtttataacagtgaacttctgaggtttagttactgcaggctttgttgagaagagattgttacagtgtgatttatggatgatcagggatgactttcccctagcaaatatttggatgcctcctgtttgtcaaatagaatgaatggtgatggtgatgggagggatagttaaacgttttctctgctaggttaacntccttacaggtataattacaatgccctgaaattcctgtagtttcatttcctttggattagtcgttgtcttttcccagattgtacacaatctgatcaacacaaaggtagttagtagatcattaacctcaattgcaaggttataatttctcaaacattaagcatattatcagtcatgtggattcaaacacagtataagaaaatcctcaaggctg

SEQ ID NO: 265623 - DNA, 649 bp, Homo Sapiens
gtccggccaactctagaatctttttaagcaggtcagccaggtatttgcaacttccacaggatgaattgcttgccaagtttctggcactcttgtctggttggaagagtacatccaaagggtacttagtgatcctttgctaagaagttttttgctgtttccgggttacagatttggccatatatttctaaacagcccctgtaaagttgaaagaaaaagtttataacagtgaacttctgaggtttagttactgcaggctttgttgagaagagattgttacagtgtgatttatgggatgatcagggatgactttcccctaggcaaatatttgggatgcctcctgtttgtccaaataggaatgaaatgggtgatgggtgatggggaggggatagttaaaacgttttcctctgcctagggttaacctcccttacagggtataattacaatgccctgaaattcctgtagtttcatttcctttggattaagtcgttgtcttttcccagattgtacacaatctgatcaacacaaaggtagttagtagatcattaacctcaattgcaaggttataatttctcaaacattaagcatattatcagtcatgtggattcaaacacagtataagaaaatcctcaaggctgggtgtgatgcttat

SEQ ID NO: 265624 - DNA, 588 bp, Homo Sapiens
  misc_feature (344)..(362): n is a, c, g, or t
ggatccatttaagccccaggaggtcgaggctgccgtgagcccaagattgcgcccactgcactacagccctggacgacagtctcaaacaaacaacaaaaaacacttaatgtttttaaagagtggacacgtcaaacttttctttcatctaacccagtggttgagtccacaggatgagtaggagcttgacagatgaagagtggaacaacctaaggtggggagagtaaaagctcagccagttcagcaattgaaataaacaaaatggggagaacaaagtgagtgatgaggtgggcagagatcagaagactcagagcgccaaggccaggttagagatttggaattttttnnnnnnnnnnnnnnnnnnngaatggagttgaaaaccaaacctacataacattagtcattctaattctgataatggtttggctaaacactgaaactaccaatcttacaaagatttcttgttcttattgcttttggacactcctactcttacaatggatgcttaaaaagcatgaaattttaaaactgtagcttttaaaatgagaaattttgtaaattttacaaatttatcaggttccaacaactttc

SEQ ID NO: 265625 - DNA, 719 bp, Homo Sapiens
ataccaggagcctaatcctcttgctctgccttgagaaatgtttccagatcaaaaggacacgtgacactgctcccatgtcctcctgaccagtcctgcctctgcgtagccacccctgccctaaaatctgaaattaactgtgccagcggctttgccgcaatgtcctcagcagtttcaacaggagaaaccaaaagatggaaatggatcctgagctttcttgtgacgtcgatgtagaaaccattctcctaaagctctcctacttcttaaaacacctcatgcaacctggagagtcattatgtttgaatcacccttgctgcttacttggtctttgcttgaggtgtgctaaagtgtgttataaaaactgaagaaaaataccaatatctactgaacacaagtagaatgttttacctggaggtatttcaactctggtaatcctgaagggattttttttagtttattgttttccaaatgtatttctctcacacgtggtatgttagcaagactcccattttcgatatctgtgattttgttgtttcctagcccagcctaaaaatgatataaaatgcatcaagtcttacacagatggttaggtgtgatagagttagctgaaaacaccgcaaactagttagaatataagcctgtcctatttatatatatgttcaaagatatttcattactttatttaataacctacttcagtatgtaacaactatcttcctagc

SEQ ID NO: 265626 - DNA, 718 bp, Homo Sapiens
cccttttccctctctagagagccttcatttgcaggcatgagctggagctatctccatgtggggatccctctgctctacataggggaactcccccccctttcccttttccaactcgggacccttggtggacagcatctaagcacagaggcaactgcaggtctctggctggggacactctggtgacagtgaaaggtttccgtgtggaagcctgaccaccactgcccagtttgggtgagggacctgagtttttttcttgttttcagtctttcagtggccatttcctacctaattgctccttggtaactgagggcaactggctggggccacactctggtgttacctaaatttcttgaggctctccttggaggaatgagagagtaactaaggcagtaaactatgataaagtaagggaggttacacaggacaaggagaaaaatccagccatgtttcatgggaggaggactcccaaaggcagtgttgagccctcttttattcctagtattactacttttggtatgaactttcctttttagtgattactctatctagaagtttacacattttagtgactgctttaaagaaacaacctatattgtatcattttcaagcccacagaaatgtatatggcatataattttgacattttcaattatttttaaggttttaagcatgtaaaatactgttaatatatgtaagaatatgcataactaccaatacg

SEQ ID NO: 265627 - DNA, 184 bp, Homo Sapiens
  misc_feature (24)..(24): n is a, c, g, or t
cagaatctcagaccccaccccagnaccaactgaaggagaatctgcattttaacaggctttccagactccaggtgagagcacattacaggtggagaggcacaaggtggaaccttgccgattgagagagaattaagtgttctttcccctccttcctctgagccagatcacaatgacttggatatgg

SEQ ID NO: 265628 - DNA, 699 bp, Homo Sapiens
  misc_feature (24)..(24): n is a, c, g, or t
ctgaggggtgaagtctagctcccncgggctttgactgacggccggccgcggtgactcactgccagcaggaggatgtggcagaagtgatgccgcctgccttccaagggaggctaagttaaaaagtgacatggcttctgccttggttcccttgggacagttgctctgggagtctcaggcttctggggactttgggacagttgctctgggagtctcaggcttctggggactttggagcgtgcagggagagagaggagcagcagcaggtgaggggtgacctgtggggctgggtgtgtgtgttcttggcaggtggacaggctacctggaggcccacgaaggtgaaagggtgtggctggggagccccagccgccaaagccctcattgtctgaagcctcttaggccaatgcgaagaaagccttggggctaacccaacctggccccatctgactgatgaggccccaggtgagaagtgcgtagctgcgcccaggtaccccaatgcccatgtgcaaaagaaatgaacgatcttgttttaaagccctcacttagaggtggtttgttacacagcaataaatgagcagaacagaagcgtccccaaccccactgatcaatggatcagctggatcacaacagaaacaaatacactgcatgatgaaggctcgaggctcccactaagctcaggacggctgggactgcacgcctcac

SEQ ID NO: 265629 - DNA, 782 bp, Homo Sapiens
gatttcggcacaggtcagttcacttcctgagtgtctaaatagcccacattcattgggccactttgcacattgctaggccctgtgctcggtgccccatgcgtatcaccacatttaacgagacactcccgttagaaaccacacttcgcagcaaaggaagccctcactcagagggtctaagacacttgcctaagcccacgtagcagggacatgtatggattgaaattcaaatccatcaagtggatagatttgaatttgaagtcatcttcctcctgtgtgaagccaagacggcctctggtcccttctgaggctcacttctcggcactccattactcatcttgcactgtccctccgtgatttgtcagtgtgcgtcccactgcccctgctgggctgtgagggcctggaggttggatgctttgcctcatcttctctttagcttgtctctaaaccaggcgcgaggtcagcactcactggatatttgttggttgctttgttctttcactgatgaagggaacagtaagtgagcatctcttaggtgtcaaagtgtggtgctgggcactagcatgcccacgatcccaccttcaggaggcttcccattcctaacaaggagacacagagtcagctccctgaatcctcacaagagcctccaaaaggtaactactgtgatcttcattctgcagggtaataagtagaggctccagcagtagggaggcttcctccagaccctctcacctactcattaccctcccatttaaataaatagtggggccggatgaggtgctcat

SEQ ID NO: 265630 - DNA, 857 bp, Homo Sapiens
aattcggcacgagcggcacgaggttaaaaagaaatatgtgtatgtgtatatgtatgtgatatgaaatgagcaaagttttcacttccatgaaaaaaggtacttgtgtttgagaatgttttcaaattaaagaaaaagtttaatattaagtaaatatttggtataaaaattcacctaggttaatgtcttttaagcttttttggtctaccctcttgcaaagaaatagtattatttgatttacaattaacttctgaatcaaatgttaacatttcatatgccattaaatacatctattatagaaatggttcttttgatgaatttttatagtggccatgctgtcgtattaaccagaaatacaacattatttttattatatctgcttcagaaacagaagtggttagtttgattcaaacagaaattcctggaaaacccatgtggttttctttatgagcaatttaaggacacgttcttccaaagagagagatggacaatataaaacataatccacttttaaaaataaattctactctgtgaaaaagttccccctgagtggtgctcagtaaaccctttggtatcagtagtttgtcagctctagcacaattggagcttgtgtgggaagccatttcactcagtggtggttgctctgccaccaccaagaagccagagaacatgggctgtaactgaggagaaggataaccatgagagaagtaataagcagaccttagaaaatctttgaaatggtcctaggtaagatctcttatcctggaatcagattccccttcctccttatcattttgttggaggaacatttgagaaagaaatggattttcagttgactaggaaaatgtaaattgataaaa

SEQ ID NO: 265631 - DNA, 765 bp, Homo Sapiens
  misc_feature (288)..(288): n is a, c, g, or t
ttcacaaaagacatagaagcccagaagaattattttaggatgtggcaaaaagcccacttagcctggcttaaccaaggaaaagttctaccccagaacatgactaccacacacgctgtggctattttgttttatacattgaacagcaatgttcattctgactttactagagccatggcctctgttgccaggactccacagcagtatgaacgttcattccacttcaaatatttacactactacctcacctcagcaatccagctgctgaggaaagacagcatcatggagaantggcactctgtgctatgaggtgcattataggacgaaggatgtccactttaatgcctacacaggggccaccattcgatttggccaattcctctccacatccctcctgaaagaagaggcacaggagtttgggaaccagacactatttaccatattcacctgcctgggtgcacctgtacagtacttctccctcaagaaggaagtcttgatccctccctatgagctgtttaaagttataaatatgagctaccacccaagaggagactggttgcagttgaggtcaactgggaacctgagcacatataactgtcagctgctaaaagcttccagcaagaaatgcatccctgatcctatagctattgcatctctctcctttttgaccagtgtcatcatcttttccaaaagcagagtataaagaaatcttgtggctccttttatttaaaaaaaatatttaaataaaatcttttttattggcttaaa

SEQ ID NO: 265632 - DNA, 554 bp, Homo Sapiens
  misc_feature (11)..(11): n is a, c, g, or t
  misc_feature (31)..(31): n is a, c, g, or t
  misc_feature (39)..(39): n is a, c, g, or t
  misc_feature (48)..(48): n is a, c, g, or t
  misc_feature (63)..(63): n is a, c, g, or t
  misc_feature (230)..(230): n is a, c, g, or t
tcttggtgtantcatatttataacttaacantcataggnaggatcaanctccttcttgagganagactgtacagtgcacccaggcagtgaatatggtaaatagtgtctggttcccaaactcctgtgcctcttctttcaggagggatgtggagaggaattggccaaatagaatggtggcccctgtgtaggcattaaagtggacatccttcgtcctataatgcacctcatanacagagtgccattctccatgatgctgtctttcctcagcagctggattgctgaggtgaggtagtagtgtaaatatttgaagtggaatgaacgttcatactgctgtggagtcctggcaacagaggccatggctctagtaaagtcagaatgaacattgctgttcaatgtataaaacaaaatagccacagcgtgtgtggtagtcatgttctggggtagaacttttccttggttaagctcaggctaagtgggctttttgccacatccttaaaataattcttctgggcttctatgtcttttgtgaaataatccccttgagttagtttctc

SEQ ID NO: 265633 - DNA, 779 bp, Homo Sapiens
  misc_feature (387)..(395): n is a, c, g, or t
  misc_feature (662)..(662): n is a, c, g, or t
ttcggcacaggaccgacttcaagatgagaatgagaaaaatgtctattaaaatcactacatttgataatatctcagatttagaatctcttttgggattcagatagtctgattattccaattcaagtgttcagttaagttttagttactattcctataatacccaattcactaatatcatatctcctgtggaatattcattggtgcgatggcctcatccccttttttactttttattgacatggtggttataaaatgaagagacttactctattggaattttcatctacgtagtatttaggctgtcaagactaaataggcaaaagggtagaatattagatcattctcttaataagacctgatttattccttaggatgttatacaaatcnnnnnnnnncaggcctactttcttgttttttcctaaaaggatctaggatagaggagaacataatatgcctgtatacttctcccatggtttattcataagctgcttcatctcattggagatggtcattgaggagagcagtaataagtgacgatgattctgaggacttggctagactgagcggatcaatggcacacaccagcactggtagaggctgaccagaagctcatcgattccatatgctgtcacccagggtgcagatttactctcttttgctgntattttattggttttcttaaattaagccattgtttttcatggattatttttaaaatacctaccccataattttcaggcaattgtaaaaataaaccttatttaagataacttttaatg

SEQ ID NO: 265634 - DNA, 537 bp, Homo Sapiens
  misc_feature (359)..(481): n is a, c, g, or t
  misc_feature (486)..(486): n is a, c, g, or t
  misc_feature (498)..(498): n is a, c, g, or t
  misc_feature (510)..(510): n is a, c, g, or t
aaccaatcttggtctagaataagtctcaaaatcaaaagacttgaattctagtgcagcgtaggttgactcccttatttatttaattttcccatctctacaccgctagaataacctctctcctgaggctgttgaatctgatgaattagcagataggaaagaacttagaaaattataagttcactcaaatgtaaaaggttatatgggaaataatcaccactaacatttttgagtacttactatctgcttgttatacacattctctaatttaattttcacaagaaaattcatgaaaggactatacttatcccccttttacaggtgagcaacctggagtgcagtgaagtgtaaaatgtgggccnnnnnnnnnnnnnnnnnnnnnnnnnnnnnnnnnnnnnnnnnnnnnnnnnnnnnnnnnnnnnnnnnnnnnnnnnnnnnnnnnnnnnnnnnnnnnnnnnnnnnnnnnnnnnnnnnnnnnnnnnnncgggnttggggcaaganacacacaagctngaggactgggagcctcttgcagttccc

SEQ ID NO: 265635 - DNA, 1275 bp, Homo Sapiens
  misc_feature (11)..(11): n is a, c, g, or t
  misc_feature (36)..(36): n is a, c, g, or t
  misc_feature (41)..(41): n is a, c, g, or t
  misc_feature (62)..(62): n is a, c, g, or t
  misc_feature (67)..(67): n is a, c, g, or t
  misc_feature (76)..(76): n is a, c, g, or t
  misc_feature (101)..(101): n is a, c, g, or t
  misc_feature (104)..(164): n is a, c, g, or t
  misc_feature (596)..(596): n is a, c, g, or t
  misc_feature (767)..(767): n is a, c, g, or t
  misc_feature (803)..(803): n is a, c, g, or t
atctccatcanaaactcaactcaactcacaggaganacagnaaacagagaaacccacccctnatgantccaattanctccatctggtcccgccccttgacnacnnnnnnnnnnnnnnnnnnnnnnnnnnnnnnnnnnnnnnnnnnnnnnnnnnnnnnnnnnnnngttagtgaaatgcaactctaagaagcctggctgagttaacagcctctacagaccccatttgtcttctggagccttcctaaactcctaaggcttacaagcggctcaggccttgccttctgccctctaactccaaaggcctcaaaggcttttctgatccccatatgactccaccacaaagtatccatgtgcccttaggaaaatgaatttttgcttcagttttcacacctataaaatgggataccacttacctcaagggattgtccacctaaagtgttttcacaggacctgctacagagtagatgctcaatacatttttaattgttcacgttggcttttggagcccatgaccccacacaaaaagaagggatggcatcttgctggtacatcttaggtcactttctgtattgatggtggctcaccacggagttgggngcccctggaagatgaagccaaatctgctagctactgttattgttccctccaggttccaacaattcctgcacagtatagctacccaattcattcctagtttgctcccatcctatatcgagttgcctatataaatgcatatcaaaaggaaataaattagcaacgttgtagggngccaccgagtgcaggttttctcccagtcatcgcagntctcctgccagtgagcaggaaatccctttcgactgtctttattctactgccatcctgtggctgggtctgtgccactgcaggcacccgggggccggatgtaggctgagcatctgtagggttcattgtcctcactgttccccaggaaggggctcctgaggagggaagtgcagttgaagggtctgcctcaggtcccccaccagcgggcagacgtctggcgtgaatcaccagtcttgacttggtttctgtttgatgaaccttaaggacacgtagtacaggaccatgaagccaccgctgaggccaatgacgatgaggtagatggcgtagagagggtacgagtccagctccatggcactgaggattttatctcctgagaccgcgatggtgaggttcccgagaggcattttataagttcttctgctgaactgaatcttcatcagcccttcaaaacaccaccgcaggaaggacacttgga

SEQ ID NO: 265636 - DNA, 391 bp, Homo Sapiens
  misc_feature (308)..(308): n is a, c, g, or t
  misc_feature (329)..(329): n is a, c, g, or t
gccactgcgcccggccaactggccaaaattacttaagcagtaagagacaaacaaaagcatacttcatcttcatcttcatcttagatcatgtttatctattagatcaccttgatcttagagaggtgaccataaattctgtttaactttttatgctgataaatataagttcaatatgttcattaaaaatataagtaataacagtattactaaaactaatattagttaacatgtatcaagtatttataatggatgtgacagacactattttaaaggctttgcatacaataatccagccagggcacggtagnctcacgccggggaatcccagncactttggggagggccaagggcagggtgggattcacttgagggccgggagttttgaggacca

SEQ ID NO: 265637 - DNA, 620 bp, Homo Sapiens
atgtcagtgactgttgggtagtgaatatattttctgcttggatcccccaaatacccaacttttgctgtttctggtcactgtagggttagctcttggctggtcttttgggaggttttcccagtctgaagggcagtggaaacctctgctgattccctatgcagtggatgaatttttggctaaagttgtcttagttcctgccttatttactggtatagcaagttggtgtatgtggcataggtacaccttgctttatgtgaaagtcacaccagaagggcagtaaaggggaaacagtgctaactctagagttagcagacccaggctctggttctcacatggcctttgctccctcaggcttcctagtgttcccatgatcttttgctgaattccttcaaaatctagggatttgaaacaaacatgtcataagcacatgtattgtgtgggtcaggaatttggagaggccacagtggagtggcttgtctctggtccacaagcttggacctgggctggaaggactcaaagactgaagatgagttgatgctaagggctgggattatctgaaatgtctctccatgggcttggcttcatggccacctcagcacggtaggactttttaaaacatt

SEQ ID NO: 265638 - DNA, 947 bp, Homo Sapiens
  misc_feature (888)..(888): n is a, c, g, or t
  misc_feature (919)..(919): n is a, c, g, or t
aattagatcttgtcacatatgaagaagtagtaaaactgccagcattcaagaggaaaacactagtcttattaggcgcacatggtgttgggagaagacacataaaaaacactctcatcacaaagcacccagaccggtttgcgtaccctattccacatacaaccagacctccaaagaaagacgaagaaaatggaaagaattattactttgtatctcatgaccaaatgatgcaagacatctctaataacgagtacttggagtacggcagccacgaggatgcgatgtatgggacaaaactggagaccatccggaagatccacgagcaggggctgattgcaatactggacgtggagcctcaggcactgaaggtcctgagaactgcagagtttgctccttttgttgttttcattgctgcaccaactattactccaggtttaaatgaggatgaatctcttcagcgtctgcagaaggagtctgacatcttacagagaacatatgcacactacttcgatctcacaattatcaacaatgaaattgatgagacaatcagacatctggaggaagctgttgagctcgtgtgcacagccccacagtgggtccctgtctcctgggtctattaggcctctccccagatatctgagcataactgggagcacctcatttgtggaaaagcctctttgttatcggccttgtgtcagcaggtcatggtccctagagactacctagttgtagtgtgacctacatttataattattgtcatgtccgaatagataggaggagaaaaacaattacacactaatttaaagagacagtatcttttttaatcagttctcctaaactttaataaaatgtatctttaaatgtatgtattattcaatcctttgggaatgntatatttttggaaatcatagctttttatttncaaggcccctaaaaactgcacaaaatag

SEQ ID NO: 265639 - DNA, 897 bp, Homo Sapiens
  misc_feature (106)..(106): n is a, c, g, or t
  misc_feature (121)..(121): n is a, c, g, or t
  misc_feature (155)..(155): n is a, c, g, or t
  misc_feature (198)..(198): n is a, c, g, or t
  misc_feature (204)..(204): n is a, c, g, or t
  misc_feature (345)..(345): n is a, c, g, or t
  misc_feature (851)..(851): n is a, c, g, or t
aaaagaagagacagggttttgccatgttggcaagcctggcctcccaaagtgctgggagtatagggagtataggcatgaaccacgatcatctattcacatcttaaantcaaagctgccagtnttttctcacaagtgtaaaactctcaggacaactntccttgcctatgccttttccaacttcacctcacaggtaggttnttaagntcccagtatcactgaattgggatgtagaaatgggacctgggacccccaaactcctcccagtcctgggcaatgagcagagaccaagctattcagatttacactggaaaacagtttgaattcctggggcccaagcaccaggcntttgttttacttttaatgaactgttttctagtgtcctaagtaacttttatacccatctgtactaaagtgaaaaagacgcttttcccaactttcaaaatgaagtatcactacacagtgaaatataatgcttgtgaagaactattgtagagtcagacacacctggattcacaatcttcactgatactagcatggggtccttacacagaatttttatgaacaggaagactacacaaaaaatagataagtcctaaacccaaggttagtaatggggacacacatgaggtagccaatacttactgactgaccctcctctactcataaaccatttaatcctcacaaattcttcaagtagacctggtccttttgcatatttctgtgcttgttatttattgatattaagttccaaggggaggggatgtattcatttagcagaaacaaggaccaaaaaagacattaacagaattggaaactcacaactagttttaaaactgaagtgttcggagctnctggtctgtcccaccactgactgagaccaacaatccaccctcctgc

SEQ ID NO: 265640 - DNA, 816 bp, Homo Sapiens
  misc_feature (337)..(337): n is a, c, g, or t
aactggaattactttctaaccggtcctaattgcaatcaaatctattaccccattactgttcttaaaatgctatgttcaaactacatttttgctaagaacctatagttctctaccactgaccacattcacatcaagactaaactcttcttctggttttcaaggctttaaacacacttatccaagcttaccagtccctgaatacctcagctggatctccttactgccctatcccaacccctataggccactgtaagatttcaaagcaactgcaatttgttcctttctcttgtctttctgagggcaatgcctccgtggggagtacctatgggacctgtgnccagagctctggcagtcttgacagtgctcggaacactgtacaaataggagtcatgtcagtggaaatgtgccagaggtaaaatgccattaaagttgttttctttaaaggaacacctacaccagaaggctgtacttaattcccaggatgctaagagtaagagacatgagctcacacacacgtagaataatgaatgtttgtctttcctagtaaggttttttcacctccctccaaattatcataaattttaaaatttgaaatataagtattcaataccctttgttgccactgtcggagcagttactgagagatgataaataataaaatgagtctggactgctatggtggttcctgtgattaaaatattatcaagacctgacagaaataatgtgaaatataattgtcactagaattatccttgatgatagggtctgtattttattcaaccttgtatctctaaagatctagttcaagtcactata

SEQ ID NO: 265641 - DNA, 1145 bp, Homo Sapiens
gtaaccagtactagaatagtcagtacctagaagccactcttctttgaaaaggattatcacctgatcaggttctctctgcatttgcccctttagattgtgaaatgtggctcaaggtcttcacaactttcctttcctttgcaacaggtgcttgctcggggctgaaggtgacagtgccatcacacactgtccatggcgtcagaggtcaggccctctacctacccgtccactatggcttccacactccagcatcagacatccagatcatatggctatttgagagaccccacacaatgcccaaattacttactggggctctgtggaataagtctgtggttcctgacttggaataccaacacaagttcaccatgatgccacccaatgcatctctgcttatcaacccactgcagttccctgatgaaggcaattacatcgtgaaggtcaacattcagggaaatggaactctatctgccagtcagaagatacaagtcacggttgatgatcctgtcacaaagccagtggtgcagattcatcctccctctggggctgtggagtatgtggggaacatgaccctgacatgccatgtggaagggggcactcggctagcttaccaatggctaaaaaatgggagacctgtccacaccagctccacctactccttttctccccaaaacaatacccttcatattgctccagtaaccaaggaagacattgggaattacagctgcctggtgaggaaccctgtcagtgaaatggaaagtgatatcattatgcccatcatatattatgggaccttatgggacttcaagtgaattctgataaagggcctaaaagtaggggaagtgtttacctgttgacccttggagaggcccatccctatttgattgttcctgcctgattcctcatcccccccaacaccctactcccggattaggaggactgacaatactacatatatcattaagcatgggcctcgcttagaagttgcatctgagaaagtagcccagaagacaatggactatgtgtgctgtgcttacaacaacataaccggcaggcaagatgaaactcatttcacagttatcatcacttccgtaggtatgtgtgacatacaaggaagggatcctaataaaacatgaatgcatgctgaa

SEQ ID NO: 265642 - DNA, 325 bp, Homo Sapiens
  misc_feature (138)..(138): n is a, c, g, or t
  misc_feature (155)..(271): n is a, c, g, or t
tcaaaattaacacaaagctaataagctgaatacacaatgcaaagcatcctaaatcttgggcaataacaaaatctaagatcctaagatcatgatatttaaggtaggaaaaaagtaatcagactagaactgggccgccgngtgtcacgcctgtaatnnnnnnnnnnnnnnnnnnnnnnnnnnnnnnnnnnnnnnnnnnnnnnnnnnnnnnnnnnnnnnnnnnnnnnnnnnnnnnnnnnnnnnnnnnnnnnnnnnnnnnnnnnnnnnnnnnnnncatggtgccactgccttccagcctggatgaaagagcgagactctgcctcagatc

SEQ ID NO: 265643 - DNA, 783 bp, Homo Sapiens
  misc_feature (508)..(523): n is a, c, g, or t
  misc_feature (764)..(764): n is a, c, g, or t
gaaagtgtgtagactgcctgcatacttatatatacgccagattgtattttacttaccttctcatttgcatcttacccttgtggccgaattagcaggacctgtgtgagaatgacataacttcaccgcctcttacctgctccagctgcaacgcgtgagagtgctgaactgtggcctagatttttctctagggctttccacggaagtgagtcaacacattgtttctggcttttcttgctgtccctccctaatatgcaagcttaggttgctttggaattttccaggtacagtgttggagaagttgtaacacaggaggaggccagagcgtaggtttagtgtggtggggagagggttggagcaattgttcaagggaagattgaaagtgaccaaaatggcatgagggtaaaaatgttacctgaattaaatatgtaccaaacactgaaaatcccttattatattttagtatcttttatcattgtattttaaaattgatttaaatctatactgagannnnnnnnnnnnnnnnagtgtggatttcaacacattttttgtgcttttgccaagaacacagtgttctgttaagtcattcagtgacgaagattgctggattgctgccagcccgggtcaagttcattcacataagtttcagtgtagattctgactgagtgaggaatgttcctcttgtctttgcatgttaggtgggtctgggaaatcagttgttttaaaacaagcttattaatacttttgtttttttcagggtatgaagnctcatggtgctagctctct

SEQ ID NO: 265644 - DNA, 551 bp, Homo Sapiens
gcaaaatatcagtgtcttgcctgtgatgtggctatcagtgggaatgaagcacttagccaacacctccagtcaagcttgcacaaagagaaaacaatcaaacaagcaatgagaaatgccaaagagcatgttagattattacctcactcagtctgctcccctaatcctaacaccacatctacctcgcagtctgcagcttcttctaataacacctatcctcatctttcttgcttctccatgaagtcctggcctaatatccttttccaagcgtctgccaggagagctgcttctcccccttcttctcctccttccctttccttgccttcaacggttacctcaagtttgtgcagcacctcaggggttcaaacctcactacccacagaaagttgttcagatgagtctgacagtgagctgagccagaagctagaagacttagataattctttggaagtgaaggctaagcctgcttctggcctagatggtaatttcaatagcatccgaatggatatgttcagtgtgtaggagtgaagacaggatcccgtgcttaaaaaaat

SEQ ID NO: 265645 - DNA, 771 bp, Homo Sapiens
  misc_feature (25)..(25): n is a, c, g, or t
ctctcacgttccccatgaccacagnatgtggaaaatttgaatcttgacagttcaaggtgaactcagtcattttcagagttttcatagtcccttcaagattgaaactcagttcctgcaatgtttgccccttttctcctcttttgtctatgctgagaggcattgtggggagggttgtctggcttatggctcccattgtcctctgcttgataaaccacctgagctttggtcattagcagtctcctgtgcctttcacactcaggtagtgtctgcacaggccactctatgtcttttccatgctgaagaaattcctttccagggccatgtctgtgttcctcctgccacacaggaaatttttgagcatgttcatcctccaagctgaatgcagggtcttgggtagtggtcctcacctgctccagagacttctccagccattgccactctccactcaggtgatgaagctggatgagggactgcacccaccagagtcaggccagggtcctgtctgctctgtgagtccctccaattgttcttattccgagatttccattgttctgccccctcttgactcccagggctctcaagggagtgggggtagtgaagggagccctttcccaagctcccccaagagctctagtcacatcacttctgatacttcttttcccaccagctggaagaaagaactttcatttgtcttgaaatgagaaaaatgttcttagaatattttgtattactctctgctctgtcatttatggtaaacaaaataaaataata

SEQ ID NO: 265646 - DNA, 703 bp, Homo Sapiens
  misc_feature (507)..(515): n is a, c, g, or t
aagcttgtgggcattcctggctagagattaatttggcactatttcaaactaatattcttgaaaattttaaagtatctgtcattaattgagcactacttgtgccaggctgtgttctgtgtactattatacgtaatatactattatatgtaacttactactatatcataacattctattatttgtactattatatgtactgttctatgtactgcatgagtacatttaaccttctcaacatttctattcataatgtacagttattttcaggataagggaaataaaagcaatgagaaggttaaattgtccagcaccctcctcctcctatgtggtcatgtgacccccagagattccaactcaggcactcttagttctgctactctagtgaagggcagggaacgagtctcctgggaggtagttctaatgcctgtgctcctgggaacctaactgaagccctgccactgctcatttgtctcccctttctaaaatcatctattactccagcctgcnnnnnnnnncttagtgggtgaacagggtttctctaccaatttcccccaggggcttgttacatattccttttattatacttactattctctgaggtgacttctggtaaattcaactttcttcattccctaatattgccagtgaagctttcacaaaccgtatagtatagtattctgtgctgggttaaaaagctgcccca

SEQ ID NO: 265647 - DNA, 871 bp, Homo Sapiens
  misc_feature (298)..(298): n is a, c, g, or t
  misc_feature (796)..(796): n is a, c, g, or t
acagttcggatcttagtccacttagtctatcttagtcagcttgggctgctataacaaataccatacactgggtggcttacacaacagaaacttacttctattaaaggttggaagttcgagatcaggatgccagcattgttgggctctggtgaagtctctctccctggcttgccaatggccacattctcaccctctcactcatgtgtcatcacttgatgccgagagagagcaagcaagctctctggtgtctcttcttataagggtactctaatcacagcatgagggccctaccctcatngacctcatccaaatctaaattgccttcccaaatcctcatatctaaatacatcacattggaagttaaggcttcaacatatgaatgtgtggggaaggacataattcagtccctgaaagaagtgtcatatttccaaggacagtatatttctgtctggtattaactcccaatcaccttgattgatcttgatgtcctcaaaatttcctcaggtaaacatttgcaaatgatctcatccactacattctttaaaaatagtatttttttctgattataaagtaacacattttccattggcaaaaaatttagaacacagaaaaatacaaacaagaaaactgaaactaatataaacatgtattttattcttctttaaaattgtactgcagttttgggggatgtattattttcagaaagatatatcatcaactgaatttgttgggtgaaaggcaacataagtatttcatatttggcttttatgatgctatgtagattgaagaatttttntgtatataatgaatgctaagccttcatgtttatattcagatattcattttgcaatgaataaaacagacaaatccc

SEQ ID NO: 265648 - DNA, 584 bp, Homo Sapiens
tttgtctaattgtgtctggtttttaaaaagcgatgtgaagtaatggtggtgccagtgcctcactgtttctaaagaccacatctggaatggctgtgacgtttcatcccgttgctttcggcttccatggacgtgactgcctggtttttcgttgattccccttgtctgtggcatcttgctgtggagtctgttcctgatgtttcactcggatatgtagttttctttgatcatgctctcagggttaggctttggtaatagaatgctggcttcatggagaatttggaagctttcctccttttcctaggctgtggaacagttaacttagccctggaggcagctggtccttaacaggtctggccaaagtcgcttgttctttttttgcagggattgttgccccttgctggcttcctcaggctgctatttgttattttatctacttggattttctgtctcctggggattcgttttgataattcttattttcccagaaagccatttactcatctaagttttcagatttggagattttaaaaattcaagaaatagaaataatttctgaatagattatagtgactaaagaaactatt

SEQ ID NO: 265649 - DNA, 779 bp, Homo Sapiens
  misc_feature (358)..(358): n is a, c, g, or t
  misc_feature (377)..(377): n is a, c, g, or t
  misc_feature (608)..(619): n is a, c, g, or t
ggtgtgaaatgtgctcccctggggagacttccctcctagtaaatgcaaactcggttcttcagttccgaggccgaaaactggggaatcctcctcgattcctgtttctcttgtacccaccatctaatccatgagcaaatcctccaggcttatcctgacagtgccttgccccttcctctactgcgattatctcttgtctggatattgcaataggctccctaaataaccctgctcccaacctcttctccctgtagcctgttctccactcaatagccagagattttttcagaagctgagcagatcgtgttggattgctgatccaaactgtgcagagtgtcccacctaactaggtgtgtaaacntgaagccttaactgtgaangggcccacatggtctggatctcccaggagctgctggatcttaattcctcttacgcttcccctcctcactggcctctcaacattcctcaaacaccactcagcctcagggcctttgcacggacctttggtcctgtccatcctgctgctgccctcaggcccgtgtggcttgctccatcattcaggtcttggctgaaatgtcacctcaggaggccttcccttctccaacccctcnnnnnnnnnnnncttactcatatttcccactccttggcattaattattcatttgtctctcccacaagaatgcaagctccaagaaaagaggaaatgtttttccctgttgtatccttggcacccaaaatactgcttggcccatcacaggtgcacaataaatactcgtttgcaga

SEQ ID NO: 265650 - DNA, 233 bp, Homo Sapiens
  misc_feature (44)..(44): n is a, c, g, or t
  misc_feature (107)..(158): n is a, c, g, or t
gttgggttgtcttgcatagcattcagttcattcatgttcaaacnagggcatgaagcctacactttgcatggtaatgataaaaaggtatatcgtggccaggcgcagtnnnnnnnnnnnnnnnnnnnnnnnnnnnnnnnnnnnnnnnnnnnnnnnnnnnngaggtcagaagttcgagaacagcctggccagcatggcaaaaccctgtctctactagaaatacaaaattagctggg

SEQ ID NO: 265651 - DNA, 735 bp, Homo Sapiens
  misc_feature (30)..(30): n is a, c, g, or t
  misc_feature (57)..(70): n is a, c, g, or t
  misc_feature (294)..(294): n is a, c, g, or t
agtgacctattggaaagaaaggaaaggttncccaagaaagaccaccagaccagcatnnnnnnnnnnnnnngatgagaattctgacagattctggagcaggcttatgaagaggtttgtgagcgccagcttttccaccctgcttgagaatctttgatagttgcgacctccagaaaccagtgaaaactgcttggctgatcaccaactgagcacaatcgacccacccaaacgccatttcatatattcttgaggtagttccttggcctttctctgcacggaaagggcctcttcagtggncccctaaaacttgaaaaggcttattcctgtgttaacagcttgggcagtcctcccctctccctgcctccaaggcccttctttgcccttaatctggcacattctgggcctttcccagttttctaacctccctgaggcccacttcatagtctgcattttctgtaaggccttccctcaccactccaactcctacaatctccctcctcaataccaccttaactctctgtacaacaaacattctgacagcagcccacattcattccctcaggcgtgctaaatatgccacagagtaaattaccctgtcccctttttttgcaaaaagaaacaggtaaagaaaaacaattcaaaataggaagacaaactcagagttgaaagctcaatgagcaacgtgaaaattatttctccctaaattaaaccattaaagcaaatttaactttgctgtgt

SEQ ID NO: 265652 - DNA, 629 bp, Homo Sapiens
caggtggtagaaatcataactgcctccagaaatcaggagggcccacgcagtacaggacttggcaggccctggtggccaaaggtcagccagagtgaagatgcaatgcagcaactatagtaccagcattattctagaaagttcttacttcttggaagtactgacttgtaagtaaaagagcattttaacttgatcatattcactctggagtcttctacatctgaatctaaaggggaactgtattcttcctgcaaatttgggattctctaaataaagttccagggcaccagaggttccactgggttagacctttgatttattttaatgaagagcccttcttctttgttgatgtctgacagcacattcacagtgatccagtcatttttggggtaagatagaaggaatccaggtagaatacaatataaaaatgtctcaaactaggcaagagaagagtctagtcctgtggtaggtcatatttgtcaaaatatttgctaccctcttagctgttcatcctcactgagcctctctcttcaaaagattatccttcatatcccaacactgtgaggcttgagcacgtgctttgctttgaacaatgaaatacaagggaagcaatgtaatccatttctgagcca

SEQ ID NO: 265653 - DNA, 467 bp, Homo Sapiens
  misc_feature (89)..(203): n is a, c, g, or t
aagtagatctatgtgtatttatttattagacatatttattgtctatatctctgcctacacatatatataaccatgaattttaccacaannnnnnnnnnnnnnnnnnnnnnnnnnnnnnnnnnnnnnnnnnnnnnnnnnnnnnnnnnnnnnnnnnnnnnnnnnnnnnnnnnnnnnnnnnnnnnnnnnnnnnnnnnnnnnnnnnncatttgcttaatctccctgaaagcttggcccagacatggaatccagcaaaggataaggtgaagggaattcttaaagagaaatcttgggataatagctgtgtaggcattcaccagttagtccagattggtgagtgaagacagggctccaaaggggtgttgtcaagaaataaacaaccaatagatagcctgatgtgttgagacttacacatgtagtagaagtttggaggtgaattagtgatacatatacagaaaaccaaacaagca

SEQ ID NO: 265654 - DNA, 649 bp, Homo Sapiens
aagacccattagggcaacaaatgcacattcacagggcaaactgcttctaaggaaggcagacataacacttaatattctcatctgcgaaaagccaaaccacattaaatgtaataagtagcaagttgcctgtgttctagcatgtaaaatattcccaaaggagtgttagcttgacagaatgcataaagatactgcattaaagataaaacagagggactatttacccagcatatttacgtagaaaatatacaatttgatctagatagaggcttttactgtataaattattgtggcccctacttcaatcacaaacagccttcaagttgggcaattgcgttatagaaaaaggagaagagaacagttttcaattgtctagaatgagcttcaaaaacaggcaactcggttctgatagaacaatttaaactgcccgtctccttatctgatgtggacatcatttttcagagggggcaaccagctcgaattaaatagttttgctgcagacagtctgtctgtctattcccgcccccccgcactttccttccccatgcagggtgctgcaggcctctgctaatttaggaagattggtctgggcagtggtaaagtgagatgaatagaaacaactttaacagagaaaaaaatgagtgatattaaa

SEQ ID NO: 265655 - DNA, 650 bp, Homo Sapiens
  misc_feature (78)..(95): n is a, c, g, or t
  misc_feature (104)..(368): n is a, c, g, or t
  misc_feature (526)..(526): n is a, c, g, or t
  misc_feature (529)..(529): n is a, c, g, or t
tgctgaggtgaaagcataacttttttggcacagaaagtctaaaggggccactgattttcaaagagatctgtgatcccnnnnnnnnnnnnnnnnnngagatggannnnnnnnnnnnnnnnnnnnnnnnnnnnnnnnnnnnnnnnnnnnnnnnnnnnnnnnnnnnnnnnnnnnnnnnnnnnnnnnnnnnnnnnnnnnnnnnnnnnnnnnnnnnnnnnnnnnnnnnnnnnnnnnnnnnnnnnnnnnnnnnnnnnnnnnnnnnnnnnnnnnnnnnnnnnnnnnnnnnnnnnnnnnnnnnnnnnnnnnnnnnnnnnnnnnnnnnnnnnnnnnnnnnnnnnnnnnnnnnnnnnnnnnnnnnnnnnnnnnnnnnnatccagtcagtgatccttaaaagattaagagatgactggaccaggtctaccttgatcttgaagattcccttggaatgttgaggtttaggcttatttgagcactacctgcccaactgtcagtgccagtgcatagcccttcttttgtctcccttatgaanganctgccctgcagggctgagatgtggcaggagctcccagggaaaaaggaagtgcatttgattggtgtgtattggccaagttttgcttgttgtgtgcttgaaagaaaatatctctatatctaaa

SEQ ID NO: 265656 - DNA, 838 bp, Homo Sapiens
  misc_feature (494)..(494): n is a, c, g, or t
atgagtgatccaggactggaagttaagtgccaccgaaaacctacaccactgacaggccagcccaggaggttccaggggagcccttcaaccctctgctttatgtagaagatggcattcaagtccatttatttgcggagctgctaaaatattgactgatgcatgcacagtgagagggcaatcagaggagattaaatgccacagcgctagccgttatggtgcaatccctttccaagagttcctgtgcaggattttctcttctctctggtggtttcctcagacataagcttcactccaaaaaaagctcaagtatcaaactacctttacccatcaaataaaccgaagggtgggcttaaggggggcttctaggaactgcagcctcctaaaaaacccaaacagaaatgtctcagctaacactgttgaaaaagtaactagctgtgccctaaaaataacccaagtaactaccccactgctgtgtgccaataatataacaatgnatgtttaaatattaaaaacagcctgccattaataaaacacaaatgtcattgaagatgtgactactagattgcccaaaggagaacttatttgcatacacacattcccgtgcatgcacgacaggatgtgcagggagaaagccactgtaaggcattagtttttattctgtgggtgtaatagggtcttctaattttgctaattgtatcctgtggatctcgcagggaagctaagaatctcttcggggacagaaccagtttggaggagtccctactgcacagcatacggtaaacaaaataaaaatagcttgcctttcttgttagccacatcgcgcattatataaccagct

SEQ ID NO: 265657 - DNA, 844 bp, Homo Sapiens
  misc_feature (758)..(758): n is a, c, g, or t
gagcatttgcaagttctaaatataggctggaatattaataatcctcagcccctgctaaaaggcagataatctaagagagctcttgataattcataagtcgaggtggacaaaaaattataggttgatgctgtgaaggcagccaggatttatgagtacaagcctggagagaagagaggtgtgaaaaagtaagcataatactaaggtcattttcctataaaagcattttctgaagtaagctgattagagtgagaggctaggaagccaagcatacagccgttgaaaatccaaatcagagtttttaaacatcttttagtgctgagaagacaaaactggaggccatgactcactaagggagaggagcaacagagaacacttcatactctcattcgagacctttaggggctatagcactccaggaaaccaatcttaagaagactgaaacccagcatttggtcttctcatttacttgattaaagtgatttgcctccactatagcttccaaccagaggacagggcaaactctctcaggaaagctataacacaatccacatcatccctggttttttatattcagtatctggcattcaacaaaaatctaccagatatacaaaatatagcaataacacaacaaataggaacaacataaaaagatcgacaacgggaaaagactcacagatgatgcagatattgtcattagcaacacagaattaaaataagtgcttaaaatatttaggaaatagagggtaagatgggggagnttcatcaaaggaatagacttaataatcatatagaaatttgagaactgcaaaataaagtaacaaaaattaagaatttggtatatgga

SEQ ID NO: 265658 - DNA, 909 bp, Homo Sapiens
gcatatgcatgggcaattagagctacatcacctctgctgcctgtcttttaacattgattctaagctgcatactaatttcaaaaatctcaaaaccctaaaagaaatttaaaagcccctatatcttaggcttaaagaaataaactctttgtcctggctgagatgtcgttgtgaaaaagctttgtcctggttcctcagcattcgccctacacctgtctggcccaagcctcctcccctccagcctgggattactgtgatgactagtcccccaactctcagttacttgtacaaagtgggacatcatgagacctggttctagtcttataaccttgagcagcttgcttaatctctctgagccagcagacgttttgttcagcacgaaaggaggatagaaatagatgtttccttttgacacataaaggcaaaatttctaggagttctcaggcatcctcaagatggcatttggagttcattgaggccaaagtcagaagaactttgaactatattatatgcctcttggtcattattttatcagttggcaccctgttttgttttgtttttactgctgaggtatcagtaccctcacccactacttgttgtccatttaaaatctgcttaccctagaacttcacctctggctcacttgttcccaaataagccctggtactgcttctcatttttcctttctcctcagtttagaaataaaattttaacagaaaatttaaaaattggttccacactcagtattataatgatctcaaccaaccattaaagggtctgaatgacttattactatatatctgaattattgtattcttcttggtgtaattattattatagtattattatctgaatagctttttactgtaactcagaatgatggccttaattttctccaggtgaatttacttt

SEQ ID NO: 265659 - DNA, 353 bp, Homo Sapiens
  misc_feature (23)..(23): n is a, c, g, or t
  misc_feature (116)..(116): n is a, c, g, or t
aattcggcacgagcggcacgagnatattttttctctttgattaaaaaaatttcagtatcaaaatctattgtgaatatgctattaaaatttaaaacaaaaggaatttttacctctgnagtcacatactatgtaatagagttatagacagtttaatgactatttcaatctgtgtaaagtgtgcaatgatcatgcctaaaagtcacttcagaaaattagagaaacatgacaatgtagaagggacagcaaaaacactacacatttgaatataaagtagaattcataataaaatgcatctgaatacttgtataattactcaaaagcatactggaccctgttttttaccaaagcattat

SEQ ID NO: 265660 - DNA, 909 bp, Homo Sapiens
ttcatgacagtctcttgtggcaggaaagtggttagtttatagatagaagaaatctaggaccaaagagatgaaataattggaaatcattgttttgatagagtcaggggcagagtttgtgacagcatgacagcagcattccttggctgctgctctcagggggaagccctacagccttgtttccactgcagacttaactgtcctcactccacgtagatcagttcgattcctgagcccgaatgacaagttgaactaccaataatgccttgcacaatgtttgaagcgacataatcagccggagagggacttgtgtcagttaggattttgtctccttaaaaatcaagagcaagagtgggtaagagagaagttttttaacaaggaggaaaaccctagacagttgtctctaaggttcttcaccacagcttcaaggacaaccaggaaaagagctgctatttgaggcaacttcattataaaatcatttttaataagcaatcttaacaaagagagggaatactcttgtggagaaaccctccagggacccagaggctgcccagttaagttattaggaagtttcacacaagggaccaaacagctatttcattggcctcgggggacagagtttagttttcacctgttctctagaggcactggtgttatcctgtctactaacagcagagactggtaacaatcaattatcccgacgccccaacctggtgagggaaagtgaattttcagttttgtcgacacaaaaagacatggtgtaagagaaagagagataaattaactcaatatgattcattatactggagactaagaacacgcagccaatgaaaatgcctcatcaggaccttggtattctttaagtaaaacgacagaaacatattctaaggaaattaagaaatatccataatg

SEQ ID NO: 265661 - DNA, 777 bp, Homo Sapiens
tatgaggacttccttcccttcctgcataatcagctcagggacacaattcatgggagccccagggcttttccagaactcttggaagtggcatgcctatccatggggctgctgatggccacatctgctactatataggaagggccaggttgagaatgaggcccgcagagagggaagcactctcttgagagatccagcaacatcatcaaggcttttcagggacatgagacaataacgcactttttgttgaaggccatttgggctgagtgtccatcatttgtaaccaaaatggtccagactgatggttttattgcaatgtgaaggaatcccctttccacggtgttcaggaagatcttaaaactcatccccggggctgactcttgtcatttatcactgacccatgcctctccctcccagctggccgtgtcagcaccccaggctgcagatgtttcagagaacctggctgccagtccctgaggggcggcccttacctgcaatgttgttcccaggcaagcctccccacggccctcggacgcagccctctagccttaagtggggaacccaaggccccgtgctttgtgtctgcacacagccctgtgcccacatttcggatctgaaagggaaagagggaagaagtggaccactgaggtgccttaaggtgcccaccgggtccctgccaggtgaaaggggaaaccaagtgggagacattagctggattaaccttcaaatcgtcttgataaagcttgccctgggctgttggaagtactctctgtgccgaaa

SEQ ID NO: 265662 - DNA, 202 bp, Homo Sapiens
attactaatttaatctattcgctgtgttacaaatctattcagatttactgtttcttcttgggccagttttattcatctaacagtattttctaatttcccttttgatacattttctattaaagatactttcattttcaatcaaaataaaattaacaatcatattgtgttgtttaaaacattatactggaatatatcaattgtc

SEQ ID NO: 265663 - DNA, 548 bp, Homo Sapiens
  misc_feature (345)..(472): n is a, c, g, or t
tgaggcaccgcacccaacctaacagaggaaacacttcaaatgcacatcctcacatttctagtctacgtagctggaaaaaaaggacattcttaatatgctaatgtggaggtcacctagttaccctaaggggagaaaagcaaggcaaggacccactgtcacagcaagttcccccttggaagcccacgggcgcagctgcccacaaatgcacataatctctgcagaaatacaaaagccctaatgctggctgcactggggacacaggtaggaggaaattttcccctgtaagcagttttgaattctgaactatgtggacagaacaccaaattttaaaacaaatgaaagtgnnnnnnnnnnnnnnnnnnnnnnnnnnnnnnnnnnnnnnnnnnnnnnnnnnnnnnnnnnnnnnnnnnnnnnnnnnnnnnnnnnnnnnnnnnnnnnnnnnnnnnnnnnnnnnnnnnnnnnnnnnnnnnnngtgaagtggcaacagacagaaacgagcacttctgcagctatctcacaaaactagtttgccaccaaaactagttaaa

SEQ ID NO: 265664 - DNA, 500 bp, Homo Sapiens
  misc_feature (392)..(404): n is a, c, g, or t
ggtctataaaactgtgtgactctgaaaaggatgatgttacgtctgtaatggttgacactgaatgttcttcatatttattaaccaaagggaacagggtgcaaagtagcatgttcagtgtgatctcatttttgtaaaacaatttgcatgcatgtgcatgcttaaagtgtgcaagcaagccttgtagaggaagaaatctggaagggcacacattaaaacattgacaatgggccgggcgtgagcaccgacgccaggccgacatggtgattcttaattgctatgtcattctttttttctgaacatattaaaagagaaataacaaagtgggggaagtacttgcagacatttaagaagaataagtatctataatatctggaagttttttaaatcagtgnnnnnnnnnnnnngacaaaatagcctgatagcaaaaatggacgaaggtcaagagcaggcggtttacaaaggaagaaatgcaaatgctcaataaaattgggactttactt

SEQ ID NO: 265665 - DNA, 582 bp, Homo Sapiens
ccaacactattactaaaaataaaaagaccacacactgagcgtctctcagtatcctcagaaccatttgaacaggcagttttcattccattcaaagccttcagaaaattagcctttctccatagaagaccacagaatgctgaggccaaaagagatatgtaggcatctaatctctggctcggaaatatattcttcttattattttaaattttagctgcaaagcctccttcctgatacaaatggtgacaccttggatgaaggacagaggacagaaatgggatggggtatcctgtagtctcagcccccattcagatagaacacagagtcaccaaagtgtctgtatctgtggatgaggacaatgaaacacattctacaaccattttcgtgttcctagtaggggtgtgtcaggagttgatcgagtccactaggggtggacatgggtcactggggaacaagtccactctacgatgcaaaataggttcaggggcattcagaatgccaacaacttaatactttgaaatgatgaagttcatggccaaatccattgcccccatgcaggttgacaactcatcctggtttgtccag

SEQ ID NO: 265666 - DNA, 711 bp, Homo Sapiens
cttataggcttgttgcaagaattaaacgaaaggtataggtaaggttccgagctagcaggaagtagtaggtaccaaccaatagcagtgtccgttttcttcttctcatctgtctcctctcaacctctcccttcccttccctcttccccgctgccccctactgacagagtggtggtagagataaaagtatctaaaatccaaggccgagtgtggtcagttcctttagaatgtcgttttctggttcttccaccagaggctgggacaaacctgacagcagtgtagggtccctgtgaccctttgttgttacctaagctggccaaagaggatggccaggaggcaaatggcagcttggagcccaagagaggtacctatggtgtagaataaggtttgggtacaaggggtaagggagaagctattttaagaagaagtcaagaactcaggtctcatggaagttggaacaagtcagaaatgaagttggaggtcagctgaacagaagcggttggggatccaggatgcagggggatataagtgaccatttcttgaggggtccaaggctgggtcagaggctcagctgtgctgcaccagctggatggcttctgctaaaaagctcagaggagagctgcagcctggtgcatctccagattgtgcattgcctcttatggacttctggctccctggcctcccactgcaggatttttccaaaagcagtacatc

SEQ ID NO: 265667 - DNA, 621 bp, Homo Sapiens
taaggagtaaaatgctgttgctacaagtaaaaaaatgtaatgataaaatggtcagtttaccacagctggattttgcggtaataaaaaagagaggttacactcctagaattttgagttaagattacaaaaaggaccatagcttgatattctgaatgaaaatttagtagcagctgcaagaagggaagagaccatgtggatcaggttattaaaaaaacatactgaaagtaatcaagactcctatacccttggtttagttgagagaaccttgcctagttggagagcaaggactgaactcggctgctcccactgtcttcagcctaaagggaaccatgtcacaccacgttacacacacgatggaataaaaggtcaggtttgttcatggctaatgacggctaaatgacacctccgtttctagcatttgtataaactgttagcacaatccattaagagtgaacaaaagcaaacataccccagctcattagactaccatcttatacatttaagtctacaagaaaagttttaaacatgtttttactgtgcaagttaagcagcatcaaaataacaataaagtggcttaagtgatataacacctttttaagaaattatcttaattaagcggcc

SEQ ID NO: 265668 - DNA, 471 bp, Homo Sapiens
  misc_feature (265)..(265): n is a, c, g, or t
gaagatccgggatgagagcctctgcccccaacaccatgaggccctcagccttttctgttatgaggaccaggaggctgtatgcttgatatgtgcaatttcccacacccaccgggcccacaccgttgtgccactggacgatgctacacaggagtacaaggtggggaagcagacacacgatgtcagtgtgggtaaaaagggagaagcggcagaggatgagatactcccctaggtagagatcgtaagctccctactactcactttgtantcctcagagctgcatatgcaggggcacacagtatgtgtgatcagttgtcctatagcctgaaaaagagcaatggtgagaagtgccctaaaatttctctctgacttttgcaatacatgtgagtcttatgggtgaatattggtatgtgtggtcatatttttcataaatgaatgaaaccacatggaaaagattaaacttaggaagaactt

SEQ ID NO: 265669 - DNA, 679 bp, Homo Sapiens
  misc_feature (30)..(30): n is a, c, g, or t
  misc_feature (500)..(500): n is a, c, g, or t
agaagctgaaggctgtccttcagccccagnaagagacaccagtggataaaaagccagaggtgcatgaaaaggccaagagaaagtccacccgtcctcattatgaggaagagggagaagacgatgacctccagggtgtgggcgaggaattatcttccagccccccaagcagctgtgtcagcttggagacccttgggagtcacagcgaagaaggcctggatttcaagccctccccacccctctcaaaggtttccgttcattccccacgacctcttctatttcccacactatgaggttcccctggctgcagttttggaggcttatgtagaagacccggaggatctaaaaaatgaagaaatggatctcgaagagccagagggctatatgccagacctggactccagggaggaggaggccgatggctctcagagcagctccagttcctcggtgccaggagagagcctccccagtgccagcgaccaggtgctgtatctcagcagggngtggtgtgggtaccacaccagcctcagaacccgctccactggccccccatgaggaccaccagcaaagggagaccaaagagaatgaccccatggacagccatcagtcccaggaatccccaaacctggaaaacatagcaaaccccctagaagaaaatgtaacgaaagaatcaatcagtagt

SEQ ID NO: 265670 - DNA, 416 bp, Homo Sapiens
  misc_feature (33)..(33): n is a, c, g, or t
  misc_feature (59)..(59): n is a, c, g, or t
aaaactggtgaaatgtgccgaggtctctccagnaggtggtaggcggttgcgccagcttncacatcctggataggcaggaacgtttccctatcatactcctgtcccgggtctcatgtgtctcagttcaaacagacactgccgtctatcttcaagctgcaatgaagctgagagccacagaaaacacctgtaccatggttttcaggggagggagtctcttccctcagccgaaaacagacagctttgctggtcatctgtttctccactgcgaggacgctgccactcagtgtggagagaggaaggggttctgcctatggtgcaagaaggtcggactcggcagttgcccctggtgaccagtcatctccattatgtagctatggctcccagttaatactcttggataatgtatttaaggatgc

SEQ ID NO: 265671 - DNA, 670 bp, Homo Sapiens
  misc_feature (94)..(121): n is a, c, g, or t
  misc_feature (198)..(258): n is a, c, g, or t
agccttccctctctcaaggctgggaaaggaaagttcatcttcactcagatgcaagcttcaagtaggcagagcagctgtctcttattcacccctnnnnnnnnnnnnnnnnnnnnnnnnnnnnttccagcacagcacgtggctcatgggctgagcctccagaagtattgttagtggatgagagaatggatcttcatatgnnnnnnnnnnnnnnnnnnnnnnnnnnnnnnnnnnnnnnnnnnnnnnnnnnnnnnnnnnnnncactttcaggtccaaactggcaagcctcagcataggtcactgttgctttgcaaactggcaaccctcagcataggtcacacagagggacaactgaacgttgtaggaccaagctctgcctccttctctctcccccgacccacctgccactccttggagctcctggctgaggcggagcttcacccagcctgagctgagcatgggcatccagaggcactccagtcggggtctgtttcacagaagcaggcccttcgtgaatatgcatgaggggcatgagctggcttccacgcatgcttcctgctcacctcatcctaaatcctaaacccgcaaggccattgcccccttgacttgagcactagggtaaaatctatttttgtaaaaacctgatggaacttttacttaaaataagagtttt

SEQ ID NO: 265672 - DNA, 733 bp, Homo Sapiens
  misc_feature (296)..(325): n is a, c, g, or t
  misc_feature (343)..(367): n is a, c, g, or t
atattttaatatgacacaatcgtgtttagaacagaaaggatggtaactggaaatcacactgccttaaacatacactcatatcccagaattccataggcactcagtaaatgtttcccgaatttaaatgaattcaatcatttagaaaatgcattgatgctttgctacgaaaaagaatcaaaagaataagtgactcgaattggcttttttcttttcctggaagtacatgacgagaaagaaaacaataggatcacttgagcccagggagacccgaggccgcagtgagcagtgattgtgcnnnnnnnnnnnnnnnnnnnnnnnnnnnnnnaagtgagaccttgtctcnnnnnnnnnnnnnnnnnnnnnnnnnaatacaatgatcacaactacaaccagcattactgctttgatttgtgctaaggtgccagccgtttaactcactattacttctgtaccatttgtgcatatgtcaactcaatgaaaaagacatttaacatcttggcattattatgaaaatcattttaatttcattaaacccttgaataggtttttaggatacccaggcatcctctagagaccacgttctgagaactgctacaattctacgtctagttacaaacttcatgcatatttacaccaagagacacattacaagaatattcattgcgcctcagcttccaatgacaaaaactgcaaacaacccaaactatcaggaaaataggtaaatacttttgtg

SEQ ID NO: 265673 - DNA, 501 bp, Homo Sapiens
tcaatcatcattgcaaaaatcattcacatgcataaaccccagataggcaccttcttatgtcccagcaactaaggctcttctgtagtggccactcctctcttccatcatcttacttccctaaaggaatggttttagtagcacatcacttcagtagcaaattggcagggcacaaaactgacatcacattgaatgtaggttttcatgtaatcatatgagattgggaaaggctgttgcaccagccatctcccattcttttccttcagcagctgctctacattccctgcctctgcttcctgggcctgcctgagaggttttggaatgacttgaagcagccaaaattccgagtcccttggctatatgattatgatgacaaaggggagagattaagatatccaagctataggcagagaaaatgatcggagtcctgacatctacaagtcttggggttaaaaagataaggggaaaaaaaatgatgataccagacacaatctctctcttatc

SEQ ID NO: 265674 - DNA, 972 bp, Homo Sapiens
cctgacctggagtgtgcccaggttggccttcctgtatttatttgtggaccacccgctccccccattgccctgtgctgcactgagcacctgaagacagcagaagattccttggcacagttaagccaggccaaccctcagtcctgggtcacagtggagactgggacatggccctctcctccaaagctcaggggccgatgggatgcagacggaatataggctttgaatgtaggcaggatgaggaccaccgtgatagaggagggaccaggtgctccgggagcacagaggaacgcacactggaccgtggctgggggaatccaggaagccttcctgggagaggaggtgaccaaaacaagagccctagaactcatatgagttagcctgtcaagaaaatgctgggattacaggcgtgagccaccacgtccggcccctcttctcttaatttaaatgttttcttcagcaaacagtatcctaggagcattgctcatatgggccggaatgtcctggctgcccatcgaggctgtctgtagataccctttgcctgcttcagtgccaagtgaacatcgcagagatctgccttgtgtctccctgcacccctggctgcaggggagctcctgctgcctcctctggagctggtgggggccctcactgccatccttggatcccttcctgccgtcagcctgctgtcctcagtgcacctgggaggaagggggtgcgctgtggttgtgttgagccttcataggtgtcctctggtgggcttagaatgggggttcttaatcccccccagtatgtggatagaattcaggggtctgtgaacatggatgaggaaaaaattaacattattatttattactaatgtagctaaaatatgtagtgtgacctttgattataaatgtagacaataaacctcacagcattagaaaggccttgtgactacccacataacaaacaagcacatgtagtccctgaacccaa

SEQ ID NO: 265675 - DNA, 626 bp, Homo Sapiens
  misc_feature (429)..(429): n is a, c, g, or t
agcagttgtggtagatccacaaaacgtataaagaaaaatacacgtttcctgaaacaaaacacttggaaaaataagctgctaagaactggcgaattagaagtttgcagacagggaactgaagtgtcatctcttggttcaccctggagactgatgtgagtggatctgatgcaatgctgctggaagatttacctgcacaggttgctcctctaaggcaacgcgcagtgcacgattgacgtatgcaccagagctaggctgggcctcagctcgctccatcttttgccctttttgatctctttagatagataaaataccaagttctcagagtgctaaacaacaaattatatatacctaaaggtgagatgatcaggtttaaacttcctgtaaaagaggcgagaaggcgcctttgcacacccttttccagatagggcntggcagcatgttattcagaactgaattcagtctctgccagagaattcccagtgggaacctgggagcaggtatgttgatgaaggggatacctggggacctttggcactcacaatgagttttggtttgtatctcactgttgttagcatgccaatgaacaattgcacctacaatttgatttagtttagatagaggcgaac

SEQ ID NO: 265676 - DNA, 556 bp, Homo Sapiens
  misc_feature (527)..(527): n is a, c, g, or t
gtatgagccactgtgcccatcctcatgtcaatttttaaagtgataaatcctgatattatacattgcaattagtgtagaataaacgcttggcttatagaactctctgttcttagtctaaagctgttcccaaaccaggtcatcctcacgaaacattcttgaccaagaaaaaagataaggtcattgagataggaagacagaggaaaagcctcttgctgttgtttcttcccaagaaaggagaagccctgccagggagaagtcagtagtattgctgactcactgtatcactgagtgtagggtgtggtagcaaggaggaggcaggggattcacgctgacaggtggctctggcctggctcttggggggccttctgaagaccagtctgcagtttgaggaagggccccaacaattcatttggagagcttggccaaatactttctcattaaatcagcacctaaacttgatgaacttaaagtttgtttattagagttgaaaacatttaaaagatgactgatactaatggggagaaaantacttaaagaccccaaattttaaaatttt

SEQ ID NO: 265677 - DNA, 617 bp, Homo Sapiens
ttatgagcaaagccgtaagtgtggcttccttattttaaagatgcgtaaacagatccagagaagtgatgtgacttacaaagatttctatcaagttggattcttgcctgagaaaatcagtcttcacaaattctggccccctaagggttctaaacagttttatagctctctgaattattagctttaaaatcaattgaaaatgtagtatattattagtggggaaacatttagatgctgtgggcaatgcttgcactacgttttattctttcagaataagagcagcagcactgggcctaacttcaatttattactggtaaatgagttaatgactaagagcagttgttgaggcctttcttcatgcctgggtccacacatcccagcagtgagcacccaccggtcagctccaagctgggaatgcctgcaggttttctgggctttcagcttagggtggccagatttagcaactaaaaatacaagatgcctcattaaatttgaatttcaagtaaataacaaataatgttttgtataaatatgtctggtgcaatatttgcaaccctattttagctttggtttatatgatcagagcttatattttaattttcataatttgatgaatagtt

SEQ ID NO: 265678 - DNA, 574 bp, Homo Sapiens
ggccgcttaattaaaaatgatttatacctaaatatttattttgagacttctgatgagtgaactggctgacataagaacggagaaatttgccagttagcaattttggccaattgcattaaaagttaccaacttcacagaatccaaataaaagataccttttattttcttcattgttttagtgaatttttccacacaagggtagttcaaagtgccgcatgctcacactagatacattttttactccacaaacctctgagaggtcagaaggaactcctggcttgcctgagtggctgtgttgccaggacgtcaactgaggtaggcagcagccagcctgaggggctgctgccaggtcaggagtgtgcacgaacctcagttatcctttgctcacttgaaaatcttctattggggtatcaaatcaacacaagaaaatgaggccagaaggaatcttttatcaaagtttaattcatgaccagtttttctggacttgccttggtcttcagccatggagggggtgtttgtaataaaaatcactctgagataagactgtataaaggcttaggctgtaatcacaggg

SEQ ID NO: 265679 - DNA, 1406 bp, Homo Sapiens
  misc_feature (443)..(443): n is a, c, g, or t
tgatgatgcatgtaaaaaagcccagcaaacaggagcgttttacctctttcatagtctggctcctctgcttcagacttcagcacatcaatacctggccccccggcacagcctgttagagttggaaaggctcctgggtaaatttggacaggatgcacaaagaatagaagattctgtgctgattggatgctctgagcagcaggaagcatggtttgctctggatctaggtctggatagctccttttccataagtgcctccttacacaaacctgaaatggagacagagctcaaggggtctttcattgagctgagaaaggcactctttcaacttcaatgcaagggatgcctccttgctgtccacggctcaagctcttctccgctgggcatgatgctcattcagttcttgcaggcagaagtggggcagcccaccaagaaggaacgtggcntggcagcaagcgtgtgtgcccttccaataatataatctattatccacaggtgaaagtgtggaagagaccatccgccgagaagttgcagaagaggtgggattggaggtggaaagcctgcagtactatgcatcccagcattggcccttccctagtggctcactcatgattgcttgccatgcaactgtgaaaccagggcagacagaaatccaggtgaacttgagagaattagagacagctgcctggttcagtcatgatgaggtagccacagccctgaagagaaagggcccctatactcagcaacagaatgggactttcccattctggctgccccctaagttagccatctcccaccaactgattaaggagtgggtggaaaaacagacctgttcttccctgcctgcttagcccggatcaagtcacttagatcgctccttggtattcctgagggacaaactagagatcagttgacaaaggagaagtgacaaaagataagctgcagaaggacctcagaagggcagagcaaagggtgagcctacagtaagacacttctatcagcagtgttaatggaagaaattcctaccaattgggcaaatcaaaaaagccagtgtgagaagaaaactgatgagctgtcaactgtcaaaaatcagggggaagggggaagcattagtttggatgtaggcccttgttcagtcattttctctaaggccttggaagcaaacatcttctggcatatggcttgttaatgttgtgtttacactaactgccaaaatgtgcctgttgtaagtttggttaaaacttttatcttagtattgaaaatatatagcaagttttaagtcattactgagttacttgttacccttacagaattaagaaaaatagcacagtatgacattttaaaattcatgtacaggtgcattctagttacatgaacatgctagttaaataaaagtcacaaattaagtc

SEQ ID NO: 265680 - DNA, 684 bp, Homo Sapiens
ctctactgtgccgggaaaggagggcctcaaaggcccatagaaggacctatgcttgaaatttaacaaaacctacccagatggcccaagaaggggactagatcaagggtagagggcggaatagcattgttgttccagcgtgtagactctggagcaagaggagttgggttcaaatcctgagtttcccacttacttgggcatattactttatctctttacacctatttctttatttataaatgagagataaaattcattggggttgttgatgtgaggaggaaaacagtgaaaacatgtaaagtgctcaggaaagtaaaataagtaaaatatttgctattagcattgaaactgtactcatccatgcctggtaaactgaagcaaattaactgttagtttgaaccatataaaatgtttatgtttgtaggtcaaaatactctgaatatcaacaacgctatggttcaaatgaacatcaaagaaagggctgtgaaaacaagttgctaagaatgtccatgaggcccaaaacctaaaaagtaatgtactcacacagtggttctaaaatataactgaaggaaaaggatttctgcaccaggctgaaaacaaataacatttcaaataataaagcacacaattctgtaggacggacctctcaggcaaccaatatttcacactggattgattttgaaaggt

SEQ ID NO: 265681 - DNA, 504 bp, Homo Sapiens
  misc_feature (297)..(305): n is a, c, g, or t
tttaactgtattccttctccatttctgaactcagcgtctaaggtgatcctgactgtgcctctggtgaacgcaggaaggactggaaaactggggttgggtggggagttgagcaggggccttgctaagtgtgtggagctggagaccacctatagtttctggctggattttataaaacacaacaccttaatatgttctgccaggtgtagtgaaaatgtgcctgatgaacttgaattcttacttgcttccaaaagctctatatgaaggggagcccaaattaggagatgaaaacgcaggagnnnnnnnnnctaataataaatttcaactgctgagttgtgtgggtccaacaaagagtaacagaattatacatccttcaaagccacgctggttttgttgatttccatgtgaaccaactggcctaagctgacctccatttcccttccaacgcagtccagctgtggctttcaaccacggctcacacatcaaaatcacctgtggaacttcaaa

SEQ ID NO: 265682 - DNA, 988 bp, Homo Sapiens
  misc_feature (32)..(32): n is a, c, g, or t
  misc_feature (42)..(42): n is a, c, g, or t
  misc_feature (361)..(494): n is a, c, g, or t
aattcggcacgagcggcacgagcggcacgagncggcacgagnaaagccagtagataagattaaacggaatcatacaaatactccattaattctaagaaaggagaaaaggagaaataatggcatgaacaaggaacaaagggggcatgtagaaaacctattaaaatggtagagttaatcccaactatatcaacagttaccactccatttaatgtcagactggattaaaaaagcaggatttatctatatgatattttcaagagagaaactttaaagacactggttaaaagtaaaaggatgggaaaatgagatactatgcaaaacactaaacatagcaaaaactggtgtatctgtataagtatcnnnnnnnnnnnnnnnnnnnnnnnnnnnnnnnnnnnnnnnnnnnnnnnnnnnnnnnnnnnnnnnnnnnnnnnnnnnnnnnnnnnnnnnnnnnnnnnnnnnnnnnnnnnnnnnnnnnnnnnnnnnnnnnnnnnnnntgcagcaacaaaaattgactaaaaagagaaatagccaagtccacaaattcatccgtcagggtctcatgaagcaagtagcttctgccttcaccacctccccgcccccccaaaaaatcaggaaggctatagaagatttaaacagcatatccaaatcaacttgaccccagttggcctttcctaaacactaccccaacaattgtataacacagagtcttttcccaggtgcatgtgaaatgtttatcaagatagaacatatatagggaagtcttaataaatttaaaataattggaatcatacagggtgtatattctacacccatgaattaaattagtaattgataacatacagaaaatctccaattatttggcaattaagcaatgcacttacatggacttaatctatgatactagaaaccagaagcagtgtttgcctcagagtaagtaagatgtggcgattgtttggaaagggagatatggaaactttctggattaatg

SEQ ID NO: 265683 - DNA, 844 bp, Homo Sapiens
  misc_feature (353)..(393): n is a, c, g, or t
  misc_feature (776)..(776): n is a, c, g, or t
  misc_feature (834)..(834): n is a, c, g, or t
agatgatggggagatatgtaaggagttaccatttggccagactctgaataaaacacaagagccatgtgcgggaagtggagcataaccaaactgcagcaatagttctgtttgtaaagtccttttatcaccttaattgaatgggactgtcctgtggcctcagggctacctaggatgcaaataaaatcacccactattggctttgtggtatcctgagataccacagcacaagaaaggggcttgagatccgcagagatcattctccgctatccaagctctgaaacccttcagtctgaaggctgaaaaacactgattcattgtagttcaagtctcacctgatagcaccactcttgagnnnnnnnnnnnnnnnnnnnnnnnnnnnnnnnnnnnnnnnnncccaacttgcaaggttattatgacaaccataaagagtatgtatcaggtgcctgacacgtactaagtgtttaataaacagtaaccagtattactccccatgagggttagcttattaacatctcatttctaagatgttagaaatgatcctcagattccttagaacctaaggtagacagtttcagccttatgatattactaagatacataataacaatttagagttcccatacataaaagattgttctacccattgcctaccctcaccctccaacttagctcattactccctccagagaatagtagttggggaggtagggatgagagtgggataggccctggaaaaggcagttttaggggtgttcagtgttaaaatgtggcacagntacatattgtgtgaagttcagcttgcacgacagccaaattatttttgtggcatttttntggcttccat

SEQ ID NO: 265684 - DNA, 686 bp, Homo Sapiens
tgagctgggactgagaagaaaatagcaattgcaactcaaagcaactatttacacacattcaatgctgaagtattgcttcctgccctaagttcctaagaggtattgccaccctgaagcacgacccatgccgtcagcagccctcgtgccagctgcttagaaactcgtgtctccagcacgatgtgctcgctgccaacagacaagagatgcaccgcgtttccgcttgcagagattctgtggttctgcactgaggtatgcatcggagccaggggacggggaggacccgaggggcttagtggcccagagagaacgtctgcactggctgtttaggaaggcctcagggtgtttgaaagacaacgttaagctcctgggtgagtctgcacggggctgaaccagactcccctttgcagctccttggtttcccggggtgaggaatcacaaacacctttgtggttggggaaggaaatgggcttgatggggaagaagtgtgtgcggagaactttgcggagcatgttctgagcgagacagcaaggtcgtgagcaaacgcccagcccctcaaagctacacagcctggaggggaaaggggaggggaggacattcaaatatacaccttaatactgatgcagaaagagcttcatgtgaccacaatccccacgaacaaggaaagcatcaggtagtgttttttaagg

SEQ ID NO: 265685 - DNA, 998 bp, Homo Sapiens
  misc_feature (358)..(358): n is a, c, g, or t
  misc_feature (400)..(436): n is a, c, g, or t
aataaactaaccacaaaagactgagttgcaagagtctcccaggctcacattaaaccaggggttttactccacatccttcccccagacactgttcccaacctgtcatcgcagctaatctgtaggttctctttctttgggttatttttttaagtaatcaccactttcttctagtgatgctttaccaatatgatttacatttgttaacttctccccctaacatatcagatatgtaaagacaaagaacaaaaggtttaatatattacagagaaacagttaatgataatgtaatattttttaaaatggctttttgttgtttgtttggaaggcagggcaggctgccgttggctaaatggatttnaataatattgtaatttctgtatttccttggggggaaaaggcnnnnnnnnnnnnnnnnnnnnnnnnnnnnnnnnnnnnncttgaaaataatagacatttgtagaatatggagactaactcataggagttgctttactctgtcaggtgacttaagtcactgggattcactaattttctctgagagaacagctgattgagaatttccattgtaaatagctcagtgttgtatagtgaggcttacgatgttttgtagtcttggcgtaaggacacagcccaagtaactgacgtttcccctccccgtcccctctgaggaacctgcctgcctcacaactcaccctcacttcactgaatgaggaggctgagcagctgcagtgtttctgtccggaggaaatggatcttaggccactggacaagaacctgcacccaagggccctgaacccattttcctcccctgtcccagccttcccactttgacagacacttttaactgtgttccttactgctgccacaatcagcatggttgtatagtgccccattaggccatttacatacccagagttatactcaagcagaatgcacaaatggacatgtcataatttttgttacaataaatatgaaatttacaagtatttacaagtaaa

SEQ ID NO: 265686 - DNA, 760 bp, Homo Sapiens
  misc_feature (301)..(301): n is a, c, g, or t
ctattattcccatctttaataaattgagatgtagtgtgatcaatttagtgagcattggcagcattttgtaaatggaacagacaaaaaaccctacttaagttagattgatgatcacaataactttgtagtgaataagtgatggaaagaaatgaaactactgatagaagtaaatgaaacaaggattatatgaaactttggcttcatctctgttaaaataccttcttttttcccaatattgcagtctaccatttcaatattataaaaatatttattctggcttttcataggattccacactgtncatccataaagacaaaatagacttaaatcatgattagggtgataaaatgaggagaaaattttacctggatgaatttcatgcatcaaacccattgcagagaattacttaagaccctgttggggatggctgttcggttaaagagtttatttacatttgccctgatagtctttgagcaaaagatgaaaatagctaagtaaggatgatgtgttttactttataggatacacagataagtatgggaatctacttatatgtgaatcatggcaaatatttaaaatgagccataggaatcaagtatccactggggcaagcagacattttagggtattgagtgctgaaagtagtgaacacatcagagctataagataagcatcatagcagtggggagcgggtaccattctgaactcaggacagttggaaatattctctccccatccttgggctataaaatccacacgt

SEQ ID NO: 265687 - DNA, 345 bp, Homo Sapiens
aatataaacaaagattcatctcccagctctgccactttgtgaaggttaaggtgtcacttagcctctccaagtcacagtaaaatggaacaatggcacctgcccttcacagagctgctgtgaaggtaatagatcatttgctgctaggaccctggcacatgcagccttgcccaaatggtggctgttattacttggaagtttcccaggccaaggaaggctggcatccacagcccttcacccaaagcccacccaggaacacacttgtagttagtctagtttggtttcttgctctttgcagcgagggaactcacatcaggggaacctcgggttgcctcagtaggaagaaag

SEQ ID NO: 265688 - DNA, 425 bp, Homo Sapiens
  misc_feature (183)..(232): n is a, c, g, or t
ctggcaatagtcaaataacagctgcctttaagcttactttggtttatgggctccttgtttgccacttctgccctatactcacatgcagggattccttaaaaggatgatttttatttgcaagaataattttctctatttgccatatgtcacattttcaagttaggcctcttcatagaacaagtnnnnnnnnnnnnnnnnnnnnnnnnnnnnnnnnnnnnnnnnnnnnnnnnnnctaagtgtgaacatgttggtaagcattaaccagtggggggcctgcaatctacaagaacattatactaagacctaaatgttcttgaggagcaaaatcttagaaggttttacttttattctcaatataatgattgaggagacgttctgagtcaccacaaaaggaaatcagcccaaaagccttgttatacatatgg

SEQ ID NO: 265689 - DNA, 669 bp, Homo Sapiens
  misc_feature (514)..(514): n is a, c, g, or t
  misc_feature (626)..(626): n is a, c, g, or t
  misc_feature (656)..(656): n is a, c, g, or t
gagagagtgagtagtaggcggcccacgcggcgttgggggtccgcggccgctgcagctgctttgcttgggtcatgaggagcaggcggctgccactgggggtaggtattgccccagccctggggtgggtactggtgaggagggggccccccggcatgtgggggagccccgggtggcccctggttgaagggcccaggattgaagggccccattgggccagcagggcctgggccacctgggcctggtcaactgggcagagaggaccctcgatcttttcctcgataagctgcttggcgtggtcaaatctgccggggtgaaaccccggatgatgaacaacttgaagttggggtccccgttgggtggcagctgccgggagatctctacgaaggctcccgtctgctggtttatggctttcacattctcgccacctcggccgatgaccagcccacacttgtgagtggggatggagaaggtcatctccccgccaggggaaccccaattgccttggcctcttccntcggcactccgccccacgggggcatgcctggaccccctggaggacctgggggaccactcctgaggctctggaggaggtcgttgatgatccgggctgcgtgctcgcacctgtnctgggggccccattatatgagcaatcttcntgggccctgtccc

SEQ ID NO: 265690 - DNA, 655 bp, Homo Sapiens
ctataccatctaggtttgtgtaagcacactatgatgtttgcatgacaaaatcgcctaatgacacatttctcagaatgtagttggaggaaaaaaattgaaaggagagtattacttcatgacacaggaaaatcatttgaaatacaaattccagtgtccataaataaagttcactagaatgtggccatgctcattcatttacatgtaatctgtggtagtttttgtgctactgtggcagaattgaatacttgcagtggaacttgaatgggctacaaggtgtatttagtacctggcccttcacagaaaaagtttgctgacctgattgaatgtgcttgtgtgtatcacaggaagctcaccaggactcttggtatgtagcctctagctcccaaaggcatctgagccccactggcagggactcagttaccctgtctctgtcctaagcatgactcccaccccattagcgtcccagacaacgaagaaaacttctattttaaagagcttgactaaccccctccttattatctaagttagagtagctgtgccaccccttaagtagcttttccttcttcctttcaaataggggttggaagagtagcaggtgagaacaacctctttcttcctcaattgtagagactcaatagtctaggctatatattaa

SEQ ID NO: 265691 - DNA, 373 bp, Homo Sapiens
  misc_feature (302)..(302): n is a, c, g, or t
  misc_feature (351)..(351): n is a, c, g, or t
ggctataccatctaggtttgtgtaagcacactatgatgtttgcatgacaaaatcgcctaatgacacatttctcagaatgtagttggaggaaaaaaattgaaaggagagtattacttcatgacacaggaaaatcatttgaaatacaaattccagtgtccataaataaagttcactaggaatgtgggccatgctcattcatttacatgtaatctgtgggtagtttttgtgctactgtgggcaggaattggaatacttgcagtggggaacttggaagggggctacaagggtgtatttagttaccnggggccctttcacaggaaaaagtttggctggacctgattggaatgtggntgtgttgtattcacagggaagg

SEQ ID NO: 265692 - DNA, 780 bp, Homo Sapiens
gtttactgtgtcattgttgctgtcattgctactgaggagtactgaccagaatcatctgcaactcttagttggcagagaggaccactatggcgggtagctcttttctttcctgccattgtggggatgattccaggccaaagatgatggagaagtatggaaatcatctgaaaggttgaagcttggcacgtgaagccattcatgactttgtaaggcagttttgctgaaggccagttctgccctgggagggacggaggtgaatcctcctgagtacctgtggttttcttacttcctgctgaatttacctaagtgcctgttgttttgcttgctgtggaggctttctggtatttcatttcaggtgcagatgccttcactttcccacaaaaaaaaccccaacaaaacctaagaccttactgcaactaagtctccaagtactttttaacccaatgggatgaacagcctgtggtctgctcagatcaccctgagtgcgtgtgagaaggcctgggctttgccaggaaatccaggaaggcagggccgggctgtgttggaagctggcttagctggtggggcagccttatttcaattaaaagggcattgactgggagcagcagtcctggagtttgttgcatttcctattgccctcaaaatgagaaaccaggaaaatagcagattggagccttcgagaaggcagtaaatggctgtttttattgacaaaaggaaaacattttactgccatctcactgatggcatctcactgacttaaaatgaaggcaggttgtagta

SEQ ID NO: 265693 - DNA, 838 bp, Homo Sapiens
  misc_feature (722)..(791): n is a, c, g, or t
acacctgtgaaactcatctgacctttactatgaattcctggatctcctggtgcatatcatttctgttgccctggctgacatttccaccttttctcttttctagattttattacaagaactcaatctgttggtctctaggaatcacctattgccttgctatgttttgttgaacctgtttttgaatctgctttctacattggggaaataggtatacgtttgtaaaccttaaaagctctgtatgctataaggaaatcaccagacacgtggataagctttgcagaggtgaagggctgtctccaccagagagacccagaaggagtcaggttaagcctgactcatcatgagatcaggtatccccaatccacagcggacttccacagttcaccttcctaggtaaccgctctgccttcccaggtaaagtaggaataatatcagaacttacagcatattttgaggtcaaattgtagaatttggtgatttcatttttattattactcaaccttttatttacaacccaaattaataaggctaccttacacataacaatgtgtggacatacacattaagagaatcatttgctgcctagcactcctacctaggtactttaagaacatcattgagtggatactccctctgctgggtaaaatactttgccacaatatcagctgaaatgatacctcttccagactgtaatggcagaagtagttatcccctctttcgtnnnnnnnnnnnnnnnnnnnnnnnnnnnnnnnnnnnnnnnnnnnnnnnnnnnnnnnnnnnnnnnnnnnnnncttctactgtgaaagggtgagcccataaaaaacagggaatgtgtctt

SEQ ID NO: 265694 - DNA, 971 bp, Homo Sapiens
  misc_feature (812)..(853): n is a, c, g, or t
taactcagaatatcctcgtattcacaggcaggtcttgccagacttactgtagaagaaactaatcaacatccctgggaagatgagaaaatgagtgctgaagatgaccttccttagccttcctcttccagaaggactaagaagcatgcgagctacatctctcttttccttcctgttccctgggctgccttgcaatacctggtggggcacatacctgccttccatggcagacctttggcaggatagtagtggcagatagaagagagaaagtggaaaaaaaattcccctgtaccctgctagtattccccattaagaaactgccttggcagcaaccaaggacaaatataaatgagtttgtgagtgttagaaaagcaagcctttctgcctggcacataccattacataagccagaaccacacagaaactttatgctattttacccttaaactttgccagtggtagtagcaacagcatctggtggcaccataacattaacatcttccctttaaaacaagattagaattcctaagatttgagtaagtatagagttgagcatatgtcttcataagacagcttccatttcagcttccaaaaataaaaataggaacccacttattttaaaatcgtgctctaaaacataaaccaagtggtataatgtaatttggtgggggacttttgctgatgtttgttattgacttattttctggtattttaaaaatagaaaaaagaatacttaagaagattctccagcaggttagtaagattccatattgccaaggaaagcatgtcaaattacaggatgtcagccttaaaannnnnnnnnnnnnnnnnnnnnnnnnnnnnnnnnnnnnnnnnncttatcactgcataaaaaagaggtgtccttatacacataagctacactcaatactttcagaacagggtaactttggggacactggtaatttataggcaaggatttgttttagaatcta

SEQ ID NO: 265695 - DNA, 545 bp, Homo Sapiens
  misc_feature (203)..(203): n is a, c, g, or t
  misc_feature (488)..(488): n is a, c, g, or t
tgagccaccacgcccggccaagtcctacttctaggtgtgaaaaatgattgcaaactttaacaccactacagtaagcttttaaaaatttgacctacaataactttgaagactgaaagttattctgttaatgtaatgtactgaaagtccaacactgcagattagctcagcaataccattttaggaatattcacttaagaactaanaagcatcaaaacacatatgcaacaaaccatgaagcatcatgcatcaaatctttctactagttaaatctatcaaacagaagagtataacaagaaaatcaatgcctaatattgagataactgatccaaacattcaagagaaaatttttccgaattttaatcttacctacctggtgtcaagtatcttttcacaattatttcattctgttgctgatctcgtccacctataattagatagttctctgagctaatgaaccacagaaatttctcaaacctatcaaaatgaangaaaaaaagttaactttttctttatagctgcctgaattcataccctttttgcaaaca

SEQ ID NO: 265696 - DNA, 918 bp, Homo Sapiens
  misc_feature (345)..(345): n is a, c, g, or t
ctggaagaactgaggtttgccaatgctaccaatatccaagccaaaaaccacagcccctcctctcggtccactgtccaggtcttactgcctagggactcctgagttagttaacagagcagggaagaagactgactctgccattaattcacgagtggcctggggccaattcctctctgggcctcaactggaaaaacagagaacttgatcaaaacatctccatttccctttgggcctgggggttacaagctatgataaggatttttccatctctaacattctagaattagaatattctatactttcattcctagaagcagagtgagaacagagaacagggaccttcangtccaaggaaacagcagaggccagtcagggcttcctagctgcatcctcaaagcctgtccaccttcagaggctttctcttgcgtctgctgcctcaaaggtggttgcttccccactagcagagcctcagaggtgtgcctgggccctagccgctttagggaaatgggcaggtggcctgagtcacctactgtgtgtgagctgggctcaccatggcaacccagcagacccagagggcataaagaagccagtaccttccctgctgcacaagtgtaggcggagcatgttgcatctgctttgatttccaacttagaaaagtttttctctactttaaggactcatttccccttcccttctctcaggacacagcttactcactctggggtccttctccttgcctggaaggtattctgcagtcccacaggcaaaccccactcatcccagaattaagtaccacctcctccaaggattcatcccagaccagttagtcctctacccttcttcaagttcccaccacacaaaaggcagaagctcttaaccttcagaatctgtggcttacacactgacaatcaactgtgt

SEQ ID NO: 265697 - DNA, 665 bp, Homo Sapiens
  misc_feature (470)..(470): n is a, c, g, or t
gatacttggctttactttataaaaatacacaacttaaatacatatgacactctgtttacaagacataaactggtagatttaacattttcagttatttcaacagaaagaaaatatgtaaattaccttgtaagagcaaagagttcatttatagactctgctttcacagttaagggggaagaacgcccaggggcaatcaatgcaggaagctaaccaacactgtccagctctccagcaaaactcatcttgccaacagggcctctattgcaccgcctaatattgcactgctcgttagacaccatctcacttatccatgtcaccagtgtaagcttttgtcttctctagaaaagtttaatggaaaaaaacgatgtacaaacagtaaaactgtatcttacaattgtgctaaataccaattatgagaagtacgaacctctcttcactttgcaaagccttgccaatggaaagtggttagnctatattttgcagtctaagttcattttcaaaagttttacaaaacctttgattcagagtaagcttgatggggtacagtggcaaaggaggtgacattcccatgcctagtggaattagttgtaagacgcgcactgtcactgtcaaaggcaacaagcacatggcttacagctccacctttctaacttttggcaaaatcc

SEQ ID NO: 265698 - DNA, 993 bp, Homo Sapiens
  misc_feature (687)..(758): n is a, c, g, or t
  misc_feature (762)..(762): n is a, c, g, or t
  misc_feature (765)..(765): n is a, c, g, or t
  misc_feature (819)..(819): n is a, c, g, or t
  misc_feature (967)..(967): n is a, c, g, or t
  misc_feature (981)..(981): n is a, c, g, or t
tagctccagctaggttcatgagctggccctactgctctctcctttccccttttcctcttatcccattgcattagtctggattcttgcttacagataaccaaaaccttagtcaatctgatttaagcaaaaaccagaattgataggctcacataactgaaattccagggtagaccctaaggccgggctggatgcagggactcagtcatctcactcgggctaggtctctctcaatgcctagtccctatttcatctgagttggcttccctctcaggtgggctttttctcatggagatcctcagcagcccatggaaggagagtgtttttcccatcatcttgtacaagtccccaggttgagtctcattggcctgctggccccatgcccatccctgaacaatactgcaggaaggtggggatgggctagttacccaaaggaaagtccaggtgctgtgcccagaagggagaatggatgtggggcagagcaaaccgtagatgtctaccttacccagccagacaagactgcatgtaagaaccaggcttacgggccagcccctctctgcaggcccacactgtacactcctgaaatgccattccttagtctggccaaccctcattcacccttccaatctcagcttatatagatggctccccatgctgcctaggaactaccccacattgcactcccatctnnnnnnnnnnnnnnnnnnnnnnnnnnnnnnnnnnnnnnnnnnnnnnnnnnnnnnnnnnnnnnnnnnnnnnnntttncangtaagtgttagtgtgttagtggcatcacttccaactgatatacctccttggtantaccccttcccaagacttaggaggccatcttttggacaatggtgtatggtgggaaaggttctcagcaaggaggctctccttccatccctaggaccctggggccaagtttgtttcaacctccgggtccttaataccccaagactgttgntgatacgggatttncttcctagccca

SEQ ID NO: 265699 - DNA, 1032 bp, Homo Sapiens
catttgatgatttgccgaaatggatgaagatgattgataagtatgcttcagaagatgcagagcttctcttagttggaaataagttggactgtgaaacggacagagaaatcaccaggcagcagggggaaaagtttgcacagcagatcactgggatgcggttctgtgaagcaagtgccaaggataacttcaatgtggacgagatatttttgaaacttgtcgatgacattctgaaaaagatgcctctggatattttaaggaatgagttgtccaatagtatcctgtcgttacaaccagagcctgagataccgccagaactgcctccaccaagaccacatgtccgatgctgttgatttcctactttggagacaaagtggaaatgattcctgggaaaggggaaaaaacgttctattctggcactacaatcatttggacaattttccctttcgcactttgtaattccaagtcagagctattacactaacttgtaaatatgcatatatgcaatcctgggtaagttttggttataagttacctatttccctccaaattattatatttcattcattactccagtgtctagtgtacatacactgggaaacctagtacttctaatatgaagaatgggagaaatgaaaggtataatgtttcttgaaataaataatataattgtccttattaattatattatgaggacagaagatattctgataagagagaacgtggtgctttgcttaccgttttaaagaaaatttgtaaaactaaagactttttggaaaaaaagctatcttaagtgctttttctttatttacaagacatttcccccagtggtagcatctgaagtattggagtgtttctgccacgaagcaaagctccattcatggccgtcatggaaggttatttattaatgttacataatggtagaatattactagttagagggttggatttgacttggtcctaaggccacagaatctctctcatggcttcctaagggatgtacctttatgcttttaagaactacaaagattcaat

SEQ ID NO: 265700 - DNA, 664 bp, Homo Sapiens
  misc_feature (108)..(108): n is a, c, g, or t
  misc_feature (501)..(551): n is a, c, g, or t
ttctctgaaaagaattttagggggaaaagttgtgctattttaaaaagctttgagggctgtaaagtgccacgtttttcacaccttctccatacttttttttcagatttntttagtatgtttaacatttgtgagatgacatcctttttgtatctcaaactggatgcttcaggatttgtaggggaggggttggtggtattcacgttctcttgtgagagaaagtttgtgcctaaaggcctccttcctggggaactgtttaaaccctcgcaggcagacctgtcaggttttactgtgttatttgccaccattttcaacatgcaaaagtaacatgcagttaatggtattggaatgagaccacagcaagagcagaaacctctcgtgacaacttttcagcgacattatcttgctcctagactgtcttgtctttttcttcccctttctgaaaccacttttgagataccaataattttctcccaacaattagattaaggatacaatgcgctnnnnnnnnnnnnnnnnnnnnnnnnnnnnnnnnnnnnnnnnnnnnnnnnnnnaactttggaagtgcaatctcttccaacagcagagtgaatgatttgaaacgggggcttttccaataacccttgtggaagatttcacttataagagcaaaactaacggatatatt

SEQ ID NO: 265701 - DNA, 390 bp, Homo Sapiens
  misc_feature (54)..(54): n is a, c, g, or t
gtgccccccaggagggtttccccagggcaccccacccatcgtgctggttggcanccttgcctcccactgcggcccatcaccctcccaggatgctgggctggacccacgtgggcccaggtggtgacccagaagatggaggactggcagggtcccctggagagccccatccttgccttgccgctctacaggagcacccgccgtctgagtgaagaggagtttggggggttcaggatagggaatggggaggtcagaggacgcaaagcagcagccatgtagaatgaaccgtccagagagccaagcacggcagaggactgcaggccatcagcgtgcactgttcgtatttggagttcatgcaaaatgagtgtgttttagctgctcttgccacaaaaa

SEQ ID NO: 265702 - DNA, 677 bp, Homo Sapiens
  misc_feature (105)..(105): n is a, c, g, or t
  misc_feature (643)..(643): n is a, c, g, or t
ctggacattgacgttgtttgcaccctggcaccaaaaaccagtccgatgtctggctcggcaaggaaggacaagttggcaggcctcctgtggcatggtctctgctgnaggtggacctgcccatccttcccgatcaggctgttggtgataggtgggctgcccgaggacgcctggcagatcatctccaccctgggcctgcccctctgtcctgcaaaatgaaattggcccgcacctcaaaacactggcttggaccacagctccccaatgcatctgtaaccctggcactgtcccacatgggcacctgaggtggaggaacgcccggcaagaaataaggtgaaccaggtctggactggacttgagtgtgacgttgaggttgaaggaggccggctcgtgggtcttcaccaccttcttggccaccttgatgttcttggttccacagagggaataggtgatgggcggtggtggctggggtgcacagcaggttatgagcacccagcggcctttggggaaaacttccaggactttgtaggcaatggagaccacaggggtaatttcttcctcccgtgccttggagaaagctgctggcagccagcacggccaagcagaacagcccagggagccccatgcctcggtgggtgtagggccntctgctcgggcagtgagaacctcctagtttcctg

SEQ ID NO: 265703 - DNA, 842 bp, Homo Sapiens
  misc_feature (715)..(738): n is a, c, g, or t
gccagccaccaccgcccatcacctattccctctgtggaaccaagaacatcaaggtggccaagaaggtggtgaagacccacgagccggcctccttcaacctcaacgtcacactcaagtccagtccagacctgctcacctacttctgccgggcgtcctccacctcaggtgcccatgtggacagtgccaggctacagatgcactgggagctgtggtccagacagaggggcaggcccagggtggagatgatctgccaggcgtcctcgggcagcccacctatcaccaacagcctgatcgggaaggatgggcaggtccacctgcagcagagaccatgccacaggcagcctgccaacttctccttcctgccgagccagacatcggactggttctggtgccaggctgcaaacaacgccaatgtccagcacagcgccctcacagtggtgcccccaggtggtgaccagaagatggaggactggcagggtcccctggagagccccatccttgccttgccgctctacaggagcacccgccgtctgagtgaagaggagtttggggggttcaggatagggaatggggaggtcagaggacgcaaagcagcagccatgtagaatgaaccgtccagagagccaagcacggcagaggactgcaggccatcagcgtgcactgttcgtatttggagttcatgcaaaatgagtgtgttttagctgctcttgccacnnnnnnnnnnnnnnnnnnnnnnnngggtaactatgagagatggtggatatgttaaactcgtcgctataggaacctttgtgctatctatattatctatatgaatcccatcatatcaggttgtctacctt

SEQ ID NO: 265704 - DNA, 510 bp, Homo Sapiens
  misc_feature (15)..(15): n is a, c, g, or t
gtcaactaataatgncccttggcttgcctaacagataaaacaccctcgggaacgggattcctacaccctgggcagtgcctaggccataaactgccctggcttcccaggagctgactgcccagtagtctgcccgtgtttgccccagatgcacttattgtttctccagcaccacagccccatagcaggaccacatggaggaataggcaaagccacccttttcccaatgcccagggaagctgggatcagagagactaagagaactctcacaccaggaatatcagcagtaaccagggcagaagcaggaaacagagaacacaattctattgtcaaactcatcccataagcactagagggcataggtgatggtggttttaaattgcacaaaggaacacattcctatacttgatagagttaaaagcagagcttattaacataattctcctacattttaattttgaaaatcccatttaaagctacatctgatttatcagttattttaattaagcggcc

SEQ ID NO: 265705 - DNA, 512 bp, Homo Sapiens
  misc_feature (325)..(434): n is a, c, g, or t
ggccgcttaattaaaggagatcgtgtctgtaataggttggcacggcgcctggcaccaagtaagtgcccaggacatgagctgttctaataactgggtaaggcatggaatccaggattccgccacccacctgctctcccatccctgttctgcttattcgccatgcggccccaggcaggtactgcctctctctgggccactctgaataggacctggcccacaggaagcccattgtaaattttagctcttcttgatcacagtaactgtgagttaataataacatataagagcataataaaggatggttggccacgtgtaatggctcatnnnnnnnnnnnnnnnnnnnnnnnnnnnnnnnnnnnnnnnnnnnnnnnnnnnnnnnnnnnnnnnnnnnnnnnnnnnnnnnnnnnnnnnnnnnnnnnnnnnnnnnnnnnnnnacagtaataattagctgggcacagtggcacatatctgtagtcccagctattcaggaggcaggaggatggcttgagctc

SEQ ID NO: 265706 - DNA, 618 bp, Homo Sapiens
  misc_feature (549)..(557): n is a, c, g, or t
aaactaaattaaaatatagtctgttctaaatcattcctggttgctagtggccctaaataaattggtggaaaaatccaggctcttattttacttagttttttcaggctttttgagttctgtggacagctccattactacaaagttcatggctgacatagacatgctgaaagctgtgaatttctccctttagaattggacgatatccctaattggtggaacagtttttcatgttgcaacagtttgggtttgtaattgaaattcattcgttcttctgaagaagttgactgttggattccctagatctaggtagcagcactttccaaatgggccaagaacaaagattttattccttttagaaggcttcatgaatataaagattatgtggcatatatccggcggtgtttatccttggaccggtaattgggaattgatattttgacggcctccattagttcattgttaatggtatacttttcattcttttaggttatttgatgttgttccagttatcgtgctgaataatgttttctgaacaatgttctgaataannnnnnnnnggtggaagttaggaggcaaccaactttcagccaccctttggccgggcgtggtggctcactc

SEQ ID NO: 265707 - DNA, 669 bp, Homo Sapiens
  misc_feature (415)..(415): n is a, c, g, or t
aatgatggtgagaccctatctctaaaaagaaaaagaataattttatcttggcccccatgtggcacctcacagcttgggaacaacaatttctcacgtttcctcagctccaaccaccactcacaagctgtgtgacctcgagcaaggcacccaagctcctctggacctcagcttccctgtcagtacaatggggataacaatagtgcttactttatggggtcatttgtgaatgtgagatgagttaataaatggaaagcacttagaaaaacctctggaaccactgaatcaaactggatatcattattgatccctcattcaatccttcaatacccatttagtgtcgtctgtccagatgctgcagatacgcctagcacacagtgactgctcagcgaacagtgtcacaatgaacatgtgccanatggccttgaaaggccacattgggacttgccctgatcagcaggttggaggtgctccaggcccgaagcttagctgtgagtggggacatgggagggaggttggaactaccactgcagaaggggctctgaacctaggttcaggagagaggctttgaacttgcatgtgtggggagccatggaagtttccaggaaggactgcaggtcccacctggagatgtgcagttcctccttcaggtacctgggaatgtcagtcaca

SEQ ID NO: 265708 - DNA, 926 bp, Homo Sapiens
  misc_feature (780)..(780): n is a, c, g, or t
  misc_feature (782)..(782): n is a, c, g, or t
  misc_feature (787)..(787): n is a, c, g, or t
  misc_feature (836)..(836): n is a, c, g, or t
  misc_feature (884)..(884): n is a, c, g, or t
agaggtgcctccagctgcccgagacgaccgggcagcccatcggctatgggaggccagcaagaggctggcagggcttgggcctggggaggatgctgaacccgatgaagacccccagtctgaggactcagaggccccatcttctctaagcaccccccaccctgaggagcccacagtttctcaaccttaccccagccctcagagctcaccagatttgtctaagatgacgcaccgaattcaggctaaagttgagcctgagatccagctctcctaaccctcaggccaggatgcttgccatggcacttcatggtccttgaaaacctcggatgtgtgcgaggccatgccctggacactgacgggtttgtgatcttgacctccgtggttactttctggggccccaagctgtgccctggacatctcttttcctggttgaaggaataatgggtgattatttcttcctgagagtgacagtaaccccagatggagagataggggtatgctagacactgtgcttctcggaaatttggatgtagtattttcaggccccacccttattgattctgatcagctctggagcagaggcagggagtttgcaatgtgatgcactgccaacattgagaattagtgaactgatccctttgcaaccgtctagctaggtagttaaattacccccatgttaatgaagcggaattaggctcccgagctaagggactcgcctagggtctcacagtgagtaggaggagggcctgggatctgaacccaagggtctgagccagggccgantnccgtnagatgggtgctgagaagtgagtcagggcagggcagctggtatcgaggtnccccatgggagtaaggggacccttccgggcggatgcagggctggggtnatctgtatctgaagcccctcggaataaagcgcgttgaccgcc

SEQ ID NO: 265709 - DNA, 450 bp, Homo Sapiens
  misc_feature (85)..(85): n is a, c, g, or t
  misc_feature (380)..(380): n is a, c, g, or t
cctaaaacactgtgccttcctcggaaaatttggaatgtaagtattttccaggcccccaaccccttaattgaattcctgaatcaanccctggaaccagaggccagggagtttgcaatgtgatgcactgcccaacattgagaattagtgaactgatccctttgcaaccgtctagctaggtagttaaattacccccatgttaatgaaacggaattaggctcccgagctaagggactcgcctagggtctcacagtgagtaggaggagggcctgggatctgaacccaagggtctgagccagggccgactgccgtaagatgggtgctgagaagtgagtcagggcagggcagctggtatcgaggtgccccatgggagtaaggggaanccttccgggcggatgcagggctggggtcatctgtatctgaagcccctcggaataaagtccgttgaccgcc

SEQ ID NO: 265710 - DNA, 907 bp, Homo Sapiens
cccgttttgctcaccagaactggagattcttctgcccgcctccgcgtcacagctgcaaattttattcaggaaatggccttgtttaaagaagttaagtctctccaaattattccatcctacctggtgcagccattgaaagcaaactcttcagttcacctggcaatgagtcagatgggcctcctggcccggctgctgaaagacctgggcactggcagctcgggcttcaccattgacaacgtgatgaagttttcagtgagtgccctggagcatagagtgtatgaggtccgcgagacggcggttcgaattattttggacatgtacagacagcaccaggcttccatcctggagtaccttcctccagacgacagcaacacacgcaggaacattctctacaaaacaatttttgagggatttgctaaaatagatggcagagctacagatgctgagatgagggtgagttaactttggtgaagttgtgatgtcatcctgtgttgaagaagttactcagttactcggtacgtaaataagtaaatatgtcatttgaaggagccacgtgtatgggaagccccggcgtcctggctaagaaagaacacaggttcccgcattcagatcccggctgctcccactttctgcccagtgagacccttaggttccccaggctgcaaacgggaataacgatagccgtgaggacacagcgggtttatctatcaatagacaccaatgaaatcaatggaaaagacttattctaacttgttattagtcttagtgaatattataatttataagaaatatagttgatatgccataataagtctcccagtttctaagattaccctaacaagctgttctaatggaaaaataattttcttaccaggcacgggagaaaagcggctacagaagaagcaga

SEQ ID NO: 265711 - DNA, 578 bp, Homo Sapiens
ttgacacagtctatacatgcattaagagatccactaagaagaatttaaaaagtagtttagaaaagaggagctgtcctgctttccttcttatagatagcattttggagaattttttaagctttaccatggtaactaaattgatcagtataccctgagatgtgagtctcctccattactggcctatgaatttcatccttccaagttcttaattccttgttataccagggacaatggaggaaaagtgtgaaaccagatcaaagacatcaaatcaagaacaagaacaactttgagtgtaaatatgtaactctactgccagcatcacctgtgtttttccagatcagtcacctatcaaagataaaaacttatcaggcaaaagaaggtaatggaggcaaaagtgatggtacaattagtgccaacactggatgaaaagaaagatcttaaattagttgagtattaagaaaacagttccaacgaagcattagcccaggccagatactcgaaaattacatacctgtgtggctagtagtctgtgggacactcaaataagctaaagtttttggccaggcacagtggcacat

SEQ ID NO: 265712 - DNA, 536 bp, Homo Sapiens
  misc_feature (394)..(394): n is a, c, g, or t
ctatagtgaggcaagtctgctagataaacggtagttagcccattttcaaataaactgctatctgcacacaggtcctaatctatgtaccttcaacagtatctgtggtcatgagtataatattcatttttctagctaaggaagttagaaactaaagacagttagaaactgagggtgtaataatgattttcaaaaaattctaaaatttccatttcaatgagttacacaaaagcaattagagctatttgacaatattcatattaattatattttctaattctagaaaaagaaatgggacattataaatcagtaatccgtttgaaagattccaacttgagactttttaaaccaagactagaaaccaagaagccataaaaagaaattgtcagacatattngaaatacacatggaagtaaaagcttctatgggcaaatgataccataaaaaagtaaacaaacacattttagatttggaaaaaaacaggatagaagtgacaaagggttaaatttcatgatattaatcagactttttacaccctg

SEQ ID NO: 265713 - DNA, 713 bp, Homo Sapiens
  misc_feature (43)..(43): n is a, c, g, or t
  misc_feature (289)..(289): n is a, c, g, or t
ttgcctcagcctcctaaagtgctaggattacaggcgtgcaccngtgcccagctgcttttgacattttctttgggaggtttctggggtacaattagctgaaatctgaagtttggttttgcatggtcttgcccaagctggtggttggtcattgtggccttctgatctggtgatcctaagaaacattctgaaaacatacccaaaaacacataaaaggcgtaccttaccatttaaaggttctttcagtaaaggcctatgagtaatttttcatggagggagcccattcttacgnaagttttaaatggacaaacatatcattatctttaaatggtattattacgtggtcttttaatttttaaaaagctccatttttccccattatcaagataacatgttctagacagacaatttaggaaatgcatatgattatttttgttctaattttctgtaataccaccacatagagacagtagtttttaaaaactgtgtgatatttaatgtattgttttcatttcctttaagatgcaatttagagttttagccttgaactttagttttccttcctcttggagatttagtttgatgctaaagtgctatcttcttgtttcaacttttgcttaatttactccaacacttttagacagcaaattaggtaactttatactagtgttatctaacaatgttttgctaacttccattttaagatgttagctcac

SEQ ID NO: 265714 - DNA, 590 bp, Homo Sapiens
cacatctgcctaaggcctacgtctctacaggcctcatctggcttcagagaaggtatataccatcatgtacagttgttggcatgagaaagcagatgagcgtcccactttcaaaattcttctgagcaatattctagatgtcatggatgaagaatcctgagctcgccaataagcttcttggttctacttctcttctccacaagccccaatttcactttctcagaggaaatcccaagcttaggagccctggagcctttgtgctcccactcaatacaaaaaggcccctctctacatctgggaatgcacctcttctttgattccctgggatagtggcttctgagcaaaggccaaaaaattattgtgcctgaaatttcccgagagaattaagacagactgaatttgcgatgaaaatattttttaggagggaggatgtaaatagccgcacaaaggggtccaacagctctttgagtaggcatttggtagagcttgggggggtgtgtgtgggggtggaccgaatttggcaagaatgaaatggtgtcataaagatgggaggggagggtgttttgataaaataaaattactagaaagcttga

SEQ ID NO: 265715 - DNA, 570 bp, Homo Sapiens
  misc_feature (370)..(386): n is a, c, g, or t
tttgacatacaaatgcagattaaaatgagggtactcatttctggaccatggagaaaagatttaggttggaggtaaaattttgtgagtgaaacttctgattctgggaagatgaagtaggcatatttttccttgttcctcccactgagtatattaagaactctggaaattatatacaaagcaaacataaggtgactctgacaggcataaagaagacagactacctagggatgtcaggactcaagtaacaacatggaggtgagttttctgggttttcttttttgcctcatatattctaggcatgaaatacatgctgctaaagcaggcaattcaaaaagccccaaagaaaagcctgctttaaaggggcagctgnnnnnnnnnnnnnnnnncagcaaacttttagattgtaaccactctactccagttaaatatcagggaagacactgtgacaccacttctcccctacaccagccaagggcaaggtaggcagccaacactcccactcctaccagactgtgatgtggcacttcaaatccccacagggtactgtcagagacagttcagtaagaaaat

SEQ ID NO: 265716 - DNA, 456 bp, Homo Sapiens
cccagtgctatactgctgaatgttaccctttagccatttaaaacaaattcataaatacatgttttatccttcaaaattaaaattaagatattcaaatctataaattctggttgaatggagcatataataagaaataggtgaaggcagcaggacaacattaatacgtaacttttctatcatctcatgtgatattattaaatgtattggttaatccaaaaacactccatgtaatacataagtttccactggatcatgtctcttgctttgaaaagagattgccccagctttgttttaacattggcattcaaataacttgaataatttgtctttttaaaaatatgaattctaagcaacttatttttctatgatgatatcctattttaattgatgttacctaatttaaaacgtttaaattagtgatttgattaataagcttcaagtatttggccgggcaca

SEQ ID NO: 265717 - DNA, 892 bp, Homo Sapiens
  misc_feature (311)..(457): n is a, c, g, or t
  misc_feature (479)..(499): n is a, c, g, or t
caggaggattgcttgagcccaggagttcaaggctgcagtgaatcgtgatggggtcactgcactacaagcctgggtgacagaatgagatcccatctggaaaataaataaatattgtgtactatttgcctacaatgggatatcacacagcagtgaaaaggaataaatgaatcctggctgaatttcaggaacatgacgttgcagcaaaaatgcaagtagcagaagaattcacacagcataataattctacttattcacagtccaaaaacatggcaaaactaaacaagacattgtttaaagatacaaccataagnnnnnnnnnnnnnnnnnnnnnnnnnnnnnnnnnnnnnnnnnnnnnnnnnnnnnnnnnnnnnnnnnnnnnnnnnnnnnnnnnnnnnnnnnnnnnnnnnnnnnnnnnnnnnnnnnnnnnnnnnnnnnnnnnnnnnnnnnnnnnnnnnnntgacagagcgagatgccgtctnnnnnnnnnnnnnnnnnnnnntcatacaaccataagtggaaaaactatagagagaaacaagggatgataaacacaaaattcaggataatgtttccatctctgttggggaggggagcagggcatgaggtcgatggaatcccatgaaagactggggcattggaacccagagcctctttgttagctgggtcatgggcacatgacactatcagtttattatctttttgttgccttccagatgggtatagatatagatggggaacgtatattgtctaactgtgaactgaattaaagcgttaatctaatgcaaaatggctcacatggcctccagaccctagatccaaatggcttgggtagaaacctggcaccgtgtcttcttaagtagctctcttaatctccccgtgcctccgtttcttt

SEQ ID NO: 265718 - DNA, 656 bp, Homo Sapiens
aaccaatagaacagtgagttagctgtatgtttcactgttcagggtttcacaagagtcctaagcaaaagcatttggaaaatagtcagaagggataaaagagaaaataaataaaagtttgatccgatgtcttctacttttttatgatttaagcctgccatctacgaagacagtgtaagtctaacaacaaaaccatgtgttcaattcactaagtcagtgaaaggaaatatatagggaatcagcaatggttgaacaaaatgccaagatggtaaattaggaaaagcactgaacagtgcctcatccaacagttttctatcacttccatgtggctttttctgagtgtgaacagaatgacatttgatgatcgcgtcaccatgtgcgtaccccagtagtttgccaatccctgtggtagggctcactttctgctttgtccaatccatgtgtccttatcctgattactgctctgctagcatctgcttgaacttactaaattgaagctctcatacatatttagtaaacttacatttaccaagttcacagggcagatttctgccttctagaagtttctaatcttttcttgaatactcgtaagtaaatatagcagtttatagatgctttccaaatttggaaagcacaaaacagtctcctgagagtacaaa

SEQ ID NO: 265719 - DNA, 1351 bp, Homo Sapiens
tacgattccctgttgatcgccgatactcctaagaggcatcaccatgtggggcaagcaccctgttgccgcaataatcgcccccccacgataggagcagcgggggcacgcaccagtgttataaagctcggctttgacttcaagatacaccgccatatacggcatcccagcctttctaaactattcgaagaatgtcagcagcctatatgggctttcacataatgctgcacactgctgctgagggtacatgcacgtcatgtgcacagagtttccaggacttttctattacttagagagatcatgctgtcgttcacatgatttagtgcatcttgttgcagaaaatgagtgacatatagaggtgcgactgcgaagcacagttaatggcagaattgggtttttgatgcagataaagactctaaggaagggctggaaatataaatttatatgtccttatcagttcacaatcttagtatccaacttgtctatttaaggtcttgaaaccaaattgtttgaaaagttttatttggtagcagaaaagatctacaatgggacctttacaaaagatgatgaacaagaggggagaaataaatttatacatatgattttgttgtcaaaatttgggatgatcatcagtaatcaagaacttacataaaaccacatctttttaagtaaaggaagtagaagctatgttaataccttgaccaatcagtttgctgaaactctgttaacagagattatactgaaccggaataaaattaagtctatagaagacaaatgaaactatttttaactgtagtaatgcatgaactatttagacagattaaaaacaactttctcaagctgacaattgatttctatcatatcaagtccatgatgtccacaatattcatttataccatggcttctcatagttcagtttttaaaattatatatatataaatgtgcatgtaacatcagatgttattgacagtagttgttaccatagaatgcatgtatctttctcactgtgtgtatccacttaatttgttcatatgtccaatccctgtcacggacctgattgcttacttgacagtggaggagaagaccctacccagaatgacccgaagacagaaatgggaaggatcagcccacctcagcattattagagggccaaaggctctgtagtgaaagtagtaataccaacactttcaacgggccaaaaaagaggcactaggagtgtttgtgaacacccaagaattatgatcagtatctacagcatagtgtgtaggcataaagtagttaatattttaacaaaatataaaaatactgttttctctaaagggggaagcagacaacttcccataagtagaaaaag

SEQ ID NO: 265720 - DNA, 443 bp, Homo Sapiens
  misc_feature (426)..(426): n is a, c, g, or t
ggccgcttaattaagaacctacacctctggggaattattttgatgataatgatgagaggcaggacgttatataggaaatcttacttaatttgaaatattatggttatataaagaaagaaaaggagtttggacctgaatcatactgggtttttaagttctgctctatcacttactataatagctgtgtaagttaacctgtctgaaatgtggagataatacttgccttacataattactatgagcatttgtgtatgtgcaggtgggtgtgggtgtgtatcagacatttattagagtatacagtaaacagttaatgaactaaggttactaataggtgtttactgtggggttgggctatgtgccaaaagtgctttgtggaatgtaattttattttaattaccggtaacctaggatggccccgtacccttnattaatccccttttttt

SEQ ID NO: 265721 - DNA, 962 bp, Homo Sapiens
aattcggcacgagcggcacgagcgatgacatgctggaggctgccaaggcatcactgggcatctacttaacactgaccagaggatgtgaagccactgaaagcttgactcagggaaaagaaatgtgggaccctcacactcatgaaaatggctataatcctcactgtattttcttgttcttcttgaaaaatataggatttgattccacagttcttcttgactttttgatttcatcagaaacctgttttcttgaatattttgttagatatttaaaattactgcaaaaggactgggataattttttcaccatttgcaataactttgatgcaactgaatctaaatatgacataagtatttgtggctgtgtcccctcacttgtccaagaccaaagctccaaccaaacaataccccatcgtttgactgctcctcatagtcacagagatgtgtgtgctcggcactcctgggcttccgatgctccctctgaaccactgaaagctgtgatgtccaagggtgctcacaccatgtgtgcttctagtctgtcttccccccgggcctctcaaagtctggtagattacgaccagctctgatgattctgacgtggaatccacagaccagtgtttagctaacagtaaacagacatctttacaccagcaagcaactaaggagattcaggatgcagctgggacaagcagggataaaaaagaatttagccttgagcctccatcaagtcctctggttctgaaagaatttgatactgccttctcctttgattgtgaagtagccccaaatgatgtcgtctctgaagtgggaatattttacagaatagtaaaatgcttccaggaactacaagatgccatctgccgtttgcaaaagaaaaatcttttcccatataatccaactgcacttttgaagttgttaaaatacatagaggtgataagtaataaaactatgaacactttgtaaaa

SEQ ID NO: 265722 - DNA, 441 bp, Homo Sapiens
  misc_feature (16)..(16): n is a, c, g, or t
  misc_feature (32)..(32): n is a, c, g, or t
ttgaaacccccgaacntccgggtaaaccccgnccgcccctcagccccccccaaagtgccgggaaccacacccgttccatttgttaaagccaatttgcctaaaaactgaccgaggtttattccattgcctatacagccagtgtttgattcagataaatatccttaatagagtcacatttccttcatgtcatgccctttaaggttgttccccaaatagtcataaagaacagaggatacctcaggtatgtaagatcttagagcccaagagagagtatggaaatggatgttcagctggtatttactgtcataagtgggattaggaattgtgggtttagggaattaaaaacaaccaacaattctacttggcttttaatctcttcagttatgagtgaagcatatttgcttgtaagggaagagataaggtaaaggaaatgaaataatt

SEQ ID NO: 265723 - DNA, 759 bp, Homo Sapiens
  misc_feature (165)..(212): n is a, c, g, or t
cttgtccttttgtcggatgatctccagtggtggaggatgagtgtgctgattggattaattccgagttggaatataatgaatggttagtgtccttttactccgttgtgttttgaggtgtttgtccctgacagccatttggcaaataatctggttatccaaaaagannnnnnnnnnnnnnnnnnnnnnnnnnnnnnnnnnnnnnnnnnnnnnnnacttataatattaaacatgtaaaagcgattttaatgacttttcattgaagatatacccttctgcctccatctccccaaatgggcatgcgagaaacatcactactgaatagtctggaagtaagtttgcaccaccaaaggtcagtgtgggttgtataaaaaccaggactggaagcagccctcccaccccagataataacggcaattccagagaacattgagaacacaaaccctcgaagaaagagcaaaatttctctgtcatgtaatgatgtttgatttgggctaaaaggaatgtccattttaccaaggtcttaagttctctttttgattccacttttatgcattttaaaaagttttcttagctgccttccttgttttccaaaaatatacaagtgctgatcctcttttgtccttcttggggtccccaggaatcagagaatacaatgtataaaactatagcaccagctgggggggtgcgaggccgaggcaggcagatcatctgaggtcagcctggccaatatggtgaaaccctgtctctactaaaaatacc

SEQ ID NO: 265724 - DNA, 761 bp, Homo Sapiens
  misc_feature (637)..(637): n is a, c, g, or t
  misc_feature (706)..(706): n is a, c, g, or t
acttcggcacaggcactgatacagcccagttcctgggtacccataggtatgagtggtcagtaggtgtatatacttttaaatatatttcctaagagccattaaatgtaaaacccaaatgacggctgcagcctcttcactcatgagtgatgccaaaccacattccacagtctctcagcacccctgaagggaaccgtgtaaactctagacatctggccagatggctttctgtcttccattccaactgccagttatttccttttttgtcccaagacggctatgcccctgacacacaaggaaaacagttttatctagaactaggaggagggattccttttgcctattgctaattaggggcctattgggaacaaatttcaagttttggggggaggaaagaggtttgtagaaggaaaccactttttccagctgttgtgtgaggcaggccaggccatgatatcatcgacagcattctgcttttctgtcttgttcttcctctgcactccctcctcctgttcatcatccctttcttcagataatgagttacagggataaacaataacctttcagatattatataaaacaaaaaagttcttactttattttcttttagagatatgatagttctactgttattttttgnttcttatggtcctcttcttcctcttatcttccaacttcttcttattgaatatggcttattgaatatggnttattaaatgtcgactcacccaagctccaaatccaaatacaatcccattttcttg

SEQ ID NO: 265725 - DNA, 341 bp, Homo Sapiens
  misc_feature (32)..(32): n is a, c, g, or t
  misc_feature (175)..(175): n is a, c, g, or t
ggcacgagaaggatggaggcaaaataaaaaanaatcacgtttcaagaaatgttaagctcttcttggaacaagccccaccttgctttccttgtgtagggcaaacccgctgtcccccgcgcgcctgggtggtcaggctgagggatttctacctcacactgtgcatttgcacagcagnatagaaagacttgtttatattaaacagcttatttatgtatcaatattagttggaaggaccaggcgcagagcctctctctgtgacatgtgactctgtcaattgaagacaggacattaaaagagagcgagagagagaaacagtttcagattactggcacatgtgggat

SEQ ID NO: 265726 - DNA, 462 bp, Homo Sapiens
  misc_feature (320)..(333): n is a, c, g, or t
  misc_feature (356)..(411): n is a, c, g, or t
gaatctttccacttctgttctctcatccagtatgttcttggccagcttcttcacacgattcatttccctgtccttcatctgaagaaggtgctgcagcttgtcaatttctacctgacctgcttggttctctatcattgcgtgttgctgcagttttaaaacttcactctcaaactctttggtcatgtaactcagagcagtctccaagtttactaccttcttctgaagggtttggatttgtgatctctgctggacaagttgcataatcttttccttaaccaacagatcattgatctcctaaaaacagaaagatgagaggtgannnnnnnnnnnnnngagatggaatcttgctctgtccnnnnnnnnnnnnnnnnnnnnnnnnnnnnnnnnnnnnnnnnnnnnnnnnnnnnnnnnggttcagggaattctcctaccctcaggaaggctgggtcaggagaatcgcgg

SEQ ID NO: 265727 - DNA, 427 bp, Homo Sapiens
ttgttgcatagcacattgcaccagaatttaaggacttaagacaacaaacattatcttacagtttctgtgggttagaaatctgggtgcagcttagctgggtgcctgtgctcataaaagaggtggtagtcaagctgtcagttggggttgcagtcacatctggaagctctactggtggaagatctgtttctgaactcattcatgtggctcttgcagggttcagtttcctggggctcttggactgaagaaatcaattgttgctggctgttggccagagcttttctctcagttctttgccatatgggcctctccaaagggcaccacagtttggcatctgcctccctctggagcaaatgagtgagagaaggtgacacctaagaatttttataaccctaatcttggaagtggtatctcattatttctgctatat

SEQ ID NO: 265728 - DNA, 784 bp, Homo Sapiens
  misc_feature (15)..(15): n is a, c, g, or t
  misc_feature (40)..(40): n is a, c, g, or t
  misc_feature (73)..(73): n is a, c, g, or t
  misc_feature (696)..(696): n is a, c, g, or t
  misc_feature (723)..(723): n is a, c, g, or t
tttggccctacgcgncccagtaattcggcacgaggtcagnacttgctttttgtttttactttacccttcaggnattttttacttcacaacacggaattggccatttggagatttactttgtaagatttctgtgatgctgttttataccaacatgtacggaagcattctgttcttaacctgtattagtgtagatcgatttctggcaattgtctacccatttaagtcaaagactctaagaaccaaaagaaatgcaaagattgtttgcactggcgtgtggttaactgtgatcggaggaagtgcacccgccgtttttgttcagtctacccactctcagggtaacaatgcctcagaagcctgctttgaaaattttccagaagccacatggaaaacatatctctcaaggattgtaattttcatcgaaatagtgggattttttattcctctaattttaaatgtaacttgttctagtatggtgctaaaaactttaaccaaacctgttacattaagtagaagcaaaataaacaaaactaaggttttaaaaatgatttttgtacatttgatcatattctgtttctgttttgttccttacaatatcaatcttattttatattctcttgtgagaacacaaacatttgttaattgctcagtagtggcagcagtaaggacaatgtacccaatcactctctgtattgctgnttccaactgttgttttgaccctatagnttactactttacatcggacacaattcagaattcaataaaaatgaaaaactggtctgtcagg

SEQ ID NO: 265729 - DNA, 324 bp, Homo Sapiens
ccttctgaaagtcggtcttgtaacaattggatggatgcctttgaagagcccctgtccctattctatgcttgaaaacagcgtgcagtcctaatgttcaagaaccacgaccacataaaaacattgctccccttctgctgctttgaaaacgacccctaaattccgtgtagaagttgccaggtcgtcttgacgtacacttcgtttgtatgatgtttgtctgtcaaatactgtgatggaagagtgtatgcgggggaggagcagggaatttttaaaagcattttccggtcacctcagactggggagatcatgttctttcctgaaaaaaat

SEQ ID NO: 265730 - DNA, 435 bp, Homo Sapiens
  misc_feature (383)..(383): n is a, c, g, or t
  misc_feature (402)..(402): n is a, c, g, or t
gtcagaactatcatccaaaacagaaattataaatgatgggtgagtatacctttaaagataaactcatgctgaaattttcttcaggaaagcagcttgattaaactaggtaataattttatcccattatcatcagtgtatggtatttattctttttatattcagagagatactaacttaagagactgttcatttgtgaaaaccacacctggaaattgaattccagagcctactaacctccttatctcttcttctggcacaaccctacccttcattttagaagaaaaacacaatagtggtttaattctcatattcattatgagtaagggaggaaaaagaggatgcccacagtgttattaagggaatgggaggcaccctgcggggtnccttttaccttgggcattnaacctgaggagttccggtgtttgatgtttacag

SEQ ID NO: 265731 - DNA, 768 bp, Homo Sapiens
  misc_feature (488)..(688): n is a, c, g, or t
  misc_feature (717)..(717): n is a, c, g, or t
  misc_feature (742)..(742): n is a, c, g, or t
aactgggttctaaccaaaacaacaacaacactcgctgacttcaaaggtctgttgactcgaggagataaatctcccagtcctagttggttcttttcagagaggtgcagaaaagaccccctagaatggagctgttgagccaatcacctttccacagcaagacataaagcggagcatactggggagagaaataaagcttacaaacaaaactcggggaaaggagaaagagaaaggtcattcgtccttttcaaagatgcttacttacactgttgattttattatattcaaaactacccaaatatcagacatccagtctgactgctcttttcttttaatcacttgggagctgcatttctgaaaataggcactctggtcctcagtgagccagattttgcaaactgcccatacattcccgttatcacattttacccagtctgcagcatattcataatatgttaagtaaattaatttccaatatatattcccaaagnnnnnnnnnnnnnnnnnnnnnnnnnnnnnnnnnnnnnnnnnnnnnnnnnnnnnnnnnnnnnnnnnnnnnnnnnnnnnnnnnnnnnnnnnnnnnnnnnnnnnnnnnnnnnnnnnnnnnnnnnnnnnnnnnnnnnnnnnnnnnnnnnnnnnnnnnnnnnnnnnnnnnnnnnnnnnnnnnnnnnnnnnnnnnnnnnnnnnnnnntgtgagaaatcaattaataatatttttgntgccttcattcaatgagggcagtgnttctcaaaaacgtaaactttctgact

SEQ ID NO: 265732 - DNA, 479 bp, Homo Sapiens
agcactgggcctaacagttctcctttctggggctgtggtaaagaaaatatgtatgagatcatatatgagaaagcttgcaaggattagatggatttaacatttgaattctaacattcaccagcatatatgttccttgagtatcttatttttaaaatgtggggactaagtaaacatttgcctatttttcagaattcttggaggtgtttgttggagtcagtaaagagtttggagtcagaaagtttacgtttttgagaaacactgccctcattgaatgaaggcaacaaaaatattattaattgatttctcacagtttctcaaccttgccatatttgaggccgaatacttcttgttgtaggggctgtcctgtgcattgtagggtatttagcagtatctctggtctctacccactagatgccagtagcatcctccatttgtgacaaccaataatgtctccagacgttgccagatgtctcctgggg

SEQ ID NO: 265733 - DNA, 295 bp, Homo Sapiens
taacctttaacctttgtgtttgttaaagtatgaggtatgtttgctgacaaacctcctttgtttgtgaaaacagatgctttctctatttgcctgacacagcagaggacactaaaaccagaaaacatattgatttttactttactctgttgacagcttcttctgtttttaaatttctctctgattcttgtatactggaaggctatgggttattaaaccccctcacattcagttcggtttaacaaatctttattaaaggactactttatgcaaacactatggtatgcacttatagcca

SEQ ID NO: 265734 - DNA, 457 bp, Homo Sapiens
  misc_feature (447)..(447): n is a, c, g, or t
tcacgctccacagacaggagtcgagaagtaacagctgcagcacctgctaagcccagaaggaagacggcaaacttacaacttactcgcgacagtcctcagtgtggaaaatcaagagttgtggatctaatttcttggatactgaagttggtgctctgtcccttggccttctgtggtaggatgcataggatgccctagggaagtcactccacaatacggagtggtcacattcatttgaaggcaccactcctttccatgttatgcacctaactcaaacccagtaaagagggactccaagcataattactttctttatatcctgctagtgaaagttctgtcactacaaatgcagggaaccagagacaagcatgagaagagaaaaatcatgcgtttcttacgatgagtggctgtgtgaaaggtttctgctgggtttggctaaggcatctaaanctccgtgtct

SEQ ID NO: 265735 - DNA, 415 bp, Homo Sapiens
  misc_feature (94)..(104): n is a, c, g, or t
gaactggaagcacaagttcaataagagaaaaaagaatggcaagaagaacgtatggcaaagataagccgctcttgggcttttaagaaaaagtaannnnnnnnnnnaaataggaaagaaatcaatccttaccttatcccttgctcggaatgtaaaaaatttagggaattctctctgtattaaagaagggggaaaaatgtgtcagtagttcatagacatggctctttgagaacaaacagtataaaaacagttaagcatttagaagccagttttctagaaaaacatgcttcttacctaagcttagtccaggaaatatatatgaatgatcctccgcataaccatcactttgaccccatttccaaatttgagaatcaccacattataaacctaattttagtatctacccctctcccagggg

SEQ ID NO: 265736 - DNA, 866 bp, Homo Sapiens
agtataactattgtataaataaatgtatagcttaattgactgaagtgtaatgaaaatgaaagtgtaattggactgtgtttagatctgtgttttccaaaacagagggaaaaccggtaacattaggctgtcagtggtctcaagagcaccattaacaaagcttgattttttaaattaattgctgttctatacagtggataagagccaattctccctgtcatggtgttcctggaactgaaactatatcccagcctcctctgtcatggtaaaaattatcatatatacatttgctcacctatgtgcctaattttaaaagcaaatattttctggctaaacttttggaggggggatgggttttctaggaccctgggaaactggagacctgaagagttttgggggacacttgaacactgactttggtgttttcccctggttgaggatggccctattgatactgagtttctagaactagaggatcctaaacattcattgtaatgaaagcagatagattgtgagcataattactccagaatgttgatgtaaagctgagagtaaatgggtagtttcttacaactaattgttcagtgtcaccagcacacctcactgagggggaaactgtccaccagcacgctgcatccagccctgctctgtgagaccacctcattcccattcagtctctttgttggccaggagtccataatggtgtgtgcatgtgggggagggggatcttttcctgccaatctacaaacctagcctacaaagcttcacctctacaatatgtactgaaagtaaagtgataaggaataattatgattgagattattattggccaccctaatataatgtacataataaactttatcatcata

SEQ ID NO: 265737 - DNA, 810 bp, Homo Sapiens
  misc_feature (20)..(20): n is a, c, g, or t
  misc_feature (250)..(250): n is a, c, g, or t
catacgttcacacttacatnctctacaatttacatgtaacatattgtctttagtttaccaatagggaaactgaggcctgatcagagatgttaatttgtgtaaaacagctcataagaggaggaggtaggattcatatctagatatttatgggtccaaaacccatgttttttcaaccaccattcccggcctagatacattttttagcctgggcattcacattcagttggtcagcagagtctgacaaattctncaccattccttcttctacttgtttggttcagccccatattatttcttgcctagattatcataggcagtttttacccagaatctcactcttctctaatacgttattagaggggctcctcaaaagcaatcctgttcatatacttcatacttttacaaacttcttaacctatttctccattatcacctcctgccagttcccacccctgtggtccagacttgtagaatcactgccagttcctcaatgctagttcccatgcctttgcacattccatttcctctgcctagagtaccctaagcagactgctactctttcagatgctgttcaagctttcccttcccttagaaagccctctgaaccatgtactgtgagttagagacctctcatctgtgatgcctgcctccttccccactttcttcctttcccaccccaggactttaagctctttgagagcaggagggggagaatgggttttatttgaagatcttcagaaccaagacctagtgtatatagtaggacctcaatatttattgaaccaaacattacagaaaatttggaaaatg

SEQ ID NO: 265738 - DNA, 497 bp, Homo Sapiens
taaaagagacgggtctcactatgttggcttgattggccttgaactcttggtctcaagcaatcctccctcctcagcctcccaaagtgctaggattacaggcacgaggcactgcgcctggccagatatgcttcctaataacaactttggtagagaaataccaaaggagaaggaaacaatgatatggagaagactcaaaacaatgacagatgcttgcaaatctaagagtgcagggctaaaccttctccctgcactggactccatttctgtaccattcacattttgtgggcacctacatacatacatgttttgctgcatttttatattggttttaagggtaacattgtcatacacttcaagttaccataattttttaaactgcagttgtacatgtttatagctattaaatctttcaggataaattacacgttttatacaaaatatataaattgcattcatataaatcaccaaatttgtatagagctggttcctaaaacatt

SEQ ID NO: 265739 - DNA, 361 bp, Homo Sapiens
  misc_feature (198)..(198): n is a, c, g, or t
  misc_feature (343)..(343): n is a, c, g, or t
agaattaaaaactttacaggaggaaagtgaaaaggctggaactaactcacccaaaatatttagcaagttaatcataaataagataatagattttgagtctttcggttttcagtggagaactttatatttgattttgcctaatgtgtgaaactgtataaagcatactctatagtatatgttcctgctgcctgggagccngacacatcatcaaagtgtgtgtgtgtgcaagagaaaacacattaatttctctttctcagtttgtcataaggggggagtgctattaaaggaatcttctgggctggggtgtgggtgggctccaaacctgttaatccccagaactttngggagacccaggcttgcc

SEQ ID NO: 265740 - DNA, 644 bp, Homo Sapiens
  misc_feature (273)..(282): n is a, c, g, or t
  misc_feature (485)..(571): n is a, c, g, or t
aggaaaatatgtggccctcaaccaagcaagaagccggtgaaggctgggttgagaagaaacaggaatgtgagaagatagatcatcgtcaccgctgccctgtggaagctccgcgcgattatcctcaccactgccctgtggaagctccgcgccttactcagtcaatctctaccacacccttactctgtgtcagcggtggtactaggcactgaggaggagtccaataccttcctctgaaagagctggaattctagccctgcattgtccaacataacnnnnnnnnnnctcagaaaagtttccataatctttcttccctcactctgttgcccaagctggcagtgccgtggtgcagtcatagctcactgcagtctcaaactcccagacccaagcaatcctcttagcctctcaaggagctaggactacaggtgcatgccaccacacccagctgattgtttcatttcttgcagagacggagtcttgctatcttnnnnnnnnnnnnnnnnnnnnnnnnnnnnnnnnnnnnnnnnnnnnnnnnnnnnnnnnnnnnnnnnnnnnnnnnnnnnnnnnnnnnnnntccgtttaaatttagaatatggaaatgtaaagacattaagatgaaataaatgtaaaagttcggttcctcagtc

SEQ ID NO: 265741 - DNA, 1125 bp, Homo Sapiens
acaaaggctattaacacataggaaaaaatgtatttactaagtgtcacatttctctaagatgaaagatttttactctagaaactgtgcgagcacaacacacacaatcctttctaactttatggacactaaactggacccaatagaaaagacaaaaatgaaagagacacagggtgtatatctagaacgataatgcttttgcagaaactaaagcctttttaagaaatgcccagctgctgtagaccccatgagaaaagatgtcttaatcatccttatgaaaacagatgtaaacaactatatttcaactaacttcatcttcactgcatagcctcaggtagtgagtttgccaaaaccaaagggggtgaatacttccccaagattcttcctgggaggatggaaacagtgcagcccaggtcccatgggggcagctccatcccagagcatttctgatagttgaactgtaatttctactcttaagtgagatatgaagcattatccttttgttcagttgccccgggcttttgaacagaagagtaaatacagaattgaaaaagataaacactcaaccaaacaatgtgaaaacggggttctgtagtatttgtaaaaaggcccggcccaggaccactgtgagctggaaaaggggagaaaggcagtgggaaaagaggttgagccgaagatcaattcgacagacagacggtgtgtatgcccctccctgtttgacttcacacacactcataactttccaaatgaaaccccacagtatagcgcatattttcgatatttttgtgaattccaaaaggaaatcacagggctgttcgaaatattgggggaacactgtgtttctgcatcatctgcatttgctccccaagcaatgtagaggtgtttaaagggccctctgctggctgagtggcaatactacaacaaacttcaaggcaagtttggctgaaaacagttgacaacaaagggcccccatacacttatccctcaaattttaagtgatatgaaatacttgtcatgtctttggccaaatcagaagatattcatcctgcttcaagtcagcttcagaaatgttttaaaagggactttagctctggaactcaaaatcaatttattaagagccatattctt

SEQ ID NO: 265742 - DNA, 662 bp, Homo Sapiens
  misc_feature (642)..(642): n is a, c, g, or t
agctgagggtataagtgaccaacgagggaaaaagcaaccttggggaaaatctcaagactgacttatcagaattagggataaatgaaaccttgttgaatcccacctaaccatgaaaacaataatctttgttttgaataaacgtctcactcagcgacgctggaagcacttaggtttgggttggtgtgattccttcctacagtgtgagaataggcatctcggctcaagttacatgaaggaagagggaacacaggaaggcatttgtccaaggatacaaggagctcagactggggccataagcaacccagtgtgatgggttgacctaactggtttcatgcttcagagcttcccatcttctacctgcatacatacacatgtgcatacctcacaaacacacttaagctaagcctactagttgtggtttttcatccaagattttttatttgaatgctggtgccccaaactgctgtgcatgtctagccgaccctgaggtagtaatgccagagggggctacccagtgacaatgctgactgcaggctccttgcttcccatccccgttggctcctgatggctcttctagtcctgcttcacttcctcaaaaggcagaaataagaaagggctctctgagtctgcacagaaacctgncttgatagttacaaaaacct

SEQ ID NO: 265743 - DNA, 777 bp, Homo Sapiens
  misc_feature (145)..(145): n is a, c, g, or t
  misc_feature (393)..(462): n is a, c, g, or t
  misc_feature (464)..(526): n is a, c, g, or t
  misc_feature (715)..(715): n is a, c, g, or t
gtggtattgtattttgattattctgtcttgtgtcttgcaaggttgaaatctgtttaggaacaaagtttatccctgtgcacagtccttggtaaacaggacctcaataaatggtaaattgaagcatcctgtcagtgtatacactggnaaaactgaacaaatccaagataaaagtcattgttttgaaatcatagtgacacagtttttttagcaactgtttttgctactctacttcttttgggccatgggatcacagacccagctgttggggagagtctttatatgatttcaggaaacatctgtgtgggctctttatgcctttgttttccttccattttaaacaagctccaaaatttggcacaatatttggcacagttttcagattctccaagatannnnnnnnnnnnnnnnnnnnnnnnnnnnnnnnnnnnnnnnnnnnnnnnnnnnnnnnnnnnnnnnnnnnnntnnnnnnnnnnnnnnnnnnnnnnnnnnnnnnnnnnnnnnnnnnnnnnnnnnnnnnnnnnnnnnnctttagaattttgtcatctaaggaaagctttgccttttgtatgtaatgacaaagttctcagtgtgatttctgctataagctatttatgctttggaaatattaatagttcatcagctgggaagactaggactacggttacctaacatcctgagatgtgattcaaaacttgaatttccctctggtcagagnttttgactctgtggtttctgagaatggctggttaaaaaaaggtggggagaagtagcttacta

SEQ ID NO: 265744 - DNA, 738 bp, Homo Sapiens
gagccttatggagagagagtatatgattatctctatttgtatttaattaccatttcatctaaccattcagaacatatttcaagaataattttaattcaagttgtagataaaacttactataccattttcattttgacgctttccaagaatgagatacacggtattttaaagacaaaggattgatcttacatgttactattaaaaaaaacacgttaattttgttctacatttatacttttaatttttctgtggataataagaaatgccaagagtcgattgtgtccatgctggcaagtggcctaataaattgtccttttatttggtggtcctcagagtggcagttaacatcttgctattctgccttgtggacttgaggtggaaaggttcatggaattatatccttgcttttggatgtgcaaactgaggctcagagagtttaagacacatagtcactttcaccaattaaatgatgaagctgccatgtaaacgtatttcatcacactcccgagaccttcttctccagtagtgttttcaagctttttgagcatgcagacactaccatcaaaaaactatgtagagacatacttgagagttacagtttaaagaaaaacaaggtgtaattatttggttattagtagcatttacatatgcttgaaaacttctgctatatatacagtaagattaatttattctaacaatgatcttgataatccccctgattcccagactccttgggaa

SEQ ID NO: 265745 - DNA, 601 bp, Homo Sapiens
  misc_feature (422)..(479): n is a, c, g, or t
ttttaaataaatgtaaaagaaaaataactggatttgattattgaatagtttttttctatatttcacaaataaattgtatgaaatgactgtagaagtggccccaaaattatgaaccttcgtagctgtgaatatgatgccataaatctcttttaaagctcaagatagactatgaacatatgaaatacatagttacctaatcatgagactaaattcacctgggtgacaaggctaacgttcaagctacttaagatgaaaatatttgaatcatgattgcttgggggaacctctctttgaggggtcatgaggaccacctgctgggcattctgttttcatgctgagaaggtgagaattgaacagatgagaaaagccttgataaaacgtcatctccatgtaatttagagaaggataaccttgactgtacnnnnnnnnnnnnnnnnnnnnnnnnnnnnnnnnnnnnnnnnnnnnnnnnnnnnnnnnnngctatctgctctgccattactgagacagcaggaccaaccctccatctactcaatgggaagatgataaggatgaagacctttatggtgatccgcttccacttaataaatagtaaattcattaa

SEQ ID NO: 265746 - DNA, 400 bp, Homo Sapiens
  misc_feature (67)..(67): n is a, c, g, or t
gttttaatccaaggcttttcctccatcggttccaattcctcacccttcctcagccatgaaaaacagnaatgcccagcaggtggtcctcatgacccctcaaagagaggttcccccaagcaatcatgattcaaatattttcatcttaagtagcttgaacgttagccttgtcacccaggtgaatttagtctcatgattaggtaactatgtatttcatatgttcatagtctatcttgagctttaaaagagatttatggcatcatattcacagctacgaaggttcataattttggggccacttctacagtcatttcatacaatttatttgtgaaatatagaaaaaaactattcaataatcaaatccagttatttttcttttacatttatttaaaatgattaaaaa

SEQ ID NO: 265747 - DNA, 715 bp, Homo Sapiens
  misc_feature (212)..(221): n is a, c, g, or t
  misc_feature (686)..(686): n is a, c, g, or t
gtgcatgctctcttcaaagatcactttgcattgagatgtcaggaaagcgtgacagctggatgaagcacctaccccagtttgcaagcaggtgggttttcggttttctggaccctcttacccagctcccagatggccatgcatttgaaaatcgccaattaggcactttgcagtcacctggagtttttctattgagacatgtttcaatctcattnnnnnnnnnntgttgcccaccttcctccactctcatcagaaaagaaatttattaacatgcaatgagaactttaaaaaactcatccagaagctttccttccgagagtccagcccgaggtgataatccagaaatgtgggatgtatagaatgtttattgaaactttaaagaaatttttcttttgtggcaaaatatatgtaacatgaaaacaatttaatagtaggaaactggaagcaagtaaatatcgagcattagggaatatgatattccatgtattcaaatataatacattctttgaaaatactttcaaagaacttttaatagcaggaaatttctcttgacatatcatgagtgaagaaagcaggctccagacctccaattaggtctttagatttcagatttcaggcacatgcattgaaacaagataaataaaggaactacaaaattcttaacagtgatgattattggatggtaggantatgggaggatttctttaattaagcggcc

SEQ ID NO: 265748 - DNA, 744 bp, Homo Sapiens
  misc_feature (462)..(515): n is a, c, g, or t
  misc_feature (537)..(577): n is a, c, g, or t
gactcaaatgccatttcttgttttaattcagtggcctttaacataagaaattgggtatatgtatgaataataatttttcttgaatgtaagttctaaacaggatttttttccttcaaccctactccttctgtaaggaaaaagttttaagtatgatacatattatgttgtggatttggtttatgaatgggaaatgccagaagtgcttgcttctgtaatcaaactttaaccacaagatggcagtataactttcccatgtctttaaaaaatttttaaataattactaaattaaattattttttctctcttaatgagaaatgtatacagctaagggatttcaagatagttctaaggaggatgaatattgaaggtactgtactaaatataagaaatattaaagactatttagtgataatttattaattttttgagtcttgctctgtgagtcagcctgagtctgtgccnnnnnnnnnnnnnnnnnnnnnnnnnnnnnnnnnnnnnnnnnnnnnnnnnnnnnnacagagttgagactctgtctcnnnnnnnnnnnnnnnnnnnnnnnnnnnnnnnnnnnnnnnnnggaaatatagttaccatgtgtgagaaaaagtgtggtctcatgtaatgccctaaacatatatgtcatgtttcaaaaatctgtagttttaggtgagtttgaggtcagaatgcatttccccctagaacaatgttatgcaattcatgggcaagccacaaaaattttcttcc

SEQ ID NO: 265749 - DNA, 812 bp, Homo Sapiens
  misc_feature (688)..(700): n is a, c, g, or t
caaggccaagagcgtctggggtagcaaaccaactctcttgtgattggatttatcttaaaaattgataggtaacttttgcccctcacaacagatagcagtccaccttctgtttcatactatgtgtaactccatagccacctaggtaccagagttttatcttttcctttcgtctctttctttttccccagcaatatttaactatattctaatgcatcagggttgttctagtgaatctcattgctgccactgctaagtcatgagtccccaaggaccaccctcacattcagagattcactagaaggactcgtcagactccacacgttgatacactcatgacggagacttatattataatgatgcggtaaggatatacacccagttaataagggaaggacacaggtgaggtatagaagaatcctgtaggcttccttctgttctctccctgccatgagcacaagtgcacaagctttccccagcaagaaaaataacatgtgtgtgatgtttctagagaaccccattagagattcagaacccaaggtttttactgggggctggtcacgtagacaccttcaacctgacatgtaccaacatttcatactcccagaaggagagcaggtattcagcataaaccacattgtgtgtttaaatgttctaggtcagtgagccacctttatcacgtaggggaagnnnnnnnnnnnnnaaatcagtgtaagaaactttaccagtcaaattcccaggtcctagccaaaggccagtgttgcaagcatgcctttttgaaaatagtaatagtcacactaggtgtagtggctgat

SEQ ID NO: 265750 - DNA, 394 bp, Homo Sapiens
  misc_feature (20)..(20): n is a, c, g, or t
agagagctagcaccatgagncttcaataccctgggctctgtcactgtgcagctctgtccatcctttactgtgacaccaactcccaccttccccaaccctgccttcaacccctgggttcctcttcactttcttgcttcagcctggctcttcctttcaggcactaactccctggcatcccctcaacgtgcgactatcttctctccatacacaacctcttccctggcctaaagagaagtctttcttgctccttactgccacttccagatcactttccctttatctgccttaaaaatgcacaatggctcacatctgtaatcccaacattttggggggccaagcgggaggatcactttgaaccaggagcctgggcaacatggcaagaccccgtctctgc

SEQ ID NO: 265751 - DNA, 418 bp, Homo Sapiens
  misc_feature (382)..(382): n is a, c, g, or t
cagaaatagcatttataaatgctaaataaatacttgctaagtattacagtgcttagaagctgtaagtgatgtgttatgaaacaaacctattgcttcaaattattggaaacttgtactatacatggaatatactcagcttactcatgcctggtgggcctagcatttagctgctagtcttggcttatttaccattagaaattccattgattgttttctcatgtctgtgcctcaatataataaatatttccttgttgtatggatacatgcactaataccttttgattaactacatgataaacacagtctaggtcgtttggggtggggtagttctctaggaatgggagtattttaaaaaatgggaggactattaattaaaaatctnaaattttagggagttttaccaaaataatggcttaac

SEQ ID NO: 265752 - DNA, 498 bp, Homo Sapiens
  misc_feature (80)..(179): n is a, c, g, or t
ggcacgagctgaatagctgggattacaggtggccgccactatccccagctaatttttttgtatttttagaagagatggcnnnnnnnnnnnnnnnnnnnnnnnnnnnnnnnnnnnnnnnnnnnnnnnnnnnnnnnnnnnnnnnnnnnnnnnnnnnnnnnnnnnnnnnnnnnnnnnnnnnnctggcttcattcttcaggaaaccatctagttcaatttagcttcaaagaatgtctttccctttttggtacagtgggatcttacctctggttgcatctaaaaagcaattctgaatttaagaatctttaaactcttgggactggttaagtggtttgagtctcaaagggacctaagtcatggagtgtctggaggtgctcagggtggcatcttggaaaagtaaatggaatggaaattcaagagcccacagcaatcccagataactcagaaatctcaaagagaagctgctttcaggtcttttttgagacagtcgctctgttgccc

SEQ ID NO: 265753 - DNA, 678 bp, Homo Sapiens
  misc_feature (475)..(548): n is a, c, g, or t
gtgtgagccaccacacccaactggagaactcttcaccagaagatatacaataaccaccttatttagccagactagtgggtcctgggcagactcctaggtgtggaccattggttattaaccagtcaccatgtattgttcccatgtgtagaccaagaactagacatttgaaggggatgtgggatttcttcttcctgaacaagtcacttcttctatatagtggggaaaacatccaaactaattctaccacatattttcagattataaggtgacattcaatattcctggctgtcactatgtttttcccttgttccttttcctatatttcctgccaaattaggagacagagatacatgaaaaggtcaagagtatgtgtgctgtagagtatctcaagaggaatccaccccatctcaaagtggggctcaagtttcctacccccaattctttggaatgctgaattttatgaggatcaaattannnnnnnnnnnnnnnnnnnnnnnnnnnnnnnnnnnnnnnnnnnnnnnnnnnnnnnnnnnnnnnnnnnnnnnnnntgggtacttagcagtaaatgcctctgtcataagacatggtgttaagttttgggtttcttgaaacattcaaagttaaacacaagtactcttctacgtatgtggaaaaaggagggaataaaatcaggatgtg

SEQ ID NO: 265754 - DNA, 738 bp, Homo Sapiens
  misc_feature (645)..(653): n is a, c, g, or t
gtaggcttagtcaccatagctattttagagcagtgtttcctaaacttttataatttttgtaaacttttgagctcaattaaatgaaaaacaaaaaatcaaggaataccacctcaatgttgaattttcaaaatagtggtacttaaatatctccattcgtaaagctatgtataaagtccttgtttttagactgtggttacagttataacagcacaagttaattgtatataaactataacatttatttaaattttcattaataccaaattcatataacaaatgatgttttgctgaaatttaattggaggttgtatcatgactgattcatttgtgtttgacacatgtatgctgttaagtgccttatgatgttaattttcttgtctttctcttggaactgtcgcaagttttggacaacatgtcatcgtggattgactttgcaagtttgaatctgcatttatagattttctgcttgtgtgattttcccaatagaatgtaaatacaattcagacatttaggacttatgttctgtgggatgactgccagacagatggccctaagtataattgaacggtatacctgaaaagtcagaaaacacaggatactcttatttttatatctgttatattttcacataaagaatcattagcnnnnnnnnnccccccaactttcagacccgttcactggtgctgaatttgaagcagtatattctattaatctgggggaaaaagcaccatagatata

SEQ ID NO: 265755 - DNA, 541 bp, Homo Sapiens
gttctgtttaccggatggtgccaaacagttccaggctcttggtgcccggtagaaattggacgacacacacacagatagcaaagcaaagcagcaaaagtttagtaaacagagtattacactctcgggggtgggagagagcggactgacctctgcgaggtgagatcagcgtcagcttgctgtagtttgagtcattttatgtgtgtgcgtgcgtgtgtgtatgttttctgttcccagtgctgcctaatctatagccagcatctgcccttttattgataggtttgttgcttactttgtcctctgtggcttgtgcctctatcttataatcttaaatatatgcatgatatgtagcccatatgcatgaaccttaagtagctgattatcatacgggcttttgttaaggatacttttcctctctaatacgcatgcccatctctgaagagctgcctcttaaactggtttgttccagatcttgccggccacgaggtccttgctcacattatctcttttgtttcggctgcaaaaggttcactgcttgttatct

SEQ ID NO: 265756 - DNA, 430 bp, Homo Sapiens
  misc_feature (51)..(51): n is a, c, g, or t
  misc_feature (269)..(269): n is a, c, g, or t
  misc_feature (305)..(305): n is a, c, g, or t
taaaatatttactatctggtcctttgcaggaaaagtttgtcaactcttgcnttaaggtatccattgtatataataaattaacttttttctatgcatctagaagggtattagctgtgtatcatcctagagaaaaatgagaaaataagatacacaaattattttattttgggcttaattctctcttgaaaccccagttgagaaagacagtatatacatttatataattaaagtaagatgctttgagtatagtcatcagtgtagaaaaagantacatgaatttaaagttctgaaaatttgggttgatnaagccccattacaccaaattattctgtgagcaataaaaatgaaacacatggctcaagagattaccagaggtaaatgtctggccttataaaaatccaagatactgtgggatgcagtagctcacact

SEQ ID NO: 265757 - DNA, 534 bp, Homo Sapiens
  misc_feature (214)..(214): n is a, c, g, or t
  misc_feature (225)..(225): n is a, c, g, or t
  misc_feature (242)..(242): n is a, c, g, or t
  misc_feature (523)..(523): n is a, c, g, or t
atcgcgtcaggcgcctcactccagcccccgccatcatcttttatggtatcatagcaacgatttatatcatccctggtgacataaactcgttagtcaattatttcagctttgctgcatggctgttttatggcctgacgattctaggactcatcgtgatgagatttacaaggaaagagctggaaaggcctatcaaggtgcccgtagtcattcccgncttgatgacantcatctctgtgtttttngttctggctccaatcatcagcaagcccacccggggagtacctctactgtgtgctgtttatattaaggcggccttttattttacttcctgtttgtccactacaagtttggatgggctcagaaaatctcaaagccgattaccatgcaccttcagatgctaatggaagtggtcccaccggaggaagaccctgagtaacaagctccgtctcttgtagccaagtcagctgaatttattttcttaagcaatatttgtggttatttcttcctttttttcctacgaatnaaatatactca

SEQ ID NO: 265758 - DNA, 661 bp, Homo Sapiens
  misc_feature (311)..(355): n is a, c, g, or t
ccagcctcaagatattttttaaagtcatgctttaaggtggcattccacgttaaaatattctccctcattcacttcaagacaggttgatcagccatcaaggcctgccctagacatacagggtcgtgtggataacaggcacgttttgggggcttcctttgcaaatcaaatctctctaagagatggcaaacaccaaaaaaagggatccattataggttgctcatgttatatgccctcacaaaagtgacaacatttctcctacatggcttgcttggaataagaactattataaagaagtcctctgaatatataannnnnnnnnnnnnnnnnnnnnnnnnnnnnnnnnnnnnnnnnnnnnatagagactgtgttggttcacttatttcataagccttgcagtgataattacagtctgaagtgaccctactatgtctgaatacttccatggtaaaaaataaattctatcacgacaaaaacttttggaaaaaaacatgcatagccagtctaacctttaaaggtcgctgaggagctgcaatctttatttgaattcattatgaaatcaataaaacctctggttaagattcatgtaattataaataacacggaagaccgtgaggagaaaaaaatgtttgtcataaatctttcataacttctcaaacttcac

SEQ ID NO: 265759 - DNA, 669 bp, Homo Sapiens
  misc_feature (244)..(244): n is a, c, g, or t
taataatcaatcaatagatggatggatatatagataggtagctatagagaagaaatgataaagcaaatggggcaaaatgtcaacagcagtgaatccaggtaaaaagttccttttacggttcttacaacttttttgtaagtttcaatgtttttccaaataaaatcttttttaaagatatacatgcaatttcaggaagtgtataccaaaaacaatccacagtatttacctctaaggaaaggggaanagagggtttttgagcaggtgggacggagtaagattgttgagaggcagagggactcagctttcatctaatgtctttctctactgtcataacttagcctgaggtaagtttgtaattagaatgcctaattaattttaaaacagcagtgtatagagtcctagaaagcgtagactttggagacagacagatcttggctgaaatcctgtcagttcccactttactcagggtgtgactttgacccagccaagtaatttccttgtgtgtggaattcctcaaaagatctggtttctagtcccagctctgccactaactcactgggaaatgttaggcaggatatttcacctctctgggcctcaagtcttttaacagtctacagaataagaagttaaccatgatttctttccaagccaatttttgctataaaagaa

SEQ ID NO: 265760 - DNA, 1481 bp, Homo Sapiens
  misc_feature (106)..(106): n is a, c, g, or t
  misc_feature (334)..(334): n is a, c, g, or t
  misc_feature (658)..(658): n is a, c, g, or t
  misc_feature (693)..(693): n is a, c, g, or t
  misc_feature (1387)..(1431): n is a, c, g, or t
gcgcagcttcgggagacgcttctggacatgtccctgaagtcacaggactgcgagatcctgggcgagacgacgtggggcttggacacacccccagggtggccagcgnagagcagcagacacagcatttctccttgagcgggtctccatctctgccccctcctctgacaaacccctaatcaaggatctgagcctaaagatctccgagggacagagcctgctcatcacaggcaacacgggcactggcaagacctccttgctccgggttctaggtggcctctggacgaagtacacggggctcagtgcagatgctgacggactttgggccccatgggtngcttattcctgccacaaaagccattcttcactgacgggacccttcgggagcaggtgatatatcccctgaaggaggtctaccccgactcaggttctgccgatgatgagaggatcttgaggttcttggaattggcaggcctgtccaacttggtggcaaggacagagggtctggaccagcaggtggactggaactggtatgatgttctgtccccgggggagatgcaacggctctcctttgcccgactcttctacctgcagccgaagtacgcagtgcttgatgaagccaccagtgccctgacagaggaagtggagagcgagctctatncgcattcggccagcagctgggggatgacgttcatncagtgtgggacatgggcagagccttgagaaggtacccgtgctcacaaggatggcctgaggaggagaaagaacccaaaggcttcagcctgcagccaaggccagcagtgcccctcaaaaccaccagtagcactagacagaggtagaacagagcgagctctatcgcatcggccagcagccagggaagactgatcatcaatgtgggacaatcgcagacccttgagaagtttcattccttggttctgaaactctgtggaggaggaagatgggagctgatgagaatcaaagtggaatgaagctctggcttttggaaggagaaccacactgtggcgggtcggcggccctcaagagacaccaggaggactgacagcgaagatcgagctcaggttcgcccacatagatcccgtgcaggagcccgcaaatggtcctgtgcaggacccctagcagtgggtggctgagccccaggtctaggtttctgtgggggacattgaatctcccagtgttcagtctcccaggactctgctgcctcagccagagcctccatatgcttgaagtgctgattacctacaaatgatttcagatcatgtttgctaaagagaaatctggaagtgtgagatctgtaagaaatgaaagaaatgactcttggagtcaagagatctggaaatcttttaatcagttaaattgtgcagcaatagannnnnnnnnnnnnnnnnnnnnnnnnnnnnnnnnnnnnnnnnnnnncaaagaaaagttaaacattaaaaagaattacagctttctgtcttctctaa

SEQ ID NO: 265761 - DNA, 775 bp, Homo Sapiens
  misc_feature (238)..(238): n is a, c, g, or t
  misc_feature (330)..(330): n is a, c, g, or t
aaaacacactggtttactcataagaaaatctgtaagaatctgaaggacatttacgaaaagcaacagttggaggctgccaaagaaaagagacaagaggaaaaccacggcaaacttgatgtcaattctaactgtgttaatgaagagcaaccagaggctgaagtaggtatctctcaaaaggattccaatcctgaagattccggggaaggaaagaaagaatctcttgaaagcgaagtgaagnttggaaggcttacaggatgctcctgcagggccacaggtgtctgaggagtaaaagccagagcaagtgccagtgtgggatggtcctcaccctgncaagaagctgggaaaactcctaggaatgcattgtcctcaccttgttatacctgcgtggcaccatgggcaggattccacatttcataggaatacaggttttcaaggcaaacccctgtttggaccatgcccttaatttcctattggattttctgttgtataattgaatggatattcctatggaaaattttttgtttcaaaatacaggaaaaacattcctattacctttctgaggctggctttccagcaattgtttcaaaggaaaatagatccccttaaagaaaaaatacaggctttagggaacaaagggacaagcagaacaggtgtggaagagagattttcaggaagggaaaaatttatagctacagagggtagttagaaaaatcataacttatatgtgaataaaatacatataagcagcatttacggtagtggcattctacttatt

SEQ ID NO: 265762 - DNA, 666 bp, Homo Sapiens
  misc_feature (229)..(298): n is a, c, g, or t
agaatctgagacagaaaaacttgttcctacccatgaaaaatagtctccccctcacatttcatgcttcccagcacttgtgggaagagcagtgcctttttgggaacaccagagaatgtggacatcacaactgctcttaaagcactgactgcaaaaatagaatgacctggggactcttgagaacagtagtgatggctgcccgctgtctgctcagctctaagttaattgactnnnnnnnnnnnnnnnnnnnnnnnnnnnnnnnnnnnnnnnnnnnnnnnnnnnnnnnnnnnnnnnnnnnnnnctgaggatgaccaccttgagaagaaagacatcagatatctctggatatagttccttaaagggactttataagtattattattacttataggcaaatttcaaacattagcacatataaagaccagcaaagcaaggggtggagctgagggaagacagaatatacagctattttctccagtactgccttaccttttctactgatattcctacctgtggtaaaaggtatctactctcacccactttcttggcccctctcctttttatgcagagaacttgaggtcttcaatgggactgatctcaccttttcctgagcttgctgtggagtgtaggccatgcagaactgccaagtaataagatgattcgaatgga

SEQ ID NO: 265763 - DNA, 497 bp, Homo Sapiens
  misc_feature (14)..(14): n is a, c, g, or t
  misc_feature (37)..(37): n is a, c, g, or t
aacccccggcctanacgttaaaatggaacccgcaaanccttttaaaaaaccagggatgccggggccctcaatccacaaagtcaaattaaccttaaaagcctgagcagacagcgggcagcccatcacctactgttcctcaagagtcccccaggtcattcctatttttgcagtcagtgcctttaagagcagttgtgatgtcccacattctctggtgttccccaaaaaggcactgctcttccccacaagtgctgggaagcatgaaatgtgagggggagactatttttcatgggtaggaacaagtttttctgtctcagattctatcttgttgacatgtgtgatgctgagataaggagaccactctttctggtggacgcccttaatgccttcgggagtttacatctcattcttcaaaatgtaccactcggcctataaggaaagccaggattgtaaatgcatttgctcacgtggaaataacctacctagcccatttgcagatt

SEQ ID NO: 265764 - DNA, 478 bp, Homo Sapiens
  misc_feature (392)..(392): n is a, c, g, or t
  misc_feature (415)..(415): n is a, c, g, or t
  misc_feature (432)..(432): n is a, c, g, or t
  misc_feature (438)..(438): n is a, c, g, or t
  misc_feature (445)..(445): n is a, c, g, or t
  misc_feature (460)..(460): n is a, c, g, or t
cggttacatgaggcaggtgtgagggacccgagcactcctgaggagggaagaacactcctcttggccatgagtgtccatcccaaagctgccctgcagcctagcccagtgcagattgaatcagaaagccaaagccccttccacccgcttctctcaggcaagctgcctgcaagagagaaaagtgtattagtgcaggagcttgtgtctgctgaggatggcacctggccctctcctctcaccacatccgggtcctcctgaggaccggtcccctgtccccggtccccagccagctcagcctgaccaggcttttagaggctccgcaccccagcatcggccagtgctgacccttgttatggctgtttgggtccccgattcattttcattaacagccttgnccttgttctatggccttttattnagagaggattccagaangggttncaagggnggcattgattccttncttgaggtttttttaagt

SEQ ID NO: 265765 - DNA, 927 bp, Homo Sapiens
  misc_feature (12)..(12): n is a, c, g, or t
  misc_feature (628)..(692): n is a, c, g, or t
tttcggcacagnacagtatccaaaggagctataccaaaatctaacaagtaaattttggattttgcctctttgtgctttaaagtaccaggatttctgtctctatggataggtcttggagaatgttaagtaatggatgaaactttttaaaataatttgtaaattttacctaagtaggacagtagtccttactgcaatcaaaataatttactgagcacaactcctgtaaattaatctacagtcaggctagtatgattttaatatgatttgagtaaaaagataattttcaaggaaagagtaatcatccatcaatttattataaagccagatagtattcaatttatgtcaagaacaaagaaattgcccttttaaaagcatggtacgtgaatgctttttgaggcacagaagtatgctaagctttaacattttgtatttatttacaacccttttctaagggaaggttacttctcagtgcagatggagaaactgaagcactaaggataaatgattagtttccaatcacatcatttttttccacagacttgctgggactagctttcaggtattgacagccagccccatatattaaggtaaccaggttgaatcttccaatttgagaacccatgtatgnnnnnnnnnnnnnnnnnnnnnnnnnnnnnnnnnnnnnnnnnnnnnnnnnnnnnnnnnnnnnnnnncaaaaacaaagaaggatataataaagttaatatataaaccatgtatgtggttaggaataaattcaaattcaccagtctccaatggtgattacttttactacatagaaaaacattttagtgacttacagaggatttttatttgtgaatatttcagtgaagtttgtgttgattgttgataacactgttcatctactgaagcactttaataaaaataaaatgagctggaattagaaaa

SEQ ID NO: 265766 - DNA, 698 bp, Homo Sapiens
aattcccttatcccccttgcggggcatgcgacatgggtatggctcactcttttggtttccctgttgctcaaacccctaggaggagcatgcagacgggcaggtgcagaggccgtggggagcgcttctgggctctgacctcacggcagcgtctagggatggctgtctgtgactcccgaatccctagtgggcgtctcttacagtgtggctctttcagctttgccgtctgcagaaggattatgttaatcagctcgatagaccctctgccttatttgcaagggcagtggcaagtttaacaagctttctgtatcccaagttccttgccaagtgtacaagaagaatcggatgacacgtgggcttgaaggatgagtgcaaggttttattgagtggtggaggctctcagagagatggatgcggaaccggaagtgggggatggagtgggaacgtgatcttcccctggagtcctgctgttctcggtagacggacgcctccttccttctctgccatgccgccctgccactcccgctctttgtcactctctgccactctctttctctgctcctctcaatgtccagccacttgtgtctgtgcctgctaaggtctcaggtttctagggccatgggatgggggcatggcaggccatagtggtcttgggaagtgcaacatttgggtgcgaaaacaggaatccctgttctcactta

SEQ ID NO: 265767 - DNA, 711 bp, Homo Sapiens
  misc_feature (19)..(19): n is a, c, g, or t
  misc_feature (633)..(633): n is a, c, g, or t
cacagagcaactgtcaagnctgcttaccccctcacccagggctacagcctgttgcccagccctctaatttgtgcctctcttgtgttggtggtggtgggggttattcctttccctttcctgctctggcctccttgaaagttcagagtacccagtacaagtcagctttaaagtacagcttttagtgtttcctgggttgtttctctggggctttagtgagggacctttgccctctggtttttcttgcctcctggtttagggagcatctcacacttgttagtatctggttgttgggccagccgtgcctcctctagatctggaagccagggccaggcaggggccacgtgtgggccagtcagccactacaagatttttgctaagctttgggctgttggcagcatcttggacctcatgcctgggcctgaatgaggctctttcttaagtgtttttacaagtttgtgttttatttatggagtgacttaccccttccattcagagcagccccacccagccagcccttcagcctctgggctcctgctgcttaaaagcagagccgcctggttggtctccaccctgtgcattgggagcccagccaccatgctgacgggtatttttcctcataaagtttataaccangttatttatatgaatctttgttatgtccaatttgtttgtattgagtattttgattataaaataaaagtccattaacaa

SEQ ID NO: 265768 - DNA, 549 bp, Homo Sapiens
agaagggagttgttagcaggcagtaaagacttggagcccattttgtttttcctgctactttcctgcttggtgtcttgcctttgaggtgatgttttcctcagacccctctgtgtccttcttgcttcctgggggacctttgtggaactagaaaatagctgtttactagcctggagcaaggagcctgagtggtgagccggctgcataaggaaggcacagcagctcatgcttccctaatgcttcactaaacatgcaagacacaaaaggacccagagggctccagcaagggtctggggaccgaacgtctaagcttggaaactggctggacttgtatgggtaaaaccaagagtttttgtcttagctctcccgcctcacagctttgaactgggggtggctcttggtctgcatttcacatgcacggcacctggagaagtgctgctagccctggcacctctgtggggttctggcctggcggagacttttccggccacggcttctccaataggttgctggtggcatctccagcaattggtggtcattgagttggaaaag

SEQ ID NO: 265769 - DNA, 194 bp, Homo Sapiens
  misc_feature (183)..(183): n is a, c, g, or t
attcttcagaataaagcttgatctgcaaagggacactgttaggatagaaatataccatcagggatcagtaatgtacagaggagtacagcaataatgtacttctctagtacacaagcaatagtatatattggcatagattttatcagattagctcagaatatcatatgaaaaaggtatattttnctgtgccgaaa

SEQ ID NO: 265770 - DNA, 426 bp, Homo Sapiens
  misc_feature (403)..(403): n is a, c, g, or t
ttcggcacagagacactaaagacgggttcagcacccacctttctttagccagctgatcagagatgctgcaaagagaacctttcggatcactcgtttacaagccttttctaagtatttggtggtttatgtttacttgaacggctccatgttgccggtgcccagcccctgtcccctctgtcaaccccctgtcgctttggtgttggtttcgttcccgtcttcagcaaaacgaccttggaacctcaatgggggctgctttgctttgggaggttcttgttggtgggaccagagctttgacaaacctcctgctccttggtgggcacctctcctgggaaggacgttcacaactccagggtgcttcagaatgcctgtggaacaaggaaacccagtggcctttggatttttncctcccacaatgggggaaggtga

SEQ ID NO: 265771 - DNA, 936 bp, Homo Sapiens
tacttcatgtgaaaccttttcatgcatcagcttggttaaacatttaaatgactgccaatgttcaaagtagacaaaggtttggaaaatgacttaatagacttttgtgagagaataaagtgagtacagagtttttagagagtaatttaatactgaatcaattaggaacacatttggctgcaagtaacagaaaaccagatttactgcagcttaaaccaataggagtttattcttcccacataataagctgtctgaggtaggctgctgatagctttttcagcaactcattgataccagggccaacatcatagtgattctcctggttttccctcatgttatagcatggctgccacccttccaaacaccacagccacctttagggctggaaaaagagtgccagtcttgtgtattccttttacctggaaagcagaaacgcaaaaacattcctagggaccacccagaaaactttgctgatggttaattggccagaaccaggccacatggctacccccttgctgcaaacagagtgaggaaagtgagtttccagcttttaaaccagcctttgctgtgggaggcaggaggggagaagattgaaaataggtgggaacaggtattggttcagccaaacagcagtattgaccacacattgaaagctcctgttctacttctgagtttctgttctagagaaataacctcatttgtgctcaaagaaacatgtacaaggattttcacttaatggctacattgcttgcaatagcaagtattagaaccatcctaagtgtcagtaggtgaatggttaggctatgatacatcattagcagaatactgtgaggcagttgaaaagaatgagataaattaaatctaaacatacagataggtgaattttcaagacattttaaagcaggaaaaattttgaagaacagtataaacagtatggtt

SEQ ID NO: 265772 - DNA, 847 bp, Homo Sapiens
acaaaataaattaatacagatacacaaacacatgtatgcaaaattatacttttaacaaagatatatgttttacttttgaaatatgtttcatttagactgcaaaacaagcaagaagatttattatgaatcagagttgtttgtgctctcaggaaggaagataatgatctaaccaatctctttcactgggaactgttttctgaatattataaggccccagggattccagatggaatacagtataattaactcttcaccaccaaatacctatgttagaagaccttgagaataaatgattgcctaatagcaaatggcatcctacttcttgactacacttgcacctgaggatacaaaaggacaaggtgtatttaaccttagaatgtctctataagatgaaaacaagtaagtgcaatttatctccacttaaagtctaaagttggcaaacacttataagataaatgacttgctcaagactgactaggaagaagagttttagtataaaaacttaaactcattatctccttttacatggggactgaatggaggattgagaatggcccctttatgtggaagataaccatatttaatatattttcttttgttttaaggcagtattgaaatgaaaaaagaataaacttctagattctgatagtatacatggtaataatgtaatcattttagtaataattaagctatattgggtaatttttgcatgccaaacagcgtactgcatatttacatgttaaatcattccttttatgaaattttaacaatgacaatgatgtaatagcaatgattctatgaagaatctgctaagataaagaagcctaggccaggaactgtggctcat

SEQ ID NO: 265773 - DNA, 779 bp, Homo Sapiens
  misc_feature (345)..(345): n is a, c, g, or t
tctttcacaaggtgcaactttccagtgataaacaagaacaggaagtgaatcttgaatacaaccagacttcaagttcccttcactattaaagtatctcctttgctgtctgttacctgagtctcacttaaccagcgttaaacttccatcattctagcccaacagttataaatatctttatttctttttgaacaaaacatatttcctattagactggaaattttgacacactcaaatgtttgaagtcccaagaggaagacagctaaaataaaaggaattgagcagcaaagcaactcagaaaagcagaaattgaaaacagatgttaaacctctttaaaacaaatttttnactaatagcctcaaccaaagctattttcagtcaactactagaaatattctaccctagtcaaaagttctcaacaagcttcctaggtcatgagctcctcaagggtgtgggctaactctttccagggttctatctaccacccagcatcatgcatgtcatgactctccatcatgggtgattttgccccccaagtgtcatttggcattatctggagacatttttagttgtcatgactggggtaagactggggaaaggaggttttgctaacagcatacactgggtggaggccagtgatgctgccagccaccctgcagtgcacgggaccgcccccaccgcaaagggttatgcaactaaaatgtcaaaagtgctgagggtgaggaaactctagcttaggtcaatgatgccactgcccttcatgttcaaatacaaaatcactt

SEQ ID NO: 265774 - DNA, 422 bp, Homo Sapiens
  misc_feature (342)..(342): n is a, c, g, or t
  misc_feature (402)..(402): n is a, c, g, or t
  misc_feature (407)..(407): n is a, c, g, or t
tcaatacaatgatctaaatctaaaatctttcacaaggtgcaactttccagtgataaacaagaacaggaagtgaatcttgaatacaaccagacttcaagttcccttcactattaaagtatctcctttgctgtctgttacctgagtctcacttaaccagcgttaaacttccatcattctagcccaacagttataaatatctttatttctttttgaacaaaacatatttcctattagactgggaaattttgacacactcaaatgtttgaagtcccaagagggaaggacagctaaaaataaaagggaattgaggcaggcaaagcaacctcaggaaaaggcaggaantggaaaacaggatggtttaaccctcttttaaaaccaaattttttacttaataggccctcnacccnaggcttttttccgaa

SEQ ID NO: 265775 - DNA, 436 bp, Homo Sapiens
aactaaccaagaaaaataatcctacccctaattcaaaaaagttcctcaaacaaaccttcccaaggtccatgaagctccctccaagggtgtgggcctaaactccttcccccagggttcctatcctacccaccccagcatccatgccatgtccatgaactcctcccatccatgggtgattttgccccccacaatgtcatttggcattatctggagacatttttagttgtcatgaactggggtaagactggggaaaggaggttttgctaacagcatacactgggtggaggccagtgatgctgccagccaccctgcagtgcacgggaccgcccccaccgcaaagggttatgcaactaaaatgtcaaaagtgctgagggtgaggaaactctagcttaggtcaatgatgccactgcccttcatgttcaaatacaaaatcact

SEQ ID NO: 265776 - DNA, 1123 bp, Homo Sapiens
ccctttgtaagtgacccgccgcttctctctagttacctatacgattttttctttcacatctaccttggagaatctgatgactgtgtgtcttggggatggttgtcttacatagtatctcacaagggttctctgcatttcttgaatttacatgacaacctctcactaaagccatagtgtctatattattttgatgtaagttgttaaattattattttttactgctaccacaatactgctgctgttgctgctgctacattaatttatgttgctatgtcattccagtgaaaaatctcaactttcaattatagtgcagatacactatgtaaaatcacatgtttaggttccaagtaatatatgggcctaaaggaaatcccaaaaatgggtaataatcccagttcagggatgccatacacttcttaacctgcaggcatccccactcaagaactgcctgcctatggtgcctcccactggagcacttcctacccacagcacctgagctgccactgccagggcacctacctatggccccctgccatcctctacagagctattgttttatacatcttacacattagaaaacttagactcaaagttaacctcatttgcctgtgtcagagccaggattgaaacaccagtctgtatgactctataaatcacacccttaactcagtgagctccgaaggcttttgagtgtgaatgctgccacatatcctgttttctaaaacaggcttattctgactttcacagatcacagtgttctcccagtgtgtgaaagcaagacctgaaataaacttttatgctgtatgtgctaacatgcttagggctctattttcataaaacattaacaattttaaagatgatatctaataaacagaccttgtataattatctttttaagattgccaaatgttttctaatatcttactcattgtactaaaccctaggcttctgttcattttaattttaccataaaggtaaaaacatatatataagtcaataggtaactcatttctttcattaaataatcaattaaatacgtcatctatgatgtacaaggcattgtatagaacactatattgccaatcaaagtgctagtaaaaataaaagtttaaaatgtgaaggc

SEQ ID NO: 265777 - DNA, 891 bp, Homo Sapiens
cttgaaaagcacttgctgttgatctgtcacatagctggccaaaggtgacttgattcagatgaaaatagttagttagtagttcaggttattcttgtttcattacttctgtttctctcagtctttcttgaatgttctgttttacttgtagaactgacacatgagtttctacagattttggagaaaactcccaacaggctcaaacgcatttggaattggagggcatgcgaggctgccaagaaaacaaaagcagatgaccgaggaacagatgaaaagacttcagaggcagacaatcctcaatatggatttcccagagctcttcagacacaaccattgcaggtttaatgagcatgtcaacttctaccacaagtgcagtgccttccctgccagtctccgaagagtcatccagcaacttaaccagtgtggagatgttgcccgggcaaccgttggctgtccctccccaaccttctttcaaacctagaaccctactcagggtccatcggacctagtgagaatttagcaccttacaggagttggatcattcccttacccacaggatggttccaaatgcatttatttccccagaagcagaatagtaagagtgtgccatcagctaaagtgtcactgaaagaataccgcgcgaagcatgcagaagaattggctgcccagaagaggcaactggagaacatggaagccaatgtgaagtcacaatatgcatatgctgcccagaatctcctttctcatcatgatagccattcttcagtcattctaaaaatgcccatagagggttcagaaaaccccgagcggccttttctggaaaaggctgacaaaacagctctcaaaatgagaatcccagtggcaggtggagataaagctgcgtcttcaaaaccagaa

SEQ ID NO: 265778 - DNA, 536 bp, Homo Sapiens
  misc_feature (26)..(26): n is a, c, g, or t
  misc_feature (92)..(146): n is a, c, g, or t
ttcggcacgagtaaattcttaaaatntgaccacgattctgaccttatggactttgaagggcagatgttgtagtctcattgctttcgtgtccnnnnnnnnnnnnnnnnnnnnnnnnnnnnnnnnnnnnnnnnnnnnnnnnnnnnnnntggtgacatggttcttaggagttaaaatgagaaaacccaaggagccgaaagcatgtctctacggggaaaggttagagagcactgactcaaaccatcgtctccaattatgcagttttaatgaggaagcaagcccaaccttgaacattatttaagccagagttatccccaataagcattttcctacccatgagtggtagattaagtagcattgagtcatgtagtgaaagtaatgacccttcttcataccatttcaatgcctctggtaagtcaagagaaagtctttgataatagcctatttttaacacctctcacccttgtttgtcagaaagagcagacctcagattcagagactttagcaagcaaagatatccagtaaagaaatgaaataat

SEQ ID NO: 265779 - DNA, 652 bp, Homo Sapiens
  misc_feature (104)..(104): n is a, c, g, or t
  misc_feature (212)..(212): n is a, c, g, or t
  misc_feature (235)..(235): n is a, c, g, or t
  misc_feature (277)..(277): n is a, c, g, or t
  misc_feature (554)..(608): n is a, c, g, or t
  misc_feature (621)..(621): n is a, c, g, or t
  misc_feature (633)..(633): n is a, c, g, or t
cagagaggaaagaaccctgggaacgggaggcgaagggataatgagctggggatgggagcagtcgcaggaagaatcctctgcctggagccggcaggctccaaccncctcagcttgagagtcaggagccccatagtccccacagcaataggaagcaccagctcctggtcccgaaaaaaggagggccccaactccagggactgcggcccgccctnggagctgagaacacgcggactcncagggagaggacagggcttcagggacccgagagccgctctgnagcacccggggatgtgactgcctcagcggcagagctggaagggccctcgaatgccattcacaggaacagccccaggaaccccagggacttcagaagggctggtttgtccgaaaagtgagaggaggcggaggagagagcctgcgaggtcaagctgcagagaacatgagcttctacctccagatgtgccagggtgcatctcaataaacttggattttggccaggcgcggtggctcaggcctgtaatcccagctctggaagctgaaggatagcttgagcnnnnnnnnnnnnnnnnnnnnnnnnnnnnnnnnnnnnnnnnnnnnnnnnnnnnnnntgacagcaagagntcttgtctcagnaataaataaataaaattta

SEQ ID NO: 265780 - DNA, 763 bp, Homo Sapiens
  misc_feature (142)..(151): n is a, c, g, or t
  misc_feature (342)..(517): n is a, c, g, or t
  misc_feature (531)..(574): n is a, c, g, or t
  misc_feature (649)..(692): n is a, c, g, or t
tagacagggtcttgttctgtcacccgggctgaagcataagtagcatgatcacagctcactgcagtctcaaatccccggactcaaagggtcttccccactgagtagctgggaccaaaagtgggtgccaccacaactggatcannnnnnnnnnctttatagagaccaggtgtccctatgttgcccaggctaaagagtttaaaattatgcattgaatcagtctgctctgcaagtaacataactacctgccaaataaattaagcattctttaaagaaagaaaactacatcataacattcaacaacataacaatgttctgcaacaaataaaaatttactagaaacannnnnnnnnnnnnnnnnnnnnnnnnnnnnnnnnnnnnnnnnnnnnnnnnnnnnnnnnnnnnnnnnnnnnnnnnnnnnnnnnnnnnnnnnnnnnnnnnnnnnnnnnnnnnnnnnnnnnnnnnnnnnnnnnnnnnnnnnnnnnnnnnnnnnnnnnnnnnnnnnnnnnnnnnnnnnnnngctggtttattggnnnnnnnnnnnnnnnnnnnnnnnnnnnnnnnnnnnnnnnnnnnnctctatcggccttatttacagttttgcaagctgtagaaatcaaggctcattcacagcttccagaaactatagggnnnnnnnnnnnnnnnnnnnnnnnnnnnnnnnnnnnnnnnnnnnnagggggtggactacttttcatgttgcaactttctgacctcagccagaaaatgatatgcacgtttaagagct

SEQ ID NO: 265781 - DNA, 1141 bp, Homo Sapiens
acaatggaatcaggatcactgcaaaattggattcagcagtcactccttggacatttgttatttgacaccaaatataaaaatatctacccagatcacatccatgactcttatcatccccaaagactcctgctgttccccatggttccaatttcaaaaggtagaaaaggatacgctagtgaaaagtcttcctccccatctcccacctctgtgtcaaccccctgtggtaccaaggcacaggtatgcaagtgacacacagtcccggaactggaatcccacctccatctctcagaagctacaccacctggggtgattcctgaactcttttgagcctcaggtacctaatctgaaaatgggcacactaataccggccttgcagaatggatacacacgttgtaagtggtaacttgtgtcaagtgctgggtacttagtgagtatctgattcatatcccctcattccccagggccgtatgtggtgctctaactgggccatgcagcagtgcacgagctctgtgcttggatcttccctaagtctggaatgctcgtgcccctctctgggctcccttcccttgttcctctggtgagttttccctcaggcttcaattcaacatgacttctactgcaaggagtcctccaccactgtccaggcagagtttggcattttttgttgtctttactgcaaatggttccttatgtgttcctgcacatcaacacactttgttccagataatgctaggttcacaagtttgaatttttttcacctctttatcccttgtcccaattataactcctggcacatagtagatgatttataaatgttgactgatgaatgaatgaatgaatgaaaaagcagtccccaatgttccataatgccccagaaactgtgaagaacaaggctatgtacgagggtaaattttattttcatgttgcctgagagttgcagaaactaccttatttcaacttttgtttctgagaatcatttcaagatgcttgggtccaactttgcttcttagtaactggaatccagtgactgtggtctaatctttctttggtttctgttgcgggaatgtctcagaatctgaagataatgttcacggatgaggactgtggatgcaaagtacagaaagcaatagcgattgggccg

SEQ ID NO: 265782 - DNA, 317 bp, Homo Sapiens
  misc_feature (25)..(25): n is a, c, g, or t
  misc_feature (37)..(37): n is a, c, g, or t
  misc_feature (76)..(76): n is a, c, g, or t
tcccagacgcacccaccttaagagntgtaacacctcnacccgaggttccgcggcttcattcttgaagtcagtaagnccaagaacccaccaattccggacacagtagcatttgggaataataagaattgtagctgggcatggtggtacacgcctgtagacccctagcagctgccatcatcctcaccatccgcatattattgatatattaactctttgatggcaaccatggcttatcccccctatctccctatgccctacagcagggcagtggaatggttaagaggctttgaagtctaagagtgctggcttaaaaccct

SEQ ID NO: 265783 - DNA, 950 bp, Homo Sapiens
  misc_feature (129)..(138): n is a, c, g, or t
  misc_feature (326)..(326): n is a, c, g, or t
aattccggcacgaggtgcttatggtggtagagaacgtgatgggaatggtggtagtggcgatgatgatgtcctcatagttgtaaaacaaaattttggttattttcacttctctagtctggaaaagagaannnnnnnnnnaagtcttaagcagattgcgactacccagattatgaaatgaactatcccctctcttagccaggtaggaccttggtatttagtactttacctcagttacctttctcttactatttctgaaaaactgacatcttttttcctcgtttaatttctttaaggttagggagaattactctctaagtgtaacgatncaattcatatggaggaattttctttatttctggaaccatatttaacagtttttcctcagttgtttcccaaactctggccagttgttcttttgcaggtacttctctttagttgaccttccaaatacttttatcaggcatttaaattccaaccaatttgtagtttttagaaaagtttccttctcccgagtccctttactttccccccgctttccccggtcaccctgcctccttcctgccccctcgccagaagacattggttttcctgctgtcctatgtcacctccggagaaggagggagcaagaggctgcctttaccccatcatttcttttccctgtcactacctgttagtaatgttaaagacaggtcctctggttaaaacggtttctgtagaaagaggatgatcaattttaatttcctttcccaacatgggctttgattttctgttttcaaaaacaggatacacagtgagaaatgctgggcgctcccccactttgtgaccctcatctacgatgagttatgacgggttaattataactgcagggaattatgcttatatcataggagattgatattttctgtgaggaaattagaaagctgttaggaaggcccagaacatgcagaaag

SEQ ID NO: 265784 - DNA, 454 bp, Homo Sapiens
  misc_feature (386)..(386): n is a, c, g, or t
  misc_feature (417)..(417): n is a, c, g, or t
  misc_feature (430)..(430): n is a, c, g, or t
  misc_feature (438)..(438): n is a, c, g, or t
aaagaactgaatcaggcaccccaaggaatgctcaatttcttacattctcaccctaaggactcttaattccatctgtagtgaccaagttatggcttaggaagtttcatgttgggaagatggtacatggtcctcatttatagcaaccttttagttagaaatgaatcatatttatattctatgatgacagctgttccctgagagtgaaaggtacattttggccagagggcagcaataggaacagtaggccttctttgtccatcttttctcgggcgtaagaccccagttctgggggcctggaaggcttaattgggccccactttggaagggaatcttctggattttctggcctggcatttcccaacattggggcacccaaaatgttaggnccatggggaggattttaaggatttcagtggntgtggggcttggnttctcctngggtgttaccaagttt

SEQ ID NO: 265785 - DNA, 890 bp, Homo Sapiens
  misc_feature (279)..(466): n is a, c, g, or t
ttaaaaaatcaaatttaagctctctccaagtttttgtggaaaaacagagaaaaagccctttctatataactactaccaaaatgatcagacatacatatccttagttatgatagggtttcttacatggtgctgggaattttgtgattgtgctgaaataataagtcaaatgatagttaggcccacagaagtataggtctcatctcccagaaaagccctcttttaggatttatggcattcacataagtgcatttattaatcaggtggtcttgaatataggannnnnnnnnnnnnnnnnnnnnnnnnnnnnnnnnnnnnnnnnnnnnnnnnnnnnnnnnnnnnnnnnnnnnnnnnnnnnnnnnnnnnnnnnnnnnnnnnnnnnnnnnnnnnnnnnnnnnnnnnnnnnnnnnnnnnnnnnnnnnnnnnnnnnnnnnnnnnnnnnnnnnnnnnnnnnnnnnnnnnnnnnnnncaatatgaggtgaaaaattatgtatgtgtgagatagattccatgtggcacattgccttgacagagaagattcttaatgcatttcccttaatgaaaacatgtttgtgtgcaacactaagaataggtccaccctggagaatacaaatggagtcagcaacctcaactttctttgcaaaaagttcatctactcccataaccacttcccaaatttgtatcagtagtcctgaatccagtaaaaacaactcatgaaatgcctcctttgcaaggaagccttctctgatttctccgacaagaaatattggcttcttcttctgagaccctgaacccattctatggcaaagtacaggtgcttatgaacttgtcttagcttttcataaaggatgtacaatctatctgattcatcttagaatttcctacaggtcttt

SEQ ID NO: 265786 - DNA, 715 bp, Homo Sapiens
  misc_feature (185)..(194): n is a, c, g, or t
tttactcaaattattgggttttcttctactatagtaatttcatatgcagtaataatttgcttaagacattttgcttcatatgtgcgttgaaaatatcaatgtagaacttaaaatttgtatccatgctgcaagttaatgtggttgcctctgtgaccgttgaacatagtttcataataaagcctggnnnnnnnnnngcattatttaaccttttaaacaatcaagagattgctttttaaattgtctctaaaaaggtttgattttttacgaaagagagagcacttgaatatatctttatgtaccaccgtgtctctttttgttagatttttcatctgtgggtataatataaaataatccttaaaaggaaagctttacgcttgtgtttgagactaagcaacttgcattgtgtcatgacccttcctaatacccacaaaccttctgtaatactactcccggagaaaaaccccacatcctatgcataaccttagatttattttgaaatctctatgaaaaagaacagagagagattactaattgtttctgttacttcctttagaggtatgatacctatttgtaacccatgttgtaaatgttaatagccaggagtaaaatgttaaaatatattaagtagtggtttcctatcctaaagttaatatgtgaaaatttaataactaattataagtttcagtttgttatattagatatctggaaagaatgt

SEQ ID NO: 265787 - DNA, 892 bp, Homo Sapiens
  misc_feature (71)..(71): n is a, c, g, or t
  misc_feature (228)..(228): n is a, c, g, or t
aactgactcagccacgcttagttgtccgacgatgcacctggaagcctgctagctgcgcatggctcgctgtncgtaaatgacaagttgtactcaaaaaaagccacccctggtcgacacagagggctccaaaacgcattgattagccctatagagcgtggtccatcgaccgtacttccacacttctgctgacagatgtcagctgccatttgacgcactagtagctcaaanactcaattagagtcaggcacatatgggtctatcgaatatgagatgtgctaagcacaaaggaaataatgcacaccgagtgtagattattaaatcatccgatagatgttgcattttttcaaaatctgacacatcttctcgtcaaaaaaaagattcctctaaattactattctggtaatttctggttttgttacaaaataaaaacatgcatatgaagaccattttttcacatattgcagcaattaatttaccagaaaaatcatatattgttttctacattcctcccagcacatattataaatgatgagctcttgtatgcattctgttgatgcattatcattaaaaagttttctgtgggctaataaatcaaattaatgccaccttaaaagttgatgctcctggggtattacacttagctatctttagcgctcacctctctgatcagcaggatctcaaagctcagttgtttctctagctgacctaacttcaaaacgccacacccaactttctagctgccttacagcctgcacacctcaaagttcatatttccaattgaacacgctaactccctctctagatgcccgacctcgtctgcacacctagtttcttttcctcatgctttccacactttggtcaatggcaccaaaatcttcatgtttatacatga

SEQ ID NO: 265788 - DNA, 657 bp, Homo Sapiens
agccctggtacttgcatagtggcaaaatgtcccaagctggaggaaatggataagaattgggtacacatcacccgtactgggaataaacaaatgtgttctgattatttggaaaaagcagacattctaggggtagggagttctaaagccttggtgcacttgaatggataaacttcccaggagcagagttttccaagcatggctccctgtggttcacctctaccaagcttaacctaccttctgcttaggcagagcgaagaggcacctcagcataactcagatcaaaatggaagcatctcatttcttaaaagctgtcaaagaattggtgtgaggtttaaaaacgtctctgagcttgatggaaggaaggtaggcggtgatagttcatgctccctttcctccagacacttctcattttcctttcttaacctgctttgatattatgatttcttttgcttcatttgttaagttctcttacaacacttcttgttcacaagtgagtgaagagctgttctctgcttgtaacgttggaaatgggggagtgtttcagaaatgacacaacaaagcattaagccatgaaacaagaaggggaacttcagacagaattacaacagtcatttgagaatctcactgagagctaataaaagccacacacacacagaa

SEQ ID NO: 265789 - DNA, 459 bp, Homo Sapiens
  misc_feature (31)..(31): n is a, c, g, or t
  misc_feature (119)..(145): n is a, c, g, or t
gatacttttaatgaagggagattatcccctngaatgtttggtttgtatcttgtcctagacccagagttgccattctctaaatatctaaatgactattattattttatctctctcttttnnnnnnnnnnnnnnnnnnnnnnnnnnngagaaatgttgtttatgagattttgtatatttcacatacttcatattctttatatgatagatgaataatgtgtagtttttcaaagttttgagttaattacaatttaggtactatttctaaaaggaagatatatttgtgttcttactttggtggctgagattacttaaaggggataatttgctcccaaattcctaagaatggtacaggaattctaaggtgactaattcttatttcatttttttatgaatacttttatcttgaaatgtgtaatacaaatctggtcagagttctatataaaaattatattgggaatc

SEQ ID NO: 265790 - DNA, 875 bp, Homo Sapiens
aacagttgcaggatgtcgatgacagacttgctgaacgctgaggacatcaagaaggcggtgggagcctttagcgctaccgactccttcgaccacaaaaagttcttccaaatggtcggcctgaagaaaaagagtgcggatgatgtgaagaaggtgtttcacatgctggacaaggacaaaagtggcttcatcgaggaggatgagctgggattcatcctaaaaggcttctccccagatgccagagacctgtctgctaaagaaaccaagatgctgatggctgctggagacaaagatggggacggcaaaattggggttgacgaattctccactctggtggctgaaagctaagaagcactgactgcccctggtcttccacctctctgccctgaacacccaatctcggcccctctcgccaccctcctgcatttctgttcagttcgtttatgttattttttactcccccatcccctgtggccctctaatgacaccattcttctggaaaatgctggagaagcaataaaggttgtaccagtcacaaaaaaaggagaaagagaggagatcttagttaagagccgaagcttatccgttagtggggtaatttagcgtggaatgcgtcgtttaaagtggtcttggaagctgtgcgtaccgcttatgcctgaggaaccctttgcactggtatagaaagccgcgattccttcacagtgcctgaatggatggcgccttagcgtatcggggttgtgtgcgaccggaattgcgggcggcctggtttgcttctctggggccaaaaaggctggtgtttcgcgacaatgggggtccgcagttttgggttggtctaaccctttagtgcggaaaagaaatggggctagaaaacttccttt

SEQ ID NO: 265791 - DNA, 636 bp, Homo Sapiens
  misc_feature (45)..(162): n is a, c, g, or t
  misc_feature (243)..(243): n is a, c, g, or t
caaaacaaaaaacagccaggcatgatagtatgtgcctatcctagnnnnnnnnnnnnnnnnnnnnnnnnnnnnnnnnnnnnnnnnnnnnnnnnnnnnnnnnnnnnnnnnnnnnnnnnnnnnnnnnnnnnnnnnnnnnnnnnnnnnnnnnnnnnnnnnnnnnnnaatagaaactttattaaaactattttcagttctttggtcatgaccttggctgtctttgtcagaagtcatgggaaatatatngcaagttttcatttggttaaggtttggggttaattttggaattggctctgctcttccaggtttgttgaatgtacagagtgcggaagaaagatgcatcagatctgtgtccttcaccatgagatcatctggcctgctgggtaagtcttaacgttgttactttctctggaatttttctttatcgtgaatattaacaagttttttattctatgcaattgactgtattatatcttcaaagttactatctttaaattgttttctttgggtttggccacgataattatagttcgctttttaaaaattaagtaacctagtatccaaaaatagatttttatcttatttttatgcattcttcttagccatataaatatattttattctgctaagagaaaaaaa

SEQ ID NO: 265792 - DNA, 826 bp, Homo Sapiens
  misc_feature (149)..(159): n is a, c, g, or t
  misc_feature (426)..(434): n is a, c, g, or t
tgttgctccatggggcaaaccaaactggatgtaactcaagcaaaattagacactgcatactctactgggggtgtgcccagcatttgggaaaactctgtgtgacttacaagtgccccaaatttggaaagggttcctggcaaagaaatgannnnnnnnnnnaaatttctacaactacacaagcagatagtgtattaaagccttaaatggcacttggtcactggggcaagatgaccctgaaagctacaatggtctccagtacccaagctgttatcatctttgtagcttcagaaaccctccaaggaaactctcttgatgtggctactttatagtataacagaaaggtgtaagatcaagtttttcccccatactgattagctgaagagtaaacatggtgaagtctttttctttttcttttatgttgctatnnnnnnnnngatgattgccttgctttctccaggaatcttaagaataaagccaatatttctaattctaaacttaccagagatcttcttccaaatggagaaccattttttctaatatgacttgattcgcagtccctgaattcctgcactcatttgatgattcagtcattacatgtcagattgtgaaccagacactgagcccagggcaggaagaaaaatgggctcccatggaggatacacggaggttgggcacagtggatggtgggagggaacgcagataataaatggaacaacaactatcttattaaaataagataaaaacagtcaaaaataatacaaagcatataaaaccaggtaagatgataaacatgaatgccgaaaactgcttaagaaaagggtagcag

SEQ ID NO: 265793 - DNA, 286 bp, Homo Sapiens
gaggtcgtctcttacttgcactaaggctcccattctcaaaaagaaatcgaaagactgatatacagcaaggcatcaaagcattctttagaaggctcagcaaccacttatggatactgccaggaaatcattccaaacactctcattttgaaaaaggcagcagtcataagggggagggaagtggatgctgtcagaggtggcaggtgtgttttgaggccagcagtgttttgtttttaatgtggcacagttgcacgtctccagattgtgtgccacaagggagcaaaacagc

SEQ ID NO: 265794 - DNA, 805 bp, Homo Sapiens
  misc_feature (793)..(793): n is a, c, g, or t
atgaaatccttcttgagcagtttcattataaataaatatatactttttttctgattgcagaactagtaggtcctaatgttaaaacacctggaaagcatagaaaagcaaaagaataaaagaattctgtcaaactggatatggttttgaatcatgtttttctgttataccatgactattttcctttgtcattcaaactgcttcagaattgtttaaaattaaattgacaaatttgaggacacaaaacctttctaggaatatttatctttgatgaatggaaaactcttggaaagactttgtttaaagaaatttccctaaagtattggagtccataaggtatgatgaactttaggctccttttaaaatatattacattttgtttagggtcaaaaatgttttctgcttcagtaactactgccagtttatgtaaccccatgttattatctagatattccatcattccaatttctcaaggctagtatgaggattccttggttagtattttttacaaagcaacattgtatatagttccagttaaccacattaagtgctaacttcaggttctaccactaggaattaaatatttctttgttaaggctacttttcttgtattaaaaatactgccctgtggctcctctcatgcctgtaatcccaacgtgctgggattacaggtgtgagccaccgcgcctgtccctattgctcactttttaagcctgttccccagataggattggagaaatatgccaattatcacaaatggttttactacatttcttcttgctttatgaattgctgnattaactgcagt

SEQ ID NO: 265795 - DNA, 1093 bp, Homo Sapiens
  misc_feature (14)..(14): n is a, c, g, or t
  misc_feature (46)..(80): n is a, c, g, or t
  misc_feature (91)..(91): n is a, c, g, or t
ggctgaggtgggangattgcttgaactcccaacctcaagagatctnnnnnnnnnnnnnnnnnnnnnnnnnnnnnnnnnnngccaccacatncggcctcccaaatccttctaaaacaagagtgaagaaacttttaaaaagaaaggagaaacagcaacgaatttttcagccctgaagcaggtggatagatgtggtgagctgaatctgaaattggtactggggaaaactgagaagaaacccaatttgcacccccacacctgcttggggctcaagagttaatagtaccagagactctagggatccctggaaataggaatgaagtgaggctaaacacagacagctggctgaacatcttttaaagagaccgcttaaagctcccctcagctcccattgcctccctcagtccctactgcaggcatctgcctttccctagccctgatatgtgacaggcttattctctggggagggtgcaaaggaggctctctggacatgggcaccaggcacagttgagggtggggcaccatattgaaaacgggaagaaggagacttgacgtgcagatattgagacctccagccttcttccctaactcgactcccgaaatgttgccaacacccagaattaaacccactgggcaggatatttgaagaggcttatctggagacttttgggaccagcccaagaggtttctgggtaaaatgacttggccaaagcaccctatgggccaaacagagtcccatagttagcaggcctcacccaaatgcactcagctccctgttctcttgagtgtccccttttaagtctccggggacaaccaagaatgagaagacatttgggaaaactctgtggtgtacagagacaagtaaagaaatcagaaaaaatacatttagaggaacagagaccatgcagagagggaaaaatgtatatatgaatactcacatgtaaaatccttaaatcaaataagtgaatgcattcatgacacaaaagtgtaatgcttgttttttaaaaaaggaatagaaaggaactcttggaaataaaaaatgtaatagtacaaattagagactcaggagcagtgttggaggataagcacacatccc

SEQ ID NO: 265796 - DNA, 558 bp, Homo Sapiens
  misc_feature (29)..(29): n is a, c, g, or t
  misc_feature (258)..(258): n is a, c, g, or t
  misc_feature (286)..(368): n is a, c, g, or t
taaacgagatgtggcacatcactgcatgnacctagcaagtacctagtaaaatgacataaactgatccctcaggtttttaagttgaaatagaaaggtttttattgtagcttttaaattctgtagttataaaggatgatattttcatatattgtattgacatttaaaaataacattctcaaatcactgttctaaatcaggaatggaaggggatttccctaacctgatgaagggtgtctatatctgaattctttaaaaatnttaaaaaataattttgatttattttttnnnnnnnnnnnnnnnnnnnnnnnnnnnnnnnnnnnnnnnnnnnnnnnnnnnnnnnnnnnnnnnnnnnnnnnnnnnnnnnnnnntgggctcaagggatccttccgcctttgcctcttgagtagcctgatagagtatctataaaaggcttaaagcaagcatcatcttaaattggaaaatgttgaaagcatccctttaaaattaaaaaagtagaaaagtatgccggttagaaccacttctattaaagattgtattgatggtcttagccagtgcagt

SEQ ID NO: 265797 - DNA, 804 bp, Homo Sapiens
  misc_feature (55)..(67): n is a, c, g, or t
agcctgttttccccactcttgtcattttaagtcaatagatttcctgggtttcttnnnnnnnnnnnnnactttgccttttcaggggataggcatctccttagatttttgtttttcttcacttagggtcagctttatgattcgttcttctgctgtcatcctttttcatcctattcacagcctgtaccggtgagggaatttgtctcaaaagcattcagcccttcaaagatttttattgtggtgaactcagaactgataaacagaaaaacagaaacagaaaaagggaactgatatgggggcgatcttgatgcgggttgtgtctctcatgcatgataactcagaggacaggctcctcggtagtgcggtagtgctaactctgtgaagtttcttcaccctccttcctagccctggaggcggggtgattcatagctcctgttccaaaggcattcagcagccattcgacctgggaaaagaaacagagttttagaaaatacaggccaaatgtagagacgcctgtgattaccaggatgagtatgtcagtgcaggtggcttctgaatttctgtttctgagtttgtttggctgatgcctaaggaaaggggtcccttacagccctgttttataccttagttcttggtggcaacgtgggtgttgctgatctctctgatgtgtttttctgtgcactgaaaacaccagacatgctccgtgacatcctcggagcatctcccatcataatggagtgttcctaacctgacaaagaatagcatattatctccccatctactcaaaataaaattatagtaaaattt

SEQ ID NO: 265798 - DNA, 741 bp, Homo Sapiens
ctcaacggactcaccagccctctctgtgatctgctcttcagaccatgtcattctccaaggaccaaagccaaatttccttctttcaccttcaaagtgaaactccacccttccacagaaatgtcctctaatcagtgcgtcacccaccacttctgtgccggtgtctgtgcaaccctgcgattgtcctggtactcagcatgagacgctctcaggtgctgaaggaatttcagcttttataacccacacaggctggccaaaattgtataaccgcaccacctcattagaaatgctatttgtgttacacaacagccaccacccggttacaaacagttactgcatgccctctattatgggttccccttaacatcaatctgtagcagggtttctcccatgggcaggctgggatagtctattgtagaaacccaagcagctgctgagaatacgtctcaaacctgcactaagaaggaaaattaaaacctatctttgtaaacccgtcagttcagatgaataagtccacccatgctgcttccagctcagtgaaaagggagattaattttactacctggtaagtttccatttccccaatcagggcccaaagacaattgttttcaaagctcaaaaaatttcagatctcaaggtaggagttcatcattaaaaggtaggcaaagccaacaagtaactgtcacattggagagctgactgctggggtccagttcaacgtggcatccagcaggcaggtctcca

SEQ ID NO: 265799 - DNA, 726 bp, Homo Sapiens
  misc_feature (575)..(616): n is a, c, g, or t
attgccagtacagtgatttaatatgtaatatcatcattattaaataactatgatttatcaaatagatattacatattatcacataatatatcaaatatatacagatgctattatgattaataagtttactaaaatggaagtcttttctcactgtgtattgtctgaatcaacagacactaaaaagatgtgcagtgtgtcaaatattagaagtggttggttcttattctcaaacagactgtgggaagcactatgacagattttctttccactgttaaatgcaatggaggttttacttggcaacagggccattgattcatcaggtccatgtatttgaacacatttactcccaactaatttaatgatgtaaattctaggcatttacctatcttcatccagaaattagctacctgatctaggactaaaacacagcttgaaatataaaagctagtgcgcaacatgggctctggtggctaggttacacattgggtccaaataaagctgtgtggacggaaggcttggagtggcacgaagaacttagcaatgactactaagcagtctgatattcaggcagaacnnnnnnnnnnnnnnnnnnnnnnnnnnnnnnnnnnnnnnnnnncaagcacccaaaatttaactcgtctgaccggcatgttctaagtgtaaaatacacattggatttccaagactttgggcaaaaacattttaaattacatgtggctttgattc

SEQ ID NO: 265800 - DNA, 798 bp, Homo Sapiens
aatggggaccagactctctgggctaaagtcccctccatgcactctatgtaagtattagattgttatcatcaagcgctttgccccaggtgcacagctggggagtggcagggctgggatctctgatgtcctgatacagaagtgagtaatactctatatctacccacctggggctcatagactggggtgactgggtaggcacaggaacctgggctccagaggggggtgcctggtctttttagttcaagatttctgccaggcagtggaacaggcaggcaggtggaccttgagtcctattgatgccctagttgggtgcacttaattagagtcactgggaggcatttgaggtacgtgctgtacccagaattcctcagcttgcacagcttccccttaccctttgtttctgattttgtcctcgtaatctcactgttttggggaatgaattcctccaaaaacaccccgtttccctgcctgtggagccaattaagccaagcaaggctgtacctttaattactgctgccctcatttgcatctggctgccctcattatagtgctattagcagagtgcaggggtcctcctgctggcccatcaggagtggtgcgtgcacagttgtggggccttgctttggtggtctttgctgccttctgggcaaaatgaaggatttggagtagacagcaagcaggcatacatcctgggccagaagcagcctgcggagctcatcgtggcttgccttaaattgtttctcaacaataaagttgttgaaaaacaatttgtgttttctttctccttattaaaaaccc

SEQ ID NO: 265801 - DNA, 707 bp, Homo Sapiens
  misc_feature (679)..(679): n is a, c, g, or t
gagtgagttaccaagccaggcctggtcagggctctttgaaatgttttccttgtcagactgttaccctttagagacaaggcctcacaaaccaagtaaacacttctatccatcactccttacagtcggcgatggcttcatgctgggctaaatagtatacaacaggagaaaaggctcagcaatggcagtgaggaaaaatgctcccttccctgaaggacaatgagtctttccagaacccaggagacaggggagacagccttaggagaaagcacatgtacagcattgctcaatgctgttcttggagcaatctgaatgtgctaaatattcagaaaattcctgctgccgagggaaaaataaccaaactcatactattttcctagaagttcttacttaaataatactacccaaagaggagtgaaaagcttaaattctcaaatctggatgaacaacataatggctgtattgggagcaggcacacagaacatagccactgagtgtacagttttggaactggagagctcttggtagagcagggattgaggagtccacacaatctgagctgctttccaccaaggcatgtcaccccttatacatattcactggaacaaagacagctgtattttctagtatatctgcacttctaggggcaggtgggattacaggagtgagttaccaagccagnccagtcagggctcttggcaatgctgtcc

SEQ ID NO: 265802 - DNA, 488 bp, Homo Sapiens
  misc_feature (90)..(90): n is a, c, g, or t
ttaacagtatctaacacagaccctacaatcagcatctcccataagcaagaaccggggttaggttatgtggaagttcacaaagatgaagtnaaataaaacacagcatcccctgtcatcccaggaccaaagggataggagtgaggatgatggaagtagaaacttaaatgtgatgacaataggatagagattgattccaaaaaggcatgggaatctggaaagttctcaaagaaagaatccgaaggtgttaagaaaggcctttggaaggtagaattggagagaacagtatgaacaaggactcagagccagaaaaattgggcgggcatacaggggaaagattttagtggtaatgaggaaacaaggctgggaacacagaccagggccatatcaggtccggcctcagcaggagaaatataagcaatgggaaccatcacactgggtgaaattcaatctttattttaaaagatggtacacaaccatctgccaattta

SEQ ID NO: 265803 - DNA, 402 bp, Homo Sapiens
  misc_feature (335)..(335): n is a, c, g, or t
  misc_feature (392)..(392): n is a, c, g, or t
tcattgaaaaggggctcagaaggctaaattagatgtaattgttaatgggttgataaaaatctaagtctaaactaatagcttcagcaacggcttccccatcatctctcctgctgcttgccacactgttctccatacaacagcctgaaagagtttttaaaagtaaaatcaaatcctatgtctcacctatttaaaacctttctataccttcccattccactctaaactggatctctaggctctctcggggcactggcatggatctggcttatccttccaacggcattttcctcattcactctcccctttttacttcattaatggccacagccaggatngggggcctccctttcttatttcccattaaaaccattccaaaacttttcttggccttnggggggttct

SEQ ID NO: 265804 - DNA, 913 bp, Homo Sapiens
  misc_feature (358)..(358): n is a, c, g, or t
  misc_feature (367)..(367): n is a, c, g, or t
  misc_feature (378)..(378): n is a, c, g, or t
tcattgaaaaggggctcagaaggctaaattagatgtaattgttaatgggttgataaaaatctaagtctaaactaatagcttcagcaacggcttccccatcatctctcctgctgcttgccacactgttctccatacaacagccctgaaagagtttttaaaagtaaaatcaaatcctatgtctcacctatttaaaacctttctataccttcccattccactctaaactgatctctagctctctcgggcactgcatgatctgcttatccttccaacgcatttcctcatcaatctcccttttactcataatgccacagccagattggcctcccttctattccataaacaatcaaaactttcnttgcctctnggatcttcacnatttatcattccctttttcataaaatggtgttcctcaccttctcatgattggctgtctgttggcatgaagatctcagctgaactgtcaccgccctgatgagatgagacatccctgaccatcctctcccaaaaacaatctgcttcactcatcacatcacactgtttctcccctcctagctgttaccacaacctgcaactaacttatcagttgtctactttattgtttatctgtacctgcatagggaccttaggctgtcttgcttccctgctacgttccaaaaagcctataatcatgtccaatgtcatagagggccccatacatatttattaaataaattaatccaggaaggcaaagctggatcaaactacatcagcacatctggagaattatagcagtcagaggaggaaaactgtgagttaggatggaatccagcagaatggttcactacctaagccaatagacctgaaaagtcttctatcattccttgactggacacttccctgcatgaaaccacgccgagccctatgcagtctc

SEQ ID NO: 265805 - DNA, 511 bp, Homo Sapiens
ggaggtagtgtctacagagctacaagctcagatatgattatgccatgcccccgcttaaaaccctttggtgggtccctcaggatagtatccaaatgtctaagcatgctatttataaagatggttctgccttctagccttatgcttcacctacctattctcattgctttccctctctattacctatttccctacatgaacttttgcagatccaggactttgttgtctgtctgaaatactttcatttggttgttcctccagatcactctccgcccctctatatctgtgcctctggagactgaccttcgtggactgccttttccaggctttgcttctcatttgagtttggcctatgagaggcataggcaggagatttagagggtgagaggaaagtatagttaggatattgtttgcctggcttcttcctgccaggatgcagttggtgtgccatctttttcctgccaagaccttgactaatataaccactcatcttccaatacactcatttgcacac

SEQ ID NO: 265806 - DNA, 415 bp, Homo Sapiens
acaaaatggccagaaacttgtttgtgacaacatgtctagcaacttgcttggcttcaatcacttgcaaaagaaataacaaaattattaaaaatggaaatgaaatctttcattttgtttcaccaatgagaaaagctggtcaaagagattgtcctgagaagtttgtttcctcatctcttaagaaagctgtgatatgactgaacaagtgacttgtgtttttcatcataattataaagattatgagtagaatggtcaaattagaagaccattttaaaatgcttacttgatgtactacaacttgagaatcagccaagtattttaaaaggagtatttaaattagatcataataaattgataaagaaacaatccctccaatttaaaaattaaaaaacatgctgtggccaggcaccatggctca

SEQ ID NO: 265807 - DNA, 609 bp, Homo Sapiens
  misc_feature (373)..(382): n is a, c, g, or t
ggccgcttaattaattatacaagaggccttgaaaagaaacaaagcaggaaggagaagtaattcagaggtaggtatagtgagtgtttaaatatccccaaatgttaatcgtaacatactggaaagctgttacagtagaagtgttagcaaaaattggatgccacaacttatctcaccattcctttcaagcaagtgagggtcagaatgtttcttgcctatatctgcaaaagatcgaacaagaggaatccgactggtgaatcttttctcattctgatgatgatgtctcttcagaagagcttctctgacattctctcgtatggactcgtctaattggccagaagctatcatgttgtctaataccatatctattcaatgnnnnnnnnnntaaattactaaacactcagatgaccataatataggaataaactgtgagtgaaaccttatgacaaaaattagaaccttaaatagctctagaaagttttattctgtcacaaataatcaatgcagaaatgaacattatccaaccaataaaaatgaattacaaagaccgccttattttaataaatactattatttataaagaggctactattatatactaatagccttcct

SEQ ID NO: 265808 - DNA, 750 bp, Homo Sapiens
  misc_feature (475)..(652): n is a, c, g, or t
ttcggcacagaaatttaatagcgttaacaaattataggttgtcagtgtgatgctggtctagtgcttagtacacaataaattcttgtcaactagctataaaaatcatatcaaatccaaatatgtctagaatttaaagaagctgtactttgaaaagtaagcagggtcctacagctttaatttaatactgctttaggcaacagagttcacacttaaaatttttaacttctaatgagagtaaccacttttaatctaattctaatcctaggaaagcccagttaagaagtgatgttctaatatccaaaccatgtatgtataggtttggtgatatatgtaagagatgttaatagcttcatagctgtgagaaagcagtactcctaagtctgaatattataacgtgaaaaaaacactggtttaattagcaaatacagttatatatttgaaattactattggggagccagacacgggtgctcatnnnnnnnnnnnnnnnnnnnnnnnnnnnnnnnnnnnnnnnnnnnnnnnnnnnnnnnnnnnnnnnnnnnnnnnnnnnnnnnnnnnnnnnnnnnnnnnnnnnnnnnnnnnnnnnnnnnnnnnnnnnnnnnnnnnnnnnnnnnnnnnnnnnnnnnnnnnnnnnnnnnnnnnnnnnnnnnnnntcttaaccttttcttaagcccaggagttaaaagctgcagttaactacaattgtgctgctacactccagctggcacaacagagtgagaccctgtattaa

SEQ ID NO: 265809 - DNA, 521 bp, Homo Sapiens
  misc_feature (260)..(260): n is a, c, g, or t
  misc_feature (269)..(269): n is a, c, g, or t
agatgaataagaatagaattatgtgtttattgctttgcgatagattcctctgacacttttacttttaatgcccctagaggtcagccaggaaggcgccctatctttgggtgggtttctatgtgcccgaatcctactacagctgcagaataagtgccttcaagccagctggttcctttttgtaaatccctccctcttggaactgcctggtgcaccagggcccgcctaatctgtccaatatactgctctttgttccccccgcngaagactcntagtagacggtcctaatagctgcttcttgggcataaataggatgtgagatcactgacagcctggcacgcagccctttggtacctcttcttcctatgtgttttacagaaagcagcactttggagatagtgattgcgtttgaaaccagcattattgggaaaagaatcgtttaagtaatcgattccatttttaaggttttgctttcaaatattcaaaagtatcagagcacactttttttaaaaagagcttatttg

SEQ ID NO: 265810 - DNA, 673 bp, Homo Sapiens
aagcaacgcaagccaaccacaaaaacacatataccaatgaaagaaattggtttaaatttcacagcattaacattactttttaagtaaaaaagttcattgaagaaagtatgtatgcagcagtggaacatgggcctgtgctttgcagtgactccaacatcctgtgcctgtcctgggaaggggacgtgtcccaagagtgagaaggagaagcctgtgtgcaggagacgctactatgaggaaggctggctggccacgggcaacgggcgaggagtggttggggtgactttcacctctagtcactgtcgcagggacaggagtactccacagaggataaattttcaacctccggggccacaatagcgagatttgtaagactccagggcctcccagccgtgaataatctgatggttcctgaaatgactggggaagcagacgcttcgtatggcagttgaagagtgtgtgtctatgtgcatttaaaaccttctttctgtacttacacattcacacgggaagacaggctcattcttgtgcacacttgagagttttacaactgatgaaaattaatttaagaatcagatggagcaacttgacaccagtgggctcaggagcccggggagaaaaatacatcactaatggccagttttccatatggtctgcacgggtaaagaaagtctgc

SEQ ID NO: 265811 - DNA, 769 bp, Homo Sapiens
ataaagaagtagcatccaaagtagttaagggagtagagacgcttttataagcatcttgactatatccaggatcatcttcatcagaagaaaatgaagataaatgttccaagtttttaagttcattatcaactttatctgatggactgttaccgccagtttcagacactaaaggtgtgggtgttgtagatgaaggcttgggaagtggtgggggacaaaatgtacgaaccatctgggtccctggccgtctagtcctgttaggcattcgtacagcaagagtggaaaactgctgcttgggcccggatttcagaaaatctaagaaagaagcaataaatcctgttttgacttctggttgtttttcctccacctctttgatcttctgtctcattttttcttgatgctgataaccatcatggcagctttctgaggaaggaggagtatacggtaagtaaatatctgttccccttggattctggcgtttgccttgggcaggtcttttcagctgtttctgattactgttgtcttcctctttaacttgcccttttcctttagctcttttccttttgaaggttaaaatgcattaaatcttggttttccttcttcaatcttgacactgactgcatccccagattgggccatggccaacagtgcaagtgcactcctagctgggttcattgacacaccactgtcgtcaccccctaaggtaaattcactctctgatgtagcactctctccacttatacttctactactagaaacaaactcttggttc

SEQ ID NO: 265812 - DNA, 788 bp, Homo Sapiens
  misc_feature (52)..(52): n is a, c, g, or t
  misc_feature (92)..(240): n is a, c, g, or t
  misc_feature (695)..(743): n is a, c, g, or t
ggactgtggtccctatttccttgctgcatggtcctctttctcttcaagccancaatggtgccttggtaatccttgtgctttgactctgattnnnnnnnnnnnnnnnnnnnnnnnnnnnnnnnnnnnnnnnnnnnnnnnnnnnnnnnnnnnnnnnnnnnnnnnnnnnnnnnnnnnnnnnnnnnnnnnnnnnnnnnnnnnnnnnnnnnnnnnnnnnnnnnnnnnnnnnnnnnnnnnnnnnnnataaacaccagagagtgaagtccatggggagccaacattctgcctatcacaattatagcatcaaatttggctgaggggcccttcttataagattcatgctcatttatttctctgcctccatttctagagtataagcttcatgatgtcagtgactatgtctactgcacaaacctgatgtgttgcagctggcttgtccttgctaagaagtgcttattattaaattttcaggaatttttccatctgtttgttaaacatagctattattttaaaaaacaaattatattcctcaaaacataataaatgctcctaattccatttccctgtttattgtccatagtgtttactacgatttattcctcttgaagttattttccccgattcaatccttatggtggaaatactatctattgagggactaccgcacatcttttcaacttcctgttcagtgccattannnnnnnnnnnnnnnnnnnnnnnnnnnnnnnnnnnnnnnnnnnnnnnnngttggtagcttgaaattgacaatagtggatgtattgataccaaat

SEQ ID NO: 265813 - DNA, 440 bp, Homo Sapiens
  misc_feature (60)..(60): n is a, c, g, or t
atccttggattatccccagatgggcccctatgtaatccaccatgaatccccttaaaacangaagggcagaagcaggaaatccaggagtccaaagccaccaagggattaccccaagggcacccattgttgggcttgaagagaaagagggacccatgcagcaagggaaatagggacccacagtccccacaacccatgaggcactgaattctgccaataccccagtgagtgtggaagaagaccatacgtcccagatgagagctgcagcccctggatactacctggattttagcctaatgagaccctgaaaagataaaccaaccacactgtgccagatttctaacctatagaaatagtgagataaatttgtgctttttaaaagtgctacatttttacagcacagtaatttgttacacagcaatagaaaactaataacaactagt

SEQ ID NO: 265814 - DNA, 584 bp, Homo Sapiens
  misc_feature (172)..(172): n is a, c, g, or t
  misc_feature (287)..(287): n is a, c, g, or t
  misc_feature (384)..(384): n is a, c, g, or t
aaacaaaaataagtgcattttatttaaacaacggaacaaacatcagagagcatcccctgcaaagcccccaccccagagcctgctgatggaagcggggctgcaggacgctctgccacaacggcagcatctccaactgcacaaagaccccttgctgccagggccgggcaccgangcctagctccttgcctgcctgcctgaggcagccgtggaatcagggcaggggtggcacaggtagaaaagacagatgggaaacaatgcccatgaatatacccaaagtgtcccaggangggataaaagccatcatgagggaccagaagccaacccagtctttttttggccctcctggagaagttgtttttgagacctgagactcccagctgaaanatggctccctgaggagccccagggagcaggaggggtgttctgaggacagcccctgaggaaaacacagtgcctgcagagggacagcccccagcaccctccggcagggctctggacagctaagcccagtcctgagagggtcaaaaagagagatggaatgctcaagaaaagaggcatttaaaaattaagagaagaaagacaaa

SEQ ID NO: 265815 - DNA, 416 bp, Homo Sapiens
  misc_feature (38)..(38): n is a, c, g, or t
  misc_feature (79)..(79): n is a, c, g, or t
ttcagaaaaacatgaaagattttactcccaaagtttgnacactgaaaccatccccccagctgtcccacaaactattttncattgccctgagaaggcactggaaacttgggagacgggagactttgggaacagcattcaagctcatcctctatcagccaatagcttccaaggtagtcatcactaatgcttggaaatcaagacacgagaagtaacctgcaagggtcacaggtgctagcaggcttctaatgcccttcaggcaccttaaacttaaagtagtattggcaataaaaaccaacaacaaatactgttttcacaggccattatgtggcccttaaatacattctctcagtggccctaaggctcagagagattaatgatttactaagggtcatgaggccagcaaacaacagcaaagc

SEQ ID NO: 265816 - DNA, 460 bp, Homo Sapiens
  misc_feature (23)..(23): n is a, c, g, or t
  misc_feature (30)..(30): n is a, c, g, or t
  misc_feature (41)..(41): n is a, c, g, or t
  misc_feature (56)..(56): n is a, c, g, or t
  misc_feature (109)..(109): n is a, c, g, or t
  misc_feature (118)..(226): n is a, c, g, or t
  misc_feature (341)..(377): n is a, c, g, or t
  misc_feature (449)..(449): n is a, c, g, or t
tttaataattagattttccatanggagcgncacaacccaangatcccatcgcatgncacagttccacaataggggttacgtgcctccctatgaagaagtcctaatgctncctgccccnnnnnnnnnnnnnnnnnnnnnnnnnnnnnnnnnnnnnnnnnnnnnnnnnnnnnnnnnnnnnnnnnnnnnnnnnnnnnnnnnnnnnnnnnnnnnnnnnnnnnnnnnnnnnataagagcatccagtatcatgtttaatacacagtaagtattcaatactattaagtagtgataatactccaaattctacatatgcataaaaacctagtcaagaactaaagagaatnnnnnnnnnnnnnnnnnnnnnnnnnnnnnnnnnnnnntgaggttagaaagtttgtaagaaatatatatgtaaaacatacagtaagtgttcaacaaatatttactaatgnactgtgccgaa

SEQ ID NO: 265817 - DNA, 305 bp, Homo Sapiens
  misc_feature (13)..(13): n is a, c, g, or t
  misc_feature (22)..(22): n is a, c, g, or t
ccccgggtcagangggcgggancaattagactctcaataggaagccacgaaacccctattgtgaactgtgcatgcgaagggatccttggttgtgcgctcccttatgaaaatcctaattataaatgtaatgcacttgaatcatcctgaaaccatgccccctacccccaccccgcctcttaccccctacaggtccattgaaaaattgtcttctatgaaactagtcccttgtgccaaaaaggttggggaccaatgctgtatatgtgtgtttaattctcacaataattctatgagggagttagcaatat

SEQ ID NO: 265818 - DNA, 514 bp, Homo Sapiens
  misc_feature (23)..(23): n is a, c, g, or t
  misc_feature (37)..(37): n is a, c, g, or t
  misc_feature (57)..(57): n is a, c, g, or t
  misc_feature (62)..(62): n is a, c, g, or t
  misc_feature (68)..(68): n is a, c, g, or t
  misc_feature (100)..(100): n is a, c, g, or t
  misc_feature (106)..(106): n is a, c, g, or t
tgaatccggaattaatcgcctcnctatggggaatttngccctcggggcccaagaatngggcncggggngagagctggcccccatgagcttcaaatacccngctatncccccacctgcaatatcaccccctttaactgtgtggttcattttcctgcccttacacattaggcctatacgcctacacaagggcataagctgactgccctttccttgtcccattgtcacccagtgagcaagccctcgcatggtgccctggcacatattataaacacattaagtactagataaataaataaaggaaatcttgactagcagagtaggcctcaaaatatctgtagacagtgaaacaagaaacagaaaccaagccttgaaatcactgaagagtaaagagctgaacacctgtcagatttttctgggaatcaaggaaggcaacaagaataaatgagaaaatgtgtacatatagagaactaagatgctctaatatgcccaagttcaaactggaatggccctaaag

SEQ ID NO: 265819 - DNA, 779 bp, Homo Sapiens
  misc_feature (173)..(190): n is a, c, g, or t
ttaaaatgtataatatgaagcagtggaacttccctgatagcacaatttaaatatttcctttttgacaaacgtgcatagttaaataaattaagtgaccaccaggtgtgactgaagagtggccagtgtctattcctagccccgaaggagcacagggatattgactgtgtcccttnnnnnnnnnnnnnnnnnncgtagggctttctttgtattggtttgaacatttctctttatcttgtgacctggccaactctggctatggctgcctcctgtctctcggtacattttctgtggcggtcaagaggagttattttaagccaccaatgggaaagtttaaagacataatccttggctgtaattgcgggagacgggaggctgagagtctgtgctgacttgccacctgtttccacggcagcaaggtgattgtgcatttcctgctgctggctaagggccaagcaaaattttcatgtcgttgtgtcatggggaagttttcctgtctcaaatgaagaacacaccgtgcttgtggtcttgttcctgtgaccaggacatggagaactatggggagattgttctgggtgtgaagggaaattgctggccagtgcttagtgcacgggctttggagtcagagccaacttctccacctcctacctgtgtgaccttgggcctatccttctaatgcttggagtctcttctgtcctcatctgtatgatggggataacaagaatacctactttataggattgctgtggaggattaaatggatctgcatgacaaatgcttag

SEQ ID NO: 265820 - DNA, 846 bp, Homo Sapiens
cggcacgagtgaatataagcctggccccgtctcttctgagtagttccgcaaatctcaaggccatctctcacatttatgttagaacaaggccatgaatgctgttttcttctatctcatgatccctaccatttcttcttctgtttctcacctcaataaaatggctcccatgttgataccttgattcctggaaggagctactgttttgctttgcctcttaacatcgctcaggtgatgctgcccttgctgatactctgtctctgagctgaagcaggagaaaatcccctctgttggcctgagtggcccatggtcaccagcccaaggctgcctcatgctcttcgtgacttactgcttgctataatcctgagtctgtggatgatcacatcagaaaacgccctcagtttactgttgcgtcccactgcttcccatcttctgaattaagactgcacattctggctctttgccttgggtaatcttttcccccaataacttgggagctttgattccaagtggcttaggagagttgttctccacacagctgggcaccagaagcagcccagctgaatgggacccaaggcatgaagactgaaaacctcgtcaggtgacttggatcttcatccccaggttgagaatctctagcttaggagtctcttttgagtcctaaaggaaatactcaatttcccccatctgtcaggtccctgccacatctaccgacatgtgcaatgggattaattcttaagaaattcatatacagcttagattgttgctcagagactcctgccactctgtgaaccacccctatggacactgatgcacaatttcctttgggttgatctcataagttgcata

SEQ ID NO: 265821 - DNA, 907 bp, Homo Sapiens
acacctagtggctctgatggcactgctctgtggggacccacaggaaaaggtggctgaggaggctgcagagggcattcactccctgctgcatatcaccctgaggctgaagtatatcactcatgacaagaaagatcagcaaaacttgaaaagagcattgacaaaatgtcgagaattcctggagctccacagctctgccgctaaatgcttctacaactgtcccttcagaattgcccaggtctttgaaggttttcttgattcaaatgagctctgccagtttataatgactacatttgataccctgaaaaacctgaaacatccctggcatccagcgattcagcaggagaattactggcttaactttgggcgaaaaatacagagtcccaatttgaggaaggtgccagaaattatggggagttatctgtgcccaggttacccataatcagccagcctagagtccgcccaaaaaatccataaataccgtgagtttatttatatccagacccaagtacacagatatagtgctcagcttccttctgtgtcatccagtgccgtataacaggcacctggctgaggtgtggagaatgctgtcggtggagcttcccagcacgacctggattctgtggaggctcctaggaagctgcagaaatgccataatgagcctgcacaggagaagatggcatatgtggctgtggctgtaagcccttgagctttgcccctctaatgtcagcccctcccaggatgactgaccccacaccccagtggagagtgttccttttggtccctctcaaagcctgcatctgtcatccatttataagtctacagtgtttctgccaagggattgacatggagggagctggggagagtgaaggagtcagaatgccttaatacaaactcgtccaacctgcaa

SEQ ID NO: 265822 - DNA, 666 bp, Homo Sapiens
tattttgcatttccattttgcatatggggacacagaggtttagagaagtgaaagaaactgtccaaggacccaggagtggtgaggttagcagaggcacctgcacccaagccttctgacctttactcctgcccagtgctctctctctcctaatctggcaaactcagtctgggccagactgtgtgctccttaactagaaagtttcccaatggtcatagtttgttctttaggtttgtagttcaagacaaaccattgccctgtagctgcccttttccccactggcttatctttggaccgactgggaggtgaaggacactgtccttgtatgtgccattcccaattggctacttcctgggtgaacttgatttctcattttggggcccaggagggtgatcattgcctaagaacattccagagtttactttaaggcaaactatgaaaaaggtaaattctgtgctttcttcctttcattccacttcagtaactgcctttttactggtattactcaaattctccagctttcttactctttaaataattttaccgagcctccactctgcgtctggatttgtgctctgtgttggacatataacgataaataagacaacttttattagtggtttcaggtatgttaacgagttagtatggtacagcaatgataaatgtgat

SEQ ID NO: 265823 - DNA, 749 bp, Homo Sapiens
  misc_feature (475)..(486): n is a, c, g, or t
  misc_feature (506)..(562): n is a, c, g, or t
accaccttattaaaaattttaccattccccaaatatggtaagggggatttcttctttacatgttttctttttctaaatagtatccctcaccttaaaaatacttttaagatttatgtgtttatacttttttctatattccccattaaataaagcttcacgaatgcagagattttgtctatttggtttggatgctgtaacttcaaatactacttacaacaatgcatgacatatgttaggagctcaataaatatttactaaacaaacaggtgcatgtatgcacaatcatggttctctaaactattagtaaaaatggaataaataatctcaaacacacagaaccaggcacctttaagcaacttgctcagatacatgaaaaccaaggaaaatttttgggcccatattgcagggcagctttcccacacaggtgggccacttggaaggctccacacagggagctcttagaattacagatgannnnnnnnnnnnaatgtgaatatagctgggtnnnnnnnnnnnnnnnnnnnnnnnnnnnnnnnnnnnnnnnnnnnnnnnnnnnnnnnnncccgggtccaggaattcaagtctagcctaggcaacataacaagaccccatctgtggaaaaagtgagtatagtttacagtttgaggtagatttgccccacatcatcaccatttctacagagaaagaataatcaaatcactcctctgcaacaacggtacctggtaacaaagtcacttgaaaaaagagtt

SEQ ID NO: 265824 - DNA, 885 bp, Homo Sapiens
  misc_feature (48)..(48): n is a, c, g, or t
  misc_feature (139)..(176): n is a, c, g, or t
  misc_feature (322)..(322): n is a, c, g, or t
ggatgggagtaaatatttagacgtggttctcaggtgctgtagaatttnctaaccttgcagcagttttagaaactccttgtgcccactggaacaggttcgtttaaagaatcttacttgggctcttttgaaattgtgatgnnnnnnnnnnnnnnnnnnnnnnnnnnnnnnnnnnnnnnagacctgccctgagttcatctgcctaatgttccctttgcaggatctttgtactcacatggctggtatctttgccccacccccttgtgccatatattttgacctcattgtgttctattctgaaacgccggggttttgaaacatcgtnggtgaaatgttttctttttcaaaggggcaaatctccatctttttggctctcctccctttaagccagggctgttttgatgactgatattctgcacaccactggactaaccaaccatctgtactttgatcccagaattcattttgattctgctgtttgtttaagaactgaaagctttcctagcttgtttggatgtggttgtgattcaagtgaaaactgggcactgattttcccatctgtttgcccattggttgggacttctcccaatgtgttaggaaagctgctgtgctgagttgcgaagagaaattcacatgtccatggtcttgcacaagggctcatttgctcacttagaaggttttatgtagagcctctgcctgggtgaaagacatgagcttccctggaaacaattgaaaaacatcttctgcctggccactcagtcttgagctctagtaggttacactgtttttcccttctgggcttctttttgaggaaggggagtgtggatgggaagaaatcttcacaatcagtctcagattcccagcagcagagagtgaattgtatgttga

SEQ ID NO: 265825 - DNA, 813 bp, Homo Sapiens
  misc_feature (58)..(58): n is a, c, g, or t
  misc_feature (244)..(252): n is a, c, g, or t
  misc_feature (600)..(613): n is a, c, g, or t
ataaatgttcatttctatcttcctgaaaatttctcagagaaatgcgaaggagtggacnctagccatggtatccactgattctgaaataacagaaataaggagcttattgctggatttactgaaacggctcagaatctaaagtgctggagctggaaaaaaactggaatgtacctccttccggatttccaagcaccaggagtcacaagagagccaaaaaactcaagccttcgaaattggggggggnnnnnnnnngtcattatgatttcccaaatgagccagtaagccaagttagaaatactatagtttcataatcctaaaccaagagtcactctatatttgtgaagggcttaaataaatattaacaactcatccccccactttctaccattatgttgctctagtcttccttggggttaagacttctggaaatttaataattctacatgtataatttttgtgttaacttcatgaaatttaccacatttactctttcgtgcaactgcaaacattaactatttcttcctttcttattgtttcaaaaaggcaagtaactctccttgcatctattagaagcataatgacacctctgtcataaagaannnnnnnnnnnnnnaatttaaagaaggacctgttgtccaaaatctatttccttcagcacactggtaaacatgctcatggaaacatgctctgttgccaaaataccctgtcattcagctgctcaaaaaagagctttaactttctattaagttcatgatcatttgcaatacttaaacacacagaaaagagcattaaatattccagctcccctctgcc

SEQ ID NO: 265826 - DNA, 707 bp, Homo Sapiens
  misc_feature (381)..(393): n is a, c, g, or t
gtgaaatccagtaatggattgacctcatctaacaaaggcaaaagtggaagtgtttttgcagtttggaaaccatgaattttattttctctagataagctgcagattagctggtagctagcaaagaggccagtaaggatattctgatctcaggcacctagatgggtcaacaaagaaagcaatttcagttatctaaggactctttagaagacagaattttgctgttggcatgcgtgacaggctatctctgtacatctggcggtgtactttgttttctctgccgtctttgttattccaggtctgcaccatttccttctcagaatatctaatatgtgtccattagatgaaccataatggtgtgttagggttttgtatatccttgcnnnnnnnnnnnnnaatgttactgatccgtctcaaaaaagaaataaataaatagtctattggcctaagaataatatcctattcctcatttctcctctttacacattacacaccccactaactgtgtgttctagattcactcatctttgtacctatgcatatgctgttctctctgtctgaaatgtctttcctcttccccctcatctgtcagattccaaaagtccttctgactgggctcagatgtgattcttcccggagaccttctcccaatcttccccaagttgcagtcatctcttcacactggcttctctttcgttctacttttcata

SEQ ID NO: 265827 - DNA, 345 bp, Homo Sapiens
ataagcaccatgcccagcctatggcaggttttttggatttatgtttcttcaatatgtttctacaaagatcagtttctaatagaagccaattaaacatagaaactcctaaggtagcatatttcccaagtgttgggaggctttggagctttttagcttcgagttggtgtgcctgatagatgagaaacagcacaacagaaaagctgttcataggatccatgactctagctattgcattttttctcttgcattaatttttctagtgtatttgtaaaacctttttaaaaatatggattcttaattttaaaattaacctggtgcaatgcacatgcccgtagtcctagttac

SEQ ID NO: 265828 - DNA, 716 bp, Homo Sapiens
cagctctgcctcctccctgcaacacctgcacatcccgtttcctttgctgtttcctcctcatttccctggcccctcaatgtcacaggttttagtactcagagtctgcacctcttttcttctctgtgctcacttatttggtgatctcatccagtctcatagctttaaattatcttagtttgggttctcccagaagcagagcgtaaaacaatgcttcacgtgaaagtaatcagtaggaaattggggaaattgtgtatgaaagagaaagcagccaatgaaaagtttactattaagccagctacggtaagtgggcaattagagtttggtgccccagggagactctggggagtttggcaaaatatatacctcagaattatcccacctaaggggcaagagacctggagaatttatataacaacttgccagggttactgagtgaaggctattctagcacatgttagttactggcttgccatgtgtaccgacacagctgctttccacagtttaaaaagaaagtctgagcaacatagtgacatcccatctttacatacaatttttaaaaaaattggcaaggcatggtggtgcacacctgtggtctcagctacttggctgagataggatccctggagtctgagggttcaaggctgcagtgagctgtgatttgtgccactgcaccccagcctgggtgggtggcagagtgagaccctgtctaaaaagac

SEQ ID NO: 265829 - DNA, 560 bp, Homo Sapiens
  misc_feature (138)..(180): n is a, c, g, or t
acacacggggcagcgccccttccgctgccagctctgcccacgtgctttttcgcgctctgaccacctggccttgcacatgaagcgccacctttgagccctgccctggcacttggactctcctagtgactggggatgggnnnnnnnnnnnnnnnnnnnnnnnnnnnnnnnnnnnnnnnnnnncacaatgctgggtggttttcccacgaatggaccctctcctggactcgcgttcccaaagatccacccaaatatcaaacacggacccatagacagccctgggggagcctcttacggaaaatccgacaagccttcagccacagggagccacacagagatgtccaaactgtcgtgcaaacccagtgagacagaccgccaaataaacggactcagtggacactcagaccagctcccagatggccctggacagcaggagagggtgtgggatgaggcttcccagagaccctgggtctagaaagcggctcctgaaggtcccttattgtggctgatattaactgtcaatggttatgggtcctataaaaatgcccctcccagattttttt

SEQ ID NO: 265830 - DNA, 660 bp, Homo Sapiens
  misc_feature (42)..(75): n is a, c, g, or t
cattacccagctccacattttttccccttttatggtagtaannnnnnnnnnnnnnnnnnnnnnnnnnnnnnnnnnaagatctttgtgtacttcaaggtaataaagatattattgtgtgtttctggtgttttgttctggttgctattttcccctaaagaaacatggaattgttgctaagtagttcatgtttaaaacatgtaagggctccacaacaaaggagaacaagatcaagctctttgtcctgttgcttctcttaccatactcctgtggcctaccgctcacaagaagtaaaaacttgtcacctagccaaggtgttcttaaattataaaggcaaacatttttaagctttacaaattgaggcaatacaactcttctgagttcttcttaaaaacgaacaaacagactgctatacaataaaagccagccattctagagacggaagaaacagaaagggttgaaaaacaaacatgcaaaagaaggattaaagaaatttggactattgtgcgccaaataaaagaaaacacttctactgtaaaagatttccacatactacactgatattgatgcaacacactgcctatgtataaagtctacagtaaaatattacatgaaaagagatgcttggtgataattaaatcaaataaatgtggttaacacgat

SEQ ID NO: 265831 - DNA, 492 bp, Homo Sapiens
cacataatagataaaaaatagaaacaattgaattgaattggcctccctggtatggtcagggatagctgaaaggcacagaaggactccttacagtgatggggaaggatggatctttctctaagcccaaaggaaaggaagacagaggttgttgtaaagaggtggcagtctttctggagggggacagagaagtggtaggaggaatgacaccagcctactgtgtggggatgtcggtattttagcagagtccagatctgaacgatgccgtgtccagtttgcgaagtcctattcccctcctcctgtcgtgtgcctttgttcaggtggggatgtatttcatgtagaaggtaagagtgcagccactggctttgggggagtttgtgaaataatattttttaacttcccacactaaaccgaagtaattcttaccagtatctctagttagtgtttccagcctggtcaattatcagccactgaggaagagatttaggctcatcc

SEQ ID NO: 265832 - DNA, 613 bp, Homo Sapiens
gggattcttttcagtctagaaaaatgctcaccccttcctcagaacatttccactgtgacgaaaagagactgatgaagcctcagagagaaaggcaactctgggtggtgatgcaatagtgcagaatccagaatggatgtcctctttgtagccatctttgctgtgccacttatcctgggacaagaatatgaggatgaagaaagactgggagaggatgaatattatcaggtggtctattattatacagtcacccccagttatgatgactttagtgcagatttcaccattgattactccatatttgagtcagagggacaggctgaacaggttggataagggacataacagaagcaatagagactaccattagtcttgaaacagcacgtgcagaccatccgaagcctgtaactgtgaaaccagtaacaacggaacctcagagtccagatctgaacgatgccgtgtccagtttgcgaagtcctattcccctcctcctgtcgtgtgcctttgttcaggtggggatgtatttcatgtagaaggtggaagaaggctgctatgactctttggatgggagtctggcaagaggaaattggaagataaaataaataataagtgaaat

SEQ ID NO: 265833 - DNA, 658 bp, Homo Sapiens
catgtagtaccttaagggtccaccaaagcattcacacagaagtactactatgagcccaccccaattagatcacccttgacagttttagtccccacttactatctacccatttatgacactgtgcctctcacacttcagttacagggcacaggcgtgtatatgggtgtggggaaaggagaatgctgctgctgcttcccttgtctttttcaggaaaactattttcatagttcttagaatgtaagatgcctactggaaaaatgatctcaactgggaaatgggtggtttccaccctagagaaaaggcataggactgtggggaggttgccagagcatttcccagaagatgaaatgcaaccagccacttaagaccagcagcaacaaaggagggcttgaggctacaagaggcttccttggtgttactctaggtgctagagagtcacggtagccatctgagggatcccagggcctcagacacatgcttcccatttagagacagtattgcagtgtggttagtggcaagactttggagtcagactgcctggattcaaattctgaccctaccacttacaagtttcatggccttaagcaaattatttgatctataatgcttcagtgttctcatcggaaaatgcaattaataaaattagctactctcacag

SEQ ID NO: 265834 - DNA, 356 bp, Homo Sapiens
aaactgcctgccacccagtcttaggctcagtaaaaatgctcattagaagaattttcttaggataattccttagaatctggaagctactgcaaatattttaggtttggcatagaactgaaatcaacagaacatttaaaaattgattggagccttctggatttacctctgacatgtaacaagcttagaagtcattatgcccttcctaattaagaaaaacctgaacaaactaaaaacaatatctttattggacctgtcaggggactatggtcacaggggaaaatcaccaccctgaaatctgggaaagacaggtggaataggagtcacaggctggagattgggcttgctctgggaccctg

SEQ ID NO: 265835 - DNA, 613 bp, Homo Sapiens
  misc_feature (505)..(505): n is a, c, g, or t
ggccgcttaattaacatctgaataaaatttcatgtcatttgcaaaatcttgtttaaagaatctatccataattttattcttctaatatagatccctgtaattatttcatcctggaattcacagccagaaaggagtttgcctgcagactgcaagcttcttgcaggccgaacttagacttcattcttcataaccttggcaccaagcacagtgcacagtatgtgggaagtcagctgccatgttttgagctgccctctggaaagaccctcgtggtgaggaactggtggctctggccaacatccagcgaggacctgagatctgccagctgcccacatgagtgagctgggaagtggatcttctcctagccttgagataactgcaattctggtcaatttgatcattgctctgcaggacacccagaggtgtcagctgagtcacaaatggatttctgacccacagaaactgagtgaaataatcactacaggtaagcaatgatatgaatggtganatgctgacgctgtgggattgctgggtgtcctgaggaagaccacgtggaaagggaactcagagctaatacctacaaataaatacatcaaactgccatattaacacaaag

SEQ ID NO: 265836 - DNA, 669 bp, Homo Sapiens
ggccgcttaattaaaaaaattacaatagtgatttctttcagtgggtaccttattagtcccatataactttgtttcagataatccctattaatgatacagttaaacatacattttaataatctgtgaaaacattaatgcaatattttctaaacttttcattaactactatgtattaataaattggcatcgttggttaacagggttctgaggtcagataggtttatggtatggtgcatacttatatctcttcttagagatttataatgtacattataatgtcaaagactcagagttgctgaagtaaataattatgttcagtccaggagtttctttaggtgccaaggatggaacaaagtgacaaagatgtctattcctttagtgcttttgtattttggagggcttgttttggtacaactaaaataaaaggccttataaaattagcctactcaaaatgttctcattttatttgagacatctttagtgggataatttagcatggtgcttggcacatagtacaggtgcaccttgttttaatgtgctccactttattatactcagtagacaatattattttttacaaattgaaggtttgtggccaccctgcatagagcaagtctgttggtattattttaccaaggacatgggctcactttgtgtctccacgccgag

SEQ ID NO: 265837 - DNA, 455 bp, Homo Sapiens
  misc_feature (441)..(441): n is a, c, g, or t
gagcagacacttcagaatctggagcagtcatacgtggaaactatagactgggacttagcaaaaagtcaagcctgttcagccaccagaagcatcatgtgtgccctgaatgcgggagaggcttttgcagagatcagaccttatcaagcaccagaggacacacaccggggagaagccatacctgtgtcctgagtgtgggcgtcggtttatccagaaggcctccctctccatacaccagaggaagcactcgggggagaagccgtatgtgtgcagggaatgtgggcgacactttcaggtattacatcctcttcttcactaaatcacaaggagggatttcacttccgggggaggagggcccttttgttattgttcagggagttgtggggcgaggctttttcccaggaaggattaggccctcctttctacaccagagggacgcatttnggaggggagaagcc

SEQ ID NO: 265838 - DNA, 376 bp, Homo Sapiens
aagtgcccacacaaggcccaggctcaatccgctgctgcaccatgatgtccttgaagttgagctcgcacctcccggaccttccgcatggccttagcatggatgaaatgatcgttacaccagatggtggagtaattattgttcttccactgcaggtaaacattcaggtaggtcaaatgatcgctctcaggaacagcgaacttctcccggatttgatcactctcctcctctcgacccttgggcctgtagaagatggctgggaccgagagcatggaaacgatgagcaggatctcggagctgcagcccatgtcacaggacacgatgagcatcttggacagggcagggtccagcgggaactccaccatcagctgtgccgaaa

SEQ ID NO: 265839 - DNA, 692 bp, Homo Sapiens
ctgacatagtgcccttgtcagtttctgtaagatgccactactgtcacaaggtgtttcagactcttgataaggcagtgttttgtattttagttctaacattgagtttggacaattttatctaattgtaattctctagggtgccagagataggtatttctcattggtttgctttcccaaatcctgtttggttaattgtagcctccatacagtggggtcttctctgtggctggtagacaccaagctgctgtgactgaccacggtaccacggggctgccacagcccctgctctgtcttagattatggtgctttacaaagagagtggtccatgaccacacttagtgagaaggagccacaagttgtggctgagagttccctgtgaacttgagtagttcatagagtgctaaggtgacactccaccaaccagagtgagagggcagataggcaggattctatgagtggttatacttaagggggacaaaactgcccaagaagaatcttgagaatacactctttcaaggtgggggagatactctttagagggtacactgagctaatactaccagttctttatgagcactggaatgtgtttgtaaaaggagtcctaagtttagcaaggtagtctacagaaccatgctcccacattatagataaagctgcttaaacttaaaagtccacaaagctacgccgaccag

SEQ ID NO: 265840 - DNA, 493 bp, Homo Sapiens
atgagactgcaactggccacgcttttttttgtttaatgaaaccaatgacaatgtaaaagtctgtgctttagcatttcttcttaaagaacgatgaaactctttgatgaattaagatggaagattagctgagctgaacttactattgatagcgtgtaaactggttgcatctatttggagttcttactgtgacgagaggtctctgaaaggaatgtatttgttgaaaagtctttggtacaaaacaagaaaggtaacctttatcaaaaagaccaaagaaattctcattgtcctaggtcatgaaataatactcagggcatcctcctcacaacttggaaaatatagaacttgtgcattacctcatcccactggcttccagattatatgtgcaagagatatttgtgtgagggaatgagcacttctaagtcagtgaaagctaccaacctgtatataccctctgacttttttttggagacaaaattttgctcttgttgcccag

SEQ ID NO: 265841 - DNA, 661 bp, Homo Sapiens
caaaatgactcaccacttcacgatgcagccaagaatgggcatgtggatatagtcaagctgttactttcctatggagcctccagaaatgctgttaatatatttggtctgcggcctgtcgattatacagatgatgaaagtatgaaatcgctattgctgctaccagagaagaatgaatcatcctcagctagccactgctcagtaatgaacactgggcagcgtagggatggacctcttgtacttataggcagtgggctgtcttcagaacaacagaaaatgctcagtgagcttgcagtaattcttaaggctaaaaaatatactgagtttgacagtacagtaactcatgttgttgttcctggtgatgcagttcaaagtaccttgaagtgtatgcttgggattctcaatggatgctggattctaaaatttgaatgggtaaaagcatgtctacgaagaaaagtatgtgaacaggaagaaaagtatgaaattcctgaaggtccacgcagaagcaggctcaacagagaacagctgttgccaaagctgtttgatggatgctacttctatttgtggggaaccttcaaacaccatccaaaggacaaccttattaagctcgtcactgcaggtgggggccagatcctcagtagaaagcccaagccagacagtgacg

SEQ ID NO: 265842 - DNA, 940 bp, Homo Sapiens
gtttaaaggatcactctgactttggtcatgggtagggacaatgcagggagaccacataagagtccaccataataatatcaagagccaagatgaggacactgtcctgcacccctccctccatagcctatgagagctccctgaaacctattatctgtgcatgttctgcaaaatcgcctgccccaaacaattccatttcctgacctcctcttacactgcccaaactgggaaaacaaggtcaaaaataaatgacagtggttcagcttcaggcccacaggaagtgaataactcatttacatttaagaggggactgactgagaagcccctatggaatttaaataaaaggagtagtgactggggctagaagacataggggaggacagcggcagaagctctggggaaagtcatcaccctttctccttctccctttgcaaggttgactccaccaaattggcactgtgggaagattagcagcagtgaggtgggtcattagaacattttgggatcctaagtccccagggggaaacaaaatcaagttgagtgtgagttagatttacccaaaacccacacagcattgtgcctacaacccagtccttgttctccgtgagtctagtacatgtcaaactacatgaagatcaatatcccctgctcccttcccagtttataattcaatcatcggaattgcagtaaaaattatgaacagaggctgggtgcagtggagagtaaggggaaatgacaacagagggagcatggggagaggatggaagaaacagacacaaggggaatgagcagagggaagacaacaaatcacagcagaagggaagggatgagaagcaggagccttcagaggtcacaggtctactactggatcacctgataattaattggaaggtttatgtatacatttaaaacatcatgttccatttctaacattattcataag

SEQ ID NO: 265843 - DNA, 780 bp, Homo Sapiens
  misc_feature (76)..(76): n is a, c, g, or t
gtttctcctatagcttataccctattatcatgtaagcggctggaattttttaaatgaactaaccagaaaggcaaancaaatcattcattctattcctgtgcaagttctttgcactaaggagcccgttatttgctttatgcttctctcatcctttgcacaacacagacgcagcacagtgtggtggttcaacttctgggttaaaaagggacttaaaaatggagtccaattcccatgggccacagccaaactttggccatgtgacctgaagcaagtcccttaactcttctgagcttctagtttctcttctgtgatgtgaggtcggcatggcatgcaaagccttcccaactctaaaattaaatgatgtctgtttgttcttagaaaggctctcaggttcctcacagtcaaatgggaaaatatctcccctacccccgggttgggaaagattggaaagcacccattaaaaccacagagcccttctgggaacttaaggcatttttattactatcctacatatactaggtgcccatgcagaattcatgaaccaaacatagaaacttcacatattcagcctccaaaactgaaggccaggacagtgagggatctggaacctgacgaggcagccactgaaaagagaggctatttgttctggagaagatgagattgaggaagaaacctgaagagctctcatgtaaataagagaagaatatctccattgctctagatgcatgaattaagtacaatcaatagatgctttcaatgggaaaggaaggaagaaaggaa

SEQ ID NO: 265844 - DNA, 453 bp, Homo Sapiens
  misc_feature (37)..(37): n is a, c, g, or t
  misc_feature (51)..(51): n is a, c, g, or t
  misc_feature (63)..(63): n is a, c, g, or t
  misc_feature (68)..(68): n is a, c, g, or t
  misc_feature (84)..(84): n is a, c, g, or t
  misc_feature (92)..(92): n is a, c, g, or t
  misc_feature (107)..(142): n is a, c, g, or t
  misc_feature (162)..(162): n is a, c, g, or t
agaaacccctagaagccctcagaagaagttaaggggnaccttgcccttcanggtccaccatgnccccnaaagtttggcctgtgncccccccngggaaattgggaccnnnnnnnnnnnnnnnnnnnnnnnnnnnnnnnnnnnnagaaagttgaaccccacccnacactgtgcctgccgcctgtgttgtgccaaaggatgagagaaagccataaagcaaataacgggctcccttagtgcaaagaacttgccacaggaatagaatgaaatgatttggttttgccccttcctgtttaagttccatttaaaaaaattccccagcccgcctacatgataatagggtataagcctataggagaaacattccacagggaggatagtttagagcacactctgaagaacattaggttgtgggagaaaagaatagaagagtgggccgggcatggtggctcacac

SEQ ID NO: 265845 - DNA, 596 bp, Homo Sapiens
  misc_feature (462)..(462): n is a, c, g, or t
aaggtagggttttcttttttccccccattaggaaagatacttacatgttttattcaaaattcttttaagccaccaccaaagaagagaaagaaattaacataataactctccgggtggttccctgtttacaaagtaagtttaacttttactttgttttccttcagagccctaaattcaactcctactttattccatatttccattttcagtcatccttgatgcctgaaatgatttagttgatgccatattgatttcgttcttgtttgcttcctcaaaatgtttcttcatttttctggtccccttgggctcattttctaaggtgtgtttttctaatgtccatatcctgcacaattgccagcagcaccatgacctagggaggaccctcattatgaactgcattctacaggaaaaaagacgcacgtccccttcaaatgatgtggcttgccccatggaaaacagagntggtgtctgagtcaggtttgcttccccagagctccagggccattgttattgtcctctttcctgcacgcttcctcatttgcaaaacaatgtgaattctgttcttgcccttataattaaaggaaaaatgaggatga

SEQ ID NO: 265846 - DNA, 1100 bp, Homo Sapiens
ccttcaaatctaattgtgttagattcaacatatcactccaacacatcaagttctttctggactctgattatgtcatcaaatgtgcccaccatgtaagagcaaagattacctttatctttaatgacatccttcaccagataaaggtggaagcaattcagcttaatggctaagcattggctcctgttcaggctatctggcttccaatactagtttccgcacttattggccatgtgatcttggggaagtaacttaatcctggggcctcagtttctatggggcaaaatgcaggatactaatatccattgcttgggactgggctgtgaaagaatttagcacaggacctgccaacaagtaagcagtgaagaaagtattattgcagctgctgctacatagtaaaagtatggcttttgaaaaatcactttgaagggtactacaatatgcacctccagatagtatgtgtcataattaagaacagactctgaagccaaccaaaatttgaattctggcaccactacttactggctatgtaactctgggcaagttcaaagttacataacttctctgtgctgcagtttcctcatctgtaaaatggggagaataatacctaactcatagggttgttatgaggattagttagtatatgcaagtaaatttaaatagcgcctggtgcagtaagcagaataatgtttagtcaaagatatccctgtcctaataatccctgaaatctgtgaataccttgccttacatgacaaaaggaatttcactgatgtaattaattttaaggctttgcagatgggaagaaaaccctagaatatctgagtaggcccaatgtaatcataaggaaaagaggaaaatggaagagtcaggccagagagggagatgtgaggacacaagaaatcagaatgatgctattgctggaaggcagccttgagccaaggaatgcactcagcctccagaagctggaaaaggcagggaaacagattctcccctggagctccagaaggaatgcagctctgcagacatctttattttagtccagtagggcctgtttcagacttctgacctaaagatctgtatgataacacattttctgtgccgaa

SEQ ID NO: 265847 - DNA, 1079 bp, Homo Sapiens
cactgaaaaaataaattccaagaggcttagtctaggtatggcagggcaaagatattttataaatattttggcaagtagagacaagagaaaatgatgcgtgaggtattttcaatagaagccaattgagcttcctcatttgcatgaagcatctgagctgttttcctaagttccagttcctcctcctcaggtgggcagccttacagcctctgcatttgactctgtcaagatgagactgtagtaaagtgagctctttgtatcattgatgaaagaaagaaaggatttaaattaaccattgggactgagttaaaataaaataaagctataaaaagatcatggctgcttgaccatgaggaaaaacctaggaaaatagtcatttgcatgagtcatttgttccccgaggaacagcattctgttgaatggtgtccatgaggaaaatgctcaaatagataccattggttttttaaaaaattatttcatcagtaacaatgcaatttgggtacagcctgatctgcagctacgtcaggctgcagccttttgaggcttcacaatggctgatacatactcacctgttcccagcaggcagccaggtacctggatgtccagctccaaaggcacagctgcatttaacgcctggacctgcccaagtctgtgaacctctgggactctaggggctgacctgttcccttgttctagctctgggatagcccagtgcaaacttactactgcaacccggttgtcctctccatggcctgcagctgttcacccaaggagtgcctgagcatccctttcttggaggaacctacaaagagactcgctcaaggacttcctgtcagcagcagaaatgctgagtcatcagtattctgttacagttcattgaaagcagtgctgacagtggtgcggccagatggacaatagtgagagctccagggccccagctcagtgctgcacacaatgggtgacaccaaagaaaagcttttattaaaataatacagtctataatgaagaaattaaattttacaaaacttcaacccactctccagatgattaaatgaattattaggaatatttcttttccaaaa

SEQ ID NO: 265848 - DNA, 624 bp, Homo Sapiens
  misc_feature (296)..(296): n is a, c, g, or t
  misc_feature (307)..(307): n is a, c, g, or t
  misc_feature (345)..(345): n is a, c, g, or t
  misc_feature (412)..(412): n is a, c, g, or t
  misc_feature (466)..(466): n is a, c, g, or t
  misc_feature (468)..(468): n is a, c, g, or t
  misc_feature (494)..(494): n is a, c, g, or t
  misc_feature (536)..(536): n is a, c, g, or t
  misc_feature (560)..(560): n is a, c, g, or t
  misc_feature (613)..(613): n is a, c, g, or t
ttaacacttaacaatttaatgaattacatcacaggtacactttcttaaacttggaggctccgcagatctgggtcatcttggatagctgcaaagaagcaaactgtggtgtttggcttctattatgcgtgtaataatgtctataaatattggtaaatgcccattaatgtccagtattctccaggcatcaacaaattctgtctggatgttcaagcttccctataaactctctcttcaatcagtagttttggaaaggtgctaccgaagcctgcaggttaatagagaaccctttcaggggnctaccacgagnaaggggaggggaatggaaacattcaagtctgtgggggnctgtgatcctggatccaggagttgtttttgccaaaggttttcttttaatttcaagttaggaaacctntgacataaacgattacagttagcagtgaagttagtatctatggttagtatgagngngtaaaacacattttgggaaccactgntttagcaaatggcttagctttaagttttgctactcctattgngaactgatagctgtcactccaggntttttcttattgtattatacctgattttcccattaaacattaaagatgtttanttttaagaagc

SEQ ID NO: 265849 - DNA, 645 bp, Homo Sapiens
  misc_feature (410)..(410): n is a, c, g, or t
atacataggatcataattaggtatagtttgccatatatttattcaataattaaatatcagtttcttatcgtaagaaaatatcagaacagtttcatcatgttggtttaggatcccacctcatatttccaactaagggtttgatttattaaatatttcttatgcatgcaaaatctctccataatcaaggcacaaaaggatgttagaggaaatacaaaattaagaatttggttgttttcaaacacacttggagagaaatttacatatacatgtgtaccatcataaaatgagcactgtgtccacttgggatttgctctaaatttacagatccaagtaaatggatctcacctgcatggtgagacggcaggtgaaaagtaaactcagtggaacctctaaacccatttccaatttcntttcacacggggttcaattaaatgcccaattaatttaaatagcagactgtaaataaagcaatgcacatgattatcatctaattagcactggccagcattataatgtgctcattagcgagttgtatggtatcctgaggctcataatgagtaatcagggtactcgtgattggcatgtggctatccgaatgcaactactcaacccaataaattggagttaggacagaatgtgttatgt

SEQ ID NO: 265850 - DNA, 377 bp, Homo Sapiens
  misc_feature (22)..(22): n is a, c, g, or t
  misc_feature (35)..(35): n is a, c, g, or t
  misc_feature (41)..(104): n is a, c, g, or t
tttgcccagcctgttcttgaanctcctgccttcangttcannnnnnnnnnnnnnnnnnnnnnnnnnnnnnnnnnnnnnnnnnnnnnnnnnnnnnnnnnnnnnnntcggtgaaaacctcagaggcaggcagcatattccctgccgagccggtaggtggcgcagtcagataagcattaactaaatcacagctccctctccccatcagaatctttatctagagggtaaccccaaacctgagaatttggtcaggtccgcacacacacaggcatcatcattcttcagcgccatcatgaagggctcttctccccctgttaaaggaaactatcacatagtcttccgaaacagccagtcaaaaactttgtgatgcaggaaagaac

SEQ ID NO: 265851 - DNA, 475 bp, Homo Sapiens
  misc_feature (388)..(388): n is a, c, g, or t
tcagctaccgtgtccagccgaaacatgaagtttcaaaatgccaagatgtatcacagaagacactcagcagtcagccacatttatcttggagaagagttccatgacttaaatgtttgaatagtataaactagttttttaaaaagtctgcctgaagccgaagattaaatactttaaaaagttcactgggtgatcttggcatgttgacattatcttaacagtctaaggcttgttaccttacaccaacctgacaggttcattagaaagcacatgaatacatataaaaggcataaaagactgggtcaatgaatatggagctctgaattctaaaatttcctttggcattttctaggcagtacttaccatagtatggtttacgtacctggtgagntgacaatggctcaaaaatttctgaagtatttcatccacattatggctagcgaatggtcaattggtcctttaaaattcaatggcatga

SEQ ID NO: 265852 - DNA, 798 bp, Homo Sapiens
  misc_feature (755)..(755): n is a, c, g, or t
ccatgcctggcctaggtttgtctcataattatccttggtttggggaataaagaataaaggaaacagtcactgcaagtccagaatcatttcagactcctcacaggactggaggttgaatggggcaccaattgcttggctggaaggaagtaaagaggagaaagggagagatggggcaaaggcagagaagacagtggtggagacagcagcagtgatgttacctggctctacgatttctctttactgatcagtagccagccctttatttaattttcctgtgctctgtccaggacaaaagtgtgcttcctagaaaaccccttgatttattagaggagatgtattccaaaacaaaaattgaaagggtgtctatgaaagagattgtgggaagatgaaaagggcatttcctcccccaaaatgtagtaaaacacaggaggaaatttgaaaataaatataatatttatcttacacacacaacagaatcacattaaaattgccttaaaccattgtctatagtagggtaatctaatgattctaagatttcttgttaattgatgtccattcactttgagaaggattgaggaaagtaatagagcctctttattatactgcaaccttgctgatgatggaggtttgggattgtattttgatttttgagaatgtatgcatttctgaccaggtcttggaagctccaaaataatagggcagtcttcaaagaaaggcacttgtaaactctttggagaactattgagccttttatncttggaagtcagctctttatccacatgcaattagtctaaaata

SEQ ID NO: 265853 - DNA, 483 bp, Homo Sapiens
  misc_feature (70)..(70): n is a, c, g, or t
ggggagatgtaatcctaaaaccaaaaattgaaaagggtgtcctatgaaaagagattgtggggtaagaggnaaaagggccattccctccccccaaaatgtagtaaaacacaggaggaaatttggaaaataaatataatatttatcttacacacacaacagaatcacattaaaattgccttaaaccattgtctatagtagggtaatctaatgattctaagatttcttgttaattgatgtccattcactttgagaaggattgaggaaagtaatagagcctctttattatactgcaaccttgctgatgatggaggtttgggattgtattttgatttttgagaatgtatgcatttctgaccaggtcttggaagctccaaaataatagggcagtcttcaaagaaaggcacttgtaaactctttggagaactattgagccttttatcttggaagtcagctctttatccacatgcaattagtctaaaatac

SEQ ID NO: 265854 - DNA, 1167 bp, Homo Sapiens
tacctagttcccttttgggtttgtctcttgactgctacgggcattgcccagggaaccatgacagtgaagatgactggccaagcttgtggactggccagcaagcttgggctgcctgagacgctttgaaatggctgccttctgagttggtcttgagggtgaagactgaccacccttctcacctgcacagtcacagtccctctcctgctggcctgactgcagctgtcctcccagctggccacctgaccagagaccaggagagaggccacagctccagaccctccagagtcccacggagcggaggaagaaggcttaccagagagaccctctgatgcatgagccaggccccagcccttctccctgcatccaggtgtgtttccaccgcaaaatgcctccacacaatgagcgactttggccctgcgtgggtcagcatgtggtctgaggtaaccctcaaatgcctccaccacacatctgtccacctgcacgggttcaaggtgagcacttgcccccttctctcctccagaccagtcgcctgaaattctgagcaacattccttcaagactatcatgtaacccttggtgatgctgagtccagacaggaaatgcagacttgggacccacctgtatcagcagaaagaggccttgtgccccgtttgtccgagtcccagaacggagcaaatgagaaaaccggcgagctgtcccccgaggagctgtagggagattggtttttagtataaattacaataaaattttgtgtatgtgtacagctgtgttcacatccacagtgtaagctgtgatatggtttggatgtttgtcccctccaaatctcatgttgaaatgtgatccccagcattggaggtggggcctgatgggaggtgattgggtgatgggggaagttgcctcatgaatgacttggtgccctccctggaagtgatgagtgagttcctgctgagctcactcaagatgtggttgtttaaaagagtgtggcacgtccctcccccaactctccctctcactcccgctctcaccatgtgacacacctgctcccccttcgccttccaccatgattggaagcttcctgaagcccttaccagaagcagatgccagccccacacttcctgtaccacctgcagaaccataaaccaaaataaagctcttttctttatcaatg

SEQ ID NO: 265855 - DNA, 672 bp, Homo Sapiens
  misc_feature (482)..(529): n is a, c, g, or t
aagcaatacaaacatattgaatgaataaataaagacataaatatgtgggagagtggaccacgcaaggacaaaaagaggagagaaggcagcaagaattatgactaattcaaaactgggtttcctgagatagttaaataaatcctgcaccaaatccccagggggagaaattaacaaacaaaagacagccccacacggaccagtgtgcagaaggctccaggaaccgcagattatggttaatccaattctgtgcacctgaggtccataaataaaagaataagtattgaaatgaaagaatgacagaaagaatgaatggacacatgaacgactgaattagaaatggaaatgcctggcacagccaggaaggagctgcccatgggattgtcattcatctcactctgggcacctgaggtccataagcgtgaaaagaggcaggaagagaagtgtcagggagtcaaagatagagctaaggaaaggcaaaaatnnnnnnnnnnnnnnnnnnnnnnnnnnnnnnnnnnnnnnnnnnnnnnnngagaacgaatacgtgggtgtatctgtaagagtaggatctgttaggattagtcataagactgtcagtaatcctgaagatggatgagataatccaggcccaggttcccagggggagggaaaatggagaaaatataaaaagatgtg

SEQ ID NO: 265856 - DNA, 346 bp, Homo Sapiens
  misc_feature (53)..(199): n is a, c, g, or t
  misc_feature (203)..(212): n is a, c, g, or t
  misc_feature (334)..(334): n is a, c, g, or t
tgtgagtcaccgtgcccagcctgttatctagctttttaaaacactgcaaaggnnnnnnnnnnnnnnnnnnnnnnnnnnnnnnnnnnnnnnnnnnnnnnnnnnnnnnnnnnnnnnnnnnnnnnnnnnnnnnnnnnnnnnnnnnnnnnnnnnnnnnnnnnnnnnnnnnnnnnnnnnnnnnnnnnnnnnnnnnnnnnnnnnngtannnnnnnnnnaaattcccatcttcatgcctatggaaagacatgggtaggtggagtgacaactgaggggtgagggaggtgactgagccaacattgactgtctttagcaatacactggccttgatgcggggctncctgtgccgaat

SEQ ID NO: 265857 - DNA, 551 bp, Homo Sapiens
  misc_feature (402)..(475): n is a, c, g, or t
aactccctaacaatgactgactgatctctatacacaattattgaacactctcttaactacccccttttaaatttggaattctttgtatctagcatcattcatttgaataattcaatggtatctatattatttttttcattacatttaacatttctcttttgagaaaatggacataatgacatactacagttttatgttgaatgagtcataagtaaaatgtccatagcgctaaactatgtcccttgactctagcagagctgtgaacccacctaacgtctaatgggaaaacatttcaaccattgttccaattataagaggtttgtcagttcagctgacttttgtaatgtagacattcatccgtgcaaaccaacagattacttgggacatatgagagatctaacnnnnnnnnnnnnnnnnnnnnnnnnnnnnnnnnnnnnnnnnnnnnnnnnnnnnnnnnnnnnnnnnnnnnnnnnnnctaagaatcattagctcgaactgtcttctcagtttaaattgaggaagagggcggaatgcagtggttcacacctgta

SEQ ID NO: 265858 - DNA, 786 bp, Homo Sapiens
tctcctgtacgtccattctgaaagaacactgtgcaaattcagtaccctgcacaccaacacacctacgacacctcccttaaacgtggaaccggaagcctggaattgccctggaggcagacgggactgttagctgcccccccaccggccttccagagcctccgaagccccctgcatgcatggcgccttggggcctttgcatggctgccccctggagctctgcgcctgcccaaccccttcactttgttaattcctgtcctgacgcggctcagacgtttcatctgggaggatggtttcaggtgcacaccaccccacccagccaatttttcaattttttatagagatggagtctttctgtgctgctcaaattggtcttgggctcctggcttcaggtgatcctcctgcctcagcctccccagagtgctgggattccaggcatgagccaccgtgtccaaccccgttttataaataagatcatgttctgaggttctgggaggacatgaatgttgggggcacacatttaactcactactgtcttccaatccagatgaattttctctccctttcatagctcagtccgttttgtttttaagcgtgctgtgagtcttaacgaggatagcaagtgccactccccattcggagtagaccatcatctcatttagaagagacagcgtgcattagatacaaaaactcaaaggtgtttagatatgaatgtggcagagacacaaattaactgcgaatcgcagctgtcatccagggcagatttcctaaaagaggtgctatctgtct

SEQ ID NO: 265859 - DNA, 402 bp, Homo Sapiens
  misc_feature (116)..(116): n is a, c, g, or t
  misc_feature (125)..(125): n is a, c, g, or t
  misc_feature (324)..(324): n is a, c, g, or t
  misc_feature (382)..(382): n is a, c, g, or t
ctcctgtacgtccattctgaaagaacactgtgcaaattcagtaccctgcacaccaacacacctacgacacctcccttaaacgtggaaccggaagcctggaattgccctggaggagncgggacttntggctgcccccccaccggccttccagagcctccgaagccccctgcatgcatggcgccttggggcctttgcatggctgccccctggagctctgcgcctgcccaaccccttcactttgttaattcctgtcctgacgcggctcagacgtttcatctgggaggatggtttcaggtgcacaccaccccacccagccaatttttncaattttttattagagatgggagtctttctgtgctgctcaaattggttttcgggctcnggggtttcaggtgattcctc

SEQ ID NO: 265860 - DNA, 818 bp, Homo Sapiens
caggaaaggggcagcctacaaatcacagaacttttcgatggtaagtactttcctccagctaaatatcacaggaaaccctgcagcaccaccctcaccctgctaatcagagaacttttcggcggtaagtactttcctccagctaaatatcacaggaaaccctgcagcaccaccctcaccctgctaatcagaggctgagcaggtacttcagattcccactcatgacaagctgggatgagatgctcctctctgcagggttgctgtcagagaagactggctgaggagttggggttttacttctgctgggtggtgacagagcacagcctcctttctgctagggtatcataagagggaccttgcaaaactcaggaactttactgctgccctgtggtcatgaggccacccccctgtggtgtgggggagactgtatagggagcagcacggaggcagccctgattcagccttggtggtgggagtggaagttcggcaggaggctgaactttccttctcatgcaggggtccgtggaggctgagtgggaatctcaacttccacctcaccgtccacatccacctggcagaggcctgctctaacagaagacttacatcagatcctgagtctgatgtcaggatttcaatggaaaatcactcataggaaaatctcaacctcagtaagaaaagaccactgatgccaacgtagagatgacacagagtttagaattatttgacaaggaccttaaagcagcgattgtagaaatgcttcaataaccaattaacattcgagacaaacgacaaatagcctcaggaagaaaatacaggatgta

SEQ ID NO: 265861 - DNA, 454 bp, Homo Sapiens
  misc_feature (161)..(161): n is a, c, g, or t
ccctgtgtgtggggggaagacttgtataggggagcaagcacgggagggcaagcccccctgattccagccccttggtgggtgggaagtgggaaagttccgggcagggagggcttgaacctttcccccttcctcatgcagggggtccccgtggagggcctgangtggggaatcctcaaccttcccaccctcacccgtcccacatcccacccctgcagaggcctgctcctaacagaagaccttacatcagatccctgagtctgatgtcaggatttcaatggaaaatcactcataggaaaatctcaacctcagtaagaaaagaccactgatgccaacgtagagatgacacagagtttagaattatttgacaaggaccttaaagcagcgattgtagaaatgcttcaataaccaattaacattcgagacaaacgacaaatagcctcaggaagaaaataca

SEQ ID NO: 265862 - DNA, 1145 bp, Homo Sapiens
tgctaatccttaacagattaatctgagtttatatttagatgaaagttattcattaatagaaaaacctgaaactgtagtgagggctgacagtgtttaagtggatagaggtacataggccacctttagaccaaaaagtctttgtaaggcactggagtctttaagtgtctgctttggcacaaggacatcaggttatccttaggaagccaggaacaccttgagactcgggccagaacaatgtggcccacctttgagcttcaggtttggtcccagtgagtctcacgcctttttggatgctgaccatatatatggggcaaaacactctgtaatctgctttaccccacttacacccatcccatccatccctagttgcaaaaatttcaacttgtatgaatatgcacagattcagtagtggaaactcagcactgttgagtgccaggcttcaaatatggaattagtgacctctgaacccgtgtttgtcaaactgcctgctaatgggtcatgacatcagtttagcagattatgcctagcactattgttccagttaaattgctgtgaaacaaaccaccccaaacttagtgacattaaacagtaaccgtttattatgctcatggattctgtggctcaggaattggacagggtacaatgggaggtggcttgtctttgttccatgatggctgggggttgggatcatttgggggctcctctactccacatctgatgtctgggctggggtgccttgaaggctagtggaatcagctgggaccaatgaccagaacacctacatgtagactctccatgtggtctgggcttctcacagtgtggtggctgggttccaagagagaggttccccagaggaagcatttagagagccagtgttccaaaagaacaaggacatttgataaccttgcctctgaagttacatggcatcacttctgttccggatttgtggatgctatctcaagcctgcacagattcaagggaggtggagatagagagatggagatctatatccccatctctcaatgggtagagagtcaaaagatttgtggctgtttttaaaactactacaagttcattttaaaacaagatagatgcttgagcccaaaagtttgaggctgcagtgaactatgatcataccactgcat

SEQ ID NO: 265863 - DNA, 1138 bp, Homo Sapiens
  misc_feature (758)..(758): n is a, c, g, or t
ccatttccatctttatcaagaatctaaacactttccaggtcccaggcaaccaaatggcaagaaaagctcagaagtgttttgtttggtaggtagctagtgttgctggaacctggactgtggctgactagtaagactgcaggacaccagtgcccctgagggctcatatggctccagtagatatgcaggatctagaataggtagggaggagttacagaaggtatgtattggccgcccacaatcaccgaaagatgaatttttgcataggcagagaccttggtaattagctaaaaatacaggcatcacacaaacttcttatgatattgggttgatctcagcaaaagtatagaaagggaaggacttgaaagaagaagtgaattttctatatgtttaaatgtgttaactggaatgcatggacatgtgtaaccaagacctttatgtttaaaaattaaacttgctctgatcattaattctatagaattaatgttaccaaagctgcagtaacatactattcaaaaattcattttcccagacttctaactacttaaaacaaaaaaccccccacacacaattacatacattcacacagctgctatgctcccaaatggaatgcatatattaatgcacacacagagacactcagaaagcacacgtgcagggctgccagaagacacccattttgaacctgaggtgcatgtggggccgcagtgaaggtcaagaagcctggctgcatatctgtttcaatgtcattcatctctttnggggacagtctgcagaaaggatgagaggtgagtcctgagtcaccactacatcatcctcaattcgtacaccaagaccccgaaacttctctggggcatctttgtcatcctctggaatataaatgccgggctcaattgtgattaccatcccaggctgcagagggagggaacggggcatgtctggagtgtcatggacatccatcccgaggtagtggccaacatgatgaggacagtattttcgagcagccttgaaggcattattttccttaatgttcttcatgatccccaagtctttaagcttctgtcctatcagggtcagcatcatgctggtagatgttctccaagcttgtcccagggaagcagagggccaaacaatctctttg

SEQ ID NO: 265864 - DNA, 521 bp, Homo Sapiens
  misc_feature (175)..(185): n is a, c, g, or t
ataattgtgaacattggtacaaattatgtattttgtcatcttgtacttcaaagctccttggattaaacattaatgaagaagaatcaatagagagaacagaaataaagcgcatattcagttgaagtctgaaggagtttttaagactctagagaagagaaggtgtaaaatactaacnnnnnnnnnnncagctgatttatcaatgtgattcacacatttctgaggccacaaacaggatatatggcatatgttggcctaaggaaacaaaacaaaacaaaactcttcttttgtactttattcgattaaatagctaaagcctacatatggaatttttgtacctgattcactcaacaaacacattgacctttatatgagttgaactttatttagacataatgagaagccattggaatgtctgaaatgtgaggagacataatcagaattatgctttaggatgtttgttttggcaaaggtatgcaggatgaattacaagagagaaaaactggccgggagctgtgtctcat

SEQ ID NO: 265865 - DNA, 1039 bp, Homo Sapiens
  misc_feature (889)..(889): n is a, c, g, or t
  misc_feature (898)..(898): n is a, c, g, or t
  misc_feature (904)..(904): n is a, c, g, or t
  misc_feature (912)..(912): n is a, c, g, or t
  misc_feature (942)..(942): n is a, c, g, or t
  misc_feature (1019)..(1019): n is a, c, g, or t
tgacttcagtataaaaagtgttaatcctgacccactatattgactttaggattcattaataagttgttacctgcagtttgaaaaatacttcttatgaggcaatttaaatatgcatttatagtttgaaattgcattatttagctgagagaatatttgcaagttttctgactccttctcttttcttttcttccatagatatgtgcattactgaagtgtcaaaccactgacctgggaaacgtgtggagaacctgtggggtcagcttttaccaagtttgaagacttctccctcagtgggcacatttggaacgcgttatgttttcccacagatcattctaagtggggagtcagcttgcccctgaaaaggacattatgaggtaggaggtgtgcaggatgataaattcctttgagcagagtagatgggtagagcagcataatgaaaatctttgaaataatgagagtatagcaatatcgtggttcacattctacaagaaacaccttaaatatgtggaaactatgatatggaatataaattgtggttttagattgccattaggctgtgatggagaatttggggttcatttttttaacataaatgtgatgttgatattcaaggcaacaggaaattcacagagaagctaaaataaaaatgttgactgctgataatggcaataatgttgtcatttgcatggtgtagaaggtgcaaattaaatacattaaataatgcatctacaacttattttctgggtatactattttgagaagttgttataattatagtaataactaatattttgtatagtgtttcatgagtttgaagaacatatttttatacatattatttgaccacctgtgcaacaaatttgttggctgcactttcgcacaaagtccntctactttncagacntggaaacntgaaccggggtcttcccaacaccaattccngtgtggatttttacccttctacactgctttagggagggagtgatctgcccgaggagggctctgggtgtaacccaaantctgcactgaggttaaccct

SEQ ID NO: 265866 - DNA, 394 bp, Homo Sapiens
  misc_feature (357)..(357): n is a, c, g, or t
  misc_feature (366)..(366): n is a, c, g, or t
  misc_feature (376)..(376): n is a, c, g, or t
tagccaggctaatcctaaaagggctctgctaaaggagatcactggaatttcccagatccctgccctaagcgtggagggtccttctcaaacactcttccatacagggccataactaagacaggcaaaggggctccacttcggctcctcaagcgtccatctcttgaaatctggtcaaagaaagcaaagggttaacttcagtgcagagtttaggttacaacctaggaggcccttctcagggcaaggatcactccctcctaaaggcaggtgtaggaatgggtaaaaatcacacagggatttgggtgttgggaaggacccggggttccatggttttcaaggtctggaaaggtaggagggggncttttgtgncggaaagttncaggcccaaccaattttg

SEQ ID NO: 265867 - DNA, 878 bp, Homo Sapiens
gttcggtaccagtcactagatgtgatttatttgaggggctgttgtagggagttaggatacacagcatgcagggagaggaacgcagactagccaaggcctaaggtaccccaagactcactttcgccactggtccttggccttgatgacctgagttggcatctgaggttggcacgcatcccatctccacccacctgccaccaagggcagttggtggttttgccatcccatccctgtcccctgctgcccaccctctgccacctaagcaccaggatgagggtgagttgcattagggcttgccactcccctcagggacctcaagctgttgcctgagaagcttgagagggtcctgtggtaagtgccctcttctggcaccaaggaagaccaggacatctcaggaaagcaggcaggagagggttggagtaaagggagggctgaagaaagagggctggggtcagaggtcagccacaggcctcagggtggctgccgcaccctccagggctgtcaccacaatgctgagctgtctctggacctcagcccaagcttcagatccagaagctgtgtccctggccctggagcaggcattggataggcccgggaatgtgaactacggaagcccgtgcgaaggtgcccagagcacatggctgacaagagaaatgggacaggatcagggtcagtcagtcaggggcccaggaaagagaagcctgggcctagaactggctcagctcctgtacgcagcgaggcagaaaagcacccccgtccacttgtctctgaaggccagggagctcttacagcagtggcggtcgggggaggaaatgtgggttccagtcctagctcccagagggaccctcaagcaactttcctcccctccctgagcctta

SEQ ID NO: 265868 - DNA, 743 bp, Homo Sapiens
ctagagatgagcacgtcggcatggggatgctgggcttgaggcttctagagacagagcaggcaggggcatccaaaggtcttgattgattcctgtgtcccaaggattcttcatgccaatcctctcactgaaaacgactaaaaataaagaggataaaaatatttctaaatcttctcgacaccatccaagggccaatgagatgataaagaatgactttcttccagcctgcactcttgctggagcgcaggcaccctgtgcccagctgcagccctcaaccccactctggacctacattcaacacagctcccctgggctttgcttacaggtttccttttgcttttcttgtttgttttgggtttggtgggggtgggggtgctgctattgctgctgctgctggtggtggtttattgccaagtaagacaaagtgccctctttttattgcagtggtgacttttccttcaccttccttagctggcagcaaaggccctaaaagagtcaagttgcttctggaagattctagagagatacaggcagtcataagaggcccacagacaataatcaggagtggaaatagaaagttcttaaactctgagtgattgatagtggtagcaaacagctttgtgaaggtaaaaactatgagtcaatggtagttaaaagctggcaagagacctgattttgaaatgaaaaaatccaccaaaagagaaggatcacccaaacagagagggaggggcaattcctgtaaaatt

SEQ ID NO: 265869 - DNA, 833 bp, Homo Sapiens
  misc_feature (515)..(515): n is a, c, g, or t
agcagcactggtcccaagcagaggccttgccctgctgggaccccgggagtgagagcagcccaaggatcccagggtgcagggaactccagagctgcccacctcccactgccccctcagcacacacacagtccccaggcggcctaggggcaaaggctggggcgggctttggtcccttttcctgggcccttccttccccacttctaagccaaagaaaggagaggcaggtgcttcctgttaccccagccccactcagcactgacagtccccagctcctagtagtgagctgggaggcgcttcctaagaccctttcctcagggctgccctgggagctcattcctggccaacacgccctggcagcaccagcagctcttgccacctccagctgccaaacagcagcctgccgggcagggagcagccccaggccagagaggcctcccggtccagctcagggatgctcctgccagcacaggggccagggactcctggagcaggcacatagtgagcccgggcagccngtgcccagctcaggcccctttccttccccattgaggttggggtaggtgggggcgggtgagggctccacgttgtcagcgctcaggaatgtgctccggcagagtgctgaagccataatccccaaccatttccccttgtgacgcccaggtactcagctggcccactccacagccaggcctgccctgcccttcaccgtggatgttttcagaagtggccatcgagaggtctggatggttttatagcaactttgctgtgattccgtttgtatctgtaaatatttgttctatagataagatacaaataaatattatccacataag

SEQ ID NO: 265870 - DNA, 533 bp, Homo Sapiens
  misc_feature (13)..(13): n is a, c, g, or t
agatgttccaggnagtagaattcctgactgctgtgtgaaagtgaactgctactccatctctgaaacatatctgagaaacggggcagaaaaccagtgtaaactgctcgtggtgaaattattgaacattgaagtgtgaggcttgtcctaagagcacgtcacctcccttgacacagattctgcatgtccttccctctggtaggatcctccagttccgtttctcagcgaagtaaccagaggttccagtctgctcttgctttctgggaggaagacagagcacctagtaatagattcccagggtactgattggcaccacacatgactcagaggggacctaagccatcagcaggctgctctaaggacctacctcagggcactcagacagcctcaccaatcagaggctcaggagagggttttcctcactgccctccttgtgtgcactggtttcctgtttagagcagcatttagcagcaccacacacctcagatgtagaggatgaacctctcttatatgaaataaaatgatgtccagcaaaa

SEQ ID NO: 265871 - DNA, 808 bp, Homo Sapiens
gaaactgccttttgtcaattagctgtagtcagtcagcaggaagagccgctcacgtgcacacgagcacctggggccaggcatgagggccagaccctgaaggagacctccagtgaagcagcaccccggagaagacacagtcacaacacacgatacccacactttcttgctccaatccaatctcggagtcctcttcctttcaatcaacactatttcccccacacagtgaagggaagaacgggtgctaccaaattctcccagaaaactaatgttcttattaagcatatcaaccaaactcaaagcagggcacgctgcagcatgggcctttcggattcgtggccaccagcaaaaccaacacagggggagcccatcccctggaggcatggccccagtctgaaagcgctcagtggagtctgcagagatctgaaagcgctcagtggagtctgcggagatctaaaagcgctcagtggagtctgcggagatctgaaagcgctcagtggagcctgcagagatgctgctgcctgaaggtcagtcatggactccctgggggaaagaggtcagaaaggcaaggtcccagggatcctcatctcactgccatgggtagctatttttacagcttaagaggaactgctaaggcaggcaggaaatgtgttacttaaaaagggatcttagataacatgttttgttcccagagttagctgtcaaatatattttttaaacttttatggctatttgagaaatatactcaaaaactgcagaaagacaaggtgcttctgtggaacggatcttccttcggctcattttcatgtgc

SEQ ID NO: 265872 - DNA, 459 bp, Homo Sapiens
  misc_feature (432)..(432): n is a, c, g, or t
tttgaggataaattgccaggtttattttaccctgtaagagctggcaaacagagctaaggaggtgaactgctctcccacctgcaagagtttacaatataactccaaggaacagagtttggttgtatattgctatgtccatgaaatggcttgcatttggtctcccagttcacaacgtggtcagtgcagagggatagaagtgttgatctggcaccacgtggccgcaccaaaaggctcaatttcacagacagcaaataactattcctgcttctaatctgattagcatcttctacccaaacccatggaaaatacgttatcagggagatcaaatacaattggaataactgcaatacgaaaaccagactggcaagagccagtggggattttctgggtttgggggtgattgtggaggtagtagcttttaaatgaaagctncttgacaaaatatttcctttctatcag

SEQ ID NO: 265873 - DNA, 409 bp, Homo Sapiens
  misc_feature (48)..(48): n is a, c, g, or t
ccccaacctgcaaagagtttaacaaatataaacccccaaggaaacagnagtttgggttgtaatattgcctatgtccccatgaaaatggccttgccatttgggtctccccagttccacaacgtggtcagtgccagagggataagaagtgttgatctggcacacacgtggcgcacccaaaaggctcaatttcacagacagcaaataactattcctgcttcctaatctgattagcatcttctacccaaacccatgaaaatacgttatcagggagatcaaatacaattggaataactgcaatacgaaaaccagaactggcaagagccagtggggattttctgggtttgggggtgattgtggaggtagtagcttttaaatgaaagctcttgacaaaatatttcctttctataag

SEQ ID NO: 265874 - DNA, 750 bp, Homo Sapiens
  misc_feature (738)..(738): n is a, c, g, or t
actgtgaactaccactgtaaatattggtgataattaccgtgactcaaaggggttgtgctatccttgggcttcttttcctcttcagcttgctcctagaatacagaaaatggtgtttagatggtattgctggataattgttggaaacactgaaaactaatgttcctttttgcaggaaggaaagttatgaagatcctcgtcactgaggcggacaacgcacacaatacccagagtcttccggtgggtgcccgggaggggtacacatgatccatttgggacgtgggagggaatccattaaaagtattgcttctgggctaaaataaaagagacaggaagctttgataacagttaatattgaggttgaacacaggtaccttccctgagtggatcccctgggcctgaacagtcgcacaggagtggctgacagaagaggcttggtcctcaccgaagccaagccctccatcctacttttgctttcagcctatctgggtctactacagtttgtaagtactcagttaaaatgctttaattttaaccaaactaaccttcatagaatggacaagcgacttcaaaaattcctgaaaagaaaccatgaattgtgtatgatgaacaatacaagcacacgcagcaagcaagatggtgcagccccaccccatggcgcaagcaaggcatgctcttcctgcaactcttgaaggaacatttaccattcaacaaagactaggaaagtggcttgaaaccagnctttggggggtt

SEQ ID NO: 265875 - DNA, 455 bp, Homo Sapiens
gagactgcatagggctcggcgtggtgcaggagcagaaggagagacagccacacagatcacctgggcgggcggcatgaggctgccttcatcaagtctgctcacacatcagcatgctgctgagagcctcaaatcctggagaagacctacagttggggtggaaagatcgcagacatgatctccatagactacaaaccagggaccagatgaatggtaagttgccatggataccagtatggctacatgatgacaaccaaagatatcccccacccactcccatcctcagctgaccctaaggttttatataaacaatctaaaacttagacgcacatccaaggaggagggagccctgaagtgactgaggaaatcctgattgacagtgagtactttcccaccactctggagaaagtgagctcaaaaaagatatccaattgaggttgaagaaagcaaggatccct

SEQ ID NO: 265876 - DNA, 634 bp, Homo Sapiens
gaggaaagctgtaagatgaaaagacatcttgcagtccttgcagcgaagcatgagctaaatgtgtgcatgcataagagaagctcttgaatccccaaaccacctcattctttcttcagcttttacagaagaagcaatggtatccaaaatctttcccctgttgtctgccttcccaagggcttttaccagcagcaagagtgcagaagtgtctgctagttttgagaaatgtgtctggttctccttttcctttccttataggcttccctccaccaatcctggagctaaaagaatcatacccattggcagggactgacattaatgtgacctgctcagggcatgtattaacatcacccagccctactcttcggcttcagggagccccagacctccctgctggggagcctgcctggcttctacttactgccagggaggaagatgatggctgaaatttctcctgctaggcctctttggtggtgcagggtcagcggttgatgaaaaccactgtgatccagctccatatcctatgtgagtggaggcctgatctttcttgtcaaaataaggattattattttcccatttctagagagcttcttggccagcagtgcttcattattacagttgccacatttttctcatt

SEQ ID NO: 265877 - DNA, 770 bp, Homo Sapiens
taatcttgggaaagtgataagcatatcaggaagacatatttcttctagcttgatagaagagtgatgaatctaggatgtgacctctgctgtgtgagctgatgtctccctgatatatagtggctctgtgtgtgtttgcatagagagggaaagaggatgcatccgtgtctctgtttttcttcccggccgttcccaacagtgaatgggtgattgaggggctggagcacgtgcagctcctcacccacgctgaaggcatctctagtaatggcatctggcccatatgcagatctagctccactctgtgctgacatcagccggtttgtggcacctcagcgtatttctgggttgcaaatgagagtttcttagtgccaggcttgcttgggctgtcacatcaggtgatgaattctctgcatcaaccgtgtgctgctaaggtaatcgcagaggaagagtgggaaaaagaggagatggggcaggtgcttctcagccctgcagccgctgctcagggctaaaagcagcactggatccacaacagggagggagaagcaactatctgtggtccccgttctggttcaaggagggtggtagagaaaaggcagggttttggttgcaattctgtgtcacgtgtcctgtcaggagaaaccacgtgggttttcccatctgccattgccccatccttggctcaagagctagctccctctacctcctcagacaggcatgttttgcattaccttttaagtgaagttctagcaaaatttggtgtatatcaaattata

SEQ ID NO: 265878 - DNA, 741 bp, Homo Sapiens
  misc_feature (478)..(513): n is a, c, g, or t
gcatgggactcctcccactccagtatccagaactcgcccaagctgacccccaaaatgaaaaaagacaagagggcttccaggggcaagaaagagaaggtgaggcagctgcagcgcactgagcatcaggcggtgctggcagagcagaaaggccacctcctcctgggacagtgacgagcggcccagtcccgaagaggaagaaggcaagcacatccacctggggccaccttgcgctttacagaggacacttgcacagcattcgatcttgggagatccaagagggtaaactggttggaatctgcggcagtgtgggaagtggaaaaacctctctcatttcagccattttaggccaggtaagatttttgttattgtccttttctgctgctttctctggtttgcaagagtctcaggaaaaacgaacaaatttcctggagagtcaggaaaggtggaaacaaatgaaccctcagcctgcattgtatgnnnnnnnnnnnnnnnnnnnnnnnnnnnnnnnnnnnnttcacagccttctgcctggaaggaggcctggtgggcgcctgatggatgactgactgttgtcccagctggagccatttggtctcatgccttctttcattcagcatgtatctattgagtgccacaggtatgcccgtgtattgaaaatgtcagagataagagatgagcagacgccctacactgcagcgctgccaacagagttaacctgtaaagaagcagggcggccagcac

SEQ ID NO: 265879 - DNA, 403 bp, Homo Sapiens
tgaaaaatcaaaatcctagaaatcacagttggctgaataaaaagtgcaaaaataaagcggaaaaataatctgaacttttatattaggtatatcaagtttgaaagaaacctagaaacttatctataataatgatatatcccttaatctttctaaaaatggactgtggcattttacaaaaagttaaattaggaacaggtaaagggaaaataaacctatggaaaatcaaatgtgttagttctgaggaatacactatcttcgagcattaaacttagtttgtttacctcaacagctgcctaaaagccagaataaaagatggtggattacaacattcttattccttggcagaagcaagcattacatctacacaaaaatcttcataaacttgaatgctagttaactaaac

SEQ ID NO: 265880 - DNA, 682 bp, Homo Sapiens
ggccgcttaattaaaatgaattattgtaaaacatttagaatattatcttacttaaaagtcttgtttctttcttcaaagaagttgagtcaaattaataattgccgtaagagaaaccagaaacctctgggtcttgacaaactggccgggactgaggcagtgctcccgacagcctggaggccaggcaggtttgattgaccagtcctcacaaaatggaaaggccttcttttgaatggcagcttgccaacataagtgtttgtcagtgtgggcactgaagcagagtagcatttggaaggcaaataaaatatagttgaaaagcagagcgaagttgaaggggaccagctatactagagggagagaagaaaggatgatggtttcttgttcttacgtgtggacatgaaaagaaacttcattaatttacagaaggaatctcaatcattgagaatataagtaagatatcatccatattgaatggcctctgtattaatcttacgtgactcttgtgtctcagataggtttacctgatttggagagttattcagttatgtaattgtggaagaatagtatggcatgcattgggtttgataatgacacaattaaatgaaaatgagacataaaaccaactttttatcttttaagcaaaattataaaattggtatcaatacatcagggtattctagctcgt

SEQ ID NO: 265881 - DNA, 341 bp, Homo Sapiens
ttagaccagccaaactgtagtgcacacatcagctgaaggcagacacatgagtcagcctggtctctattgcctgagcctgagggcacccagcagaacattcccagcatatcattagactactgaaccataataaatgttatttgtttaggctcccaaatttgggggtggtttgttacacaacacaaatcgatacaggagtgaaggaaagaaaattaagaaattcatgagcatttagggaaaggctcttcatgaactgtcacaacaaagtgctagtaaactttaggctcttatttagacttataataatttaatgtgaattatcatgtaaaagtagaaaagct

SEQ ID NO: 265882 - DNA, 610 bp, Homo Sapiens
gagacccctgaatggttggacagtgattcctgccaaaagtgtgatcagcctttcttctggaacttcaagcaaatgtgggacagtaagaaaattggtctaagacagcaccactgccgcaagtgtgggaaggccgtctgtggcaagtgcagctccaagcgctcctccatccccctgatgggcttcgagtttgaagtgagggtctgtgacagctgccacgaggccatcacagatgaagaacgtgcacccacagccaccttccatgacagtaaacataacattgtgcatgtgcatttcgatgcaaccagaggatggttactgacttctggaactgacaaggttattaagttgtgggatatgaccccagtcgtgtcttgatgactctcccaggaatcagaaagatagtatttactaaagaaacggttgttttaacccaaatcattaccagagtggtaaagcagacatgtgagaagtaagaaagaaactaaagaccctgaatgaatttgcagattacccatgtgcacagtggggacctggccagtgagcactcgcaaggggactcttccaacttgttcatacaatataaaagaagctatttttttaacaaaaaata

SEQ ID NO: 265883 - DNA, 402 bp, Homo Sapiens
  misc_feature (100)..(100): n is a, c, g, or t
  misc_feature (139)..(139): n is a, c, g, or t
tgtggaaggcccgtctgtggcaagtgcagctccaagcgctcctccaatccccctatgggcttcgagtttgaagtgagggtctgtgacagctgccacgagngcatcacagatgaagaacgtggcacccacagccaccttncatgacagtaaacataacattgtgcatgtgcatttcgatgcaaccagaggatggttactgacttctggaactgacaaggttattaaggtaagatgccatcttattaagaagctttccatctttggcctcatataaatatacaggagcaccaagaacatgggaggcactgttctaaaggttatccttgggtagccggccatggtggcatgtgtctgtagtcccagctactcaggagatttaggagggaggattgcttgagtcca

SEQ ID NO: 265884 - DNA, 704 bp, Homo Sapiens
atgtggctaagtttggggaataatatgacccatgtgttggctctcagattacttaagattggaacccaggaatctggtctcaacagcccagtggtctcatcaaacagaactaactaactgatcaaccaatatgccttgcaatttgatagccattctctgactatcatatgcctaaagtatttgatttctctaagagaagatctacgtgaatgttttatctgctatatactgcaagctataaaactaaatgaagggccagttcaatagcattcctgtgttgctgggaaagatgtgtaagaacatgacccatgtcatggggctaataatggaaacaggggagtgaagctgggcagctcacggaccaaagacgtgaggccaattaccatttaggattaattgatggcaaaaagaaataatgttgatccaggtgattggataactcattcagctggaggcttgtcaagactgaatctgaattcagaatttctccccagaacatgccaatgtcctttcttttcttggtagaagagaaacacttggaaaaaacaaattgttctttcccaagtcttatgttgtgccatgacatagagggattatctgttaagaccacatatgcccccttttccatgagatcctaaggagacatttaatatggttcatggaagcttttagggccatgttagtttgggtgacgaaggggcctg

SEQ ID NO: 265885 - DNA, 549 bp, Homo Sapiens
  misc_feature (530)..(530): n is a, c, g, or t
aagaccccgtcaatcaatcaatcagtaataaaacaggccactggccagatttggcctacaaggcagtagtttgcctgcccctggttcagattagaaaatatagagttgaaatccactagcatagtccctccaagtcctgcttttcttcccccttccctattcccacatgccctggaatattttgtcatatccagtgattcccaagacattgcctaaatgatctgaagattacagtgagcttgccttcatctaagctcaagagactgcagtgcataaagataatttgttcaacagagtgagaactgctttgccaggagcgctgagtgttttagtaatcaatcaatcaatcagtcagagaagaactcattaggcgcatggtgctgttccacactggagatgtgcagagcgttgaggctggatcctcacaagtgttgaggctggatcctggcacgtgggttggtgagaaattcctacttccctattgcccgggtactcattgcagtttcacacagttttagttgtgtataatnccttgagagtcacattttc

SEQ ID NO: 265886 - DNA, 601 bp, Homo Sapiens
  misc_feature (12)..(12): n is a, c, g, or t
aataccctgagnatatctcacaaaggccagtgatgccattcttcatattttgtaaatacagtcctccaaaatcggtattaatatgaaagatgaacagtgaattatttcctctgctcttgtggacagaggtgtacctgtggaagatacatgtcatttccttaagtttttgtatttaaatgaaacaggcatttggagagtagaataacaaatggttaatggcagttgaagaacagcagctgaccaagagggagagtcccatccaaataatgcacacagttaccacatgtccttagctgccacttaggtaaatgtacccttccaagagcaatggatgccctgtaactgtaaactggaaagagttaaatcagaaaaatcgattctcctcagtgtctaagttttttttctctcctgcaaattcttagaacagcaattgtatgggcaaaattattcttccttttcaatgatgctgctctccaccctttcccccataagtctccctgttggtaaccagattgcaagcttaaccaccagtgacctagaaaggcatatcttttgatgccatctggtcccttcttttcttgccttcattctcatgtgactg

SEQ ID NO: 265887 - DNA, 804 bp, Homo Sapiens
  misc_feature (273)..(273): n is a, c, g, or t
aggctggaaatagaaaggcctaggaaataccaagagcattgccttcaaatgtgcataaattccagctatgccttttgatgtcaacaaggaaaggaggctgaagttttgagaaagtgcatttttcagatggggagattcaaactaatttgcagaatgatgaaactgagacagtaaagaagcaatgaaacatgatcttattgtcaagatcctttgcagaaagaggattccaaagcacacctaacagtaagcaaaaaataaccttttcaaccttancctttcccctgagtagtagaaccaaaaccagcccctgtgcctttgctagagaaccgacaatcaaacccttttctgtggaggatcaaggctgcctcattggagtgccccatgccccacctttgactgtattgttcctcaaattaaccagatgaatgtcacaaggcaaagatgactgtaatggagagaattcaccttgcagctcaagggtaggtgaggagaacttatttgccattggaatgactggatgattcatgagagaagaagttatgtggctaaggagagaaggataactgaccgacttcttttcttcttcctatcaagaaaaaacaaaaatgtttaagaggtctatatttccagttctcatcatattaacagaattatctgagagggtttaatataaaaatatatgaataatttggttttattacattttataaataacagtcttagaaaatactccataaactaccaagtttagttgtaagcaataaaagaaaataaacagcacacatctaactcatatgtttaaaa

SEQ ID NO: 265888 - DNA, 577 bp, Homo Sapiens
  misc_feature (344)..(344): n is a, c, g, or t
  misc_feature (540)..(540): n is a, c, g, or t
  misc_feature (549)..(549): n is a, c, g, or t
  misc_feature (556)..(556): n is a, c, g, or t
ttacaactaaacttggtagtttatggagtattttctaagactgttatttataaaatgtaataaaaccaaattattcatatattgttatattaaaccctctcagataattctgttaatatgatgagaactggaaatatagacctcttaaacatttttgttttttcttgataggaagaagaaaagaagtcggtcagttatccttctctccttagccacataacttcttctctcatgaatcatccagtcattccaatgggcaaataagttctcctcacctacccttgagctgcaaggtgaattctctccattacagtcatctttggccttgttgacattcatctggntaatttgaggacattacagttcaaggtggggcatggggcactccatgagggcagcctgatcctcccaggaaggggttgattgtcgggtctcaggcaaggcacgggctgttttgttctactactcggggaaggtaggtgaaaaggttattttgcttactgttagggtgcttgaatcccctttctgcaagggtcttgncataggtcntgtttcntgctctttctgtccagttcac

SEQ ID NO: 265889 - DNA, 505 bp, Homo Sapiens
  misc_feature (401)..(401): n is a, c, g, or t
  misc_feature (442)..(442): n is a, c, g, or t
  misc_feature (460)..(460): n is a, c, g, or t
  misc_feature (482)..(483): n is a, c, g, or t
cccacagaatcacagaattcatgttctcacagtagccagaagctaaaataatgtgcttctttattgcacgtcaaaccaagaaaggtataaaagccaatgattctcaatccaaatgtgaaagtcaggttcacctcaactggattcggaatgtgctgatttccattggactcaagttgatctcacttatattctgagtgccgggaggtgaatgcatcaaggatagtgatgaaggtgtgagactttcgacaataaacttgtttaaaagtttctgtaccaatatctttccctgagtagtagaacaaaacagccctgtgcctttgctagagaaccgacaatcaaacccttttctgtgggaggatcaaggctgcctcattggagtgcccattgcccacctttgactngtattgttctcaaattaaccagatggaatgtcacaaggcanagatgacttgtatggagnagaattcacttgcagctaaggnntagtggaagaaaacttatttgc

SEQ ID NO: 265890 - DNA, 681 bp, Homo Sapiens
cccacagaatcacagaattcatgttctcacagtagccagaagctaaaataatgtgcttctttattgcacgtcaaaccaagaaaggtataaaagccaatgattctcaatccaaatgtgaaagtcaggttcacctcaactggattcggaatgtgctgatttccattggactcaagttgatctcacttatattctgagtgccgggagtgaatgcatcaaggatagtgatgaaggtgtgagactttcgacaataaacttgtttaaaagtttctgtaccaatatctttccctgagtagtagaacaaaacagccctgtgcctttgcttagagaaccggacaatcaaaccctttttctgtggaggatcaaggctgcctcatttggagtgcccattggcccacctggcaaaatgagcagaatggcagtcacaccgcgcagacaataaagcaaatatttatggtacttcacacaccactctctcgatgtcagcatccaaaagcacatttatttagcaagaaagttaggcaaattcatttctcctcaggtccatgctcactgcccattcacctgctaccattctctcctacttgtactgagccaggtaagattatgttctaaggttccttgttaggtaacctcatgccttggtttcccctataatccccgaggacttaggtttccttatgt

SEQ ID NO: 265891 - DNA, 593 bp, Homo Sapiens
  misc_feature (480)..(480): n is a, c, g, or t
  misc_feature (487)..(487): n is a, c, g, or t
  misc_feature (497)..(497): n is a, c, g, or t
  misc_feature (579)..(579): n is a, c, g, or t
ttagtgtcattacaaattcattgattttttaaaaaaattcactgtgttataatccattaccacgactaccactactattctttttgatacataaattttcccaaattaggctggtgggagccctttcaagtgagcctctatatccctgtggcaagtctcacaagctgtacaatccctgccccaggtttataattaccgacttccctaaggagcccaaattccttctggtgggaatggcatttagaaaccaggatggggcataagatatgctcattgcctccaggccctttcagctagcagagttagaaaatgttgggttgaatcacatgaaattgttaatatttggactatttgtggcataaaaactggcaatttcatgtggttcaacctaaatgctgtttaaaaatcatgagttcatattgacatccccaactgaaatctaataccataaagttcttatctccccattccatatttaancccttcnttttccagtncccaatggccctgatattcaaactggttcagaattacaatgccacaccactcacacaccaacctataagttggattcctggnggttaccctagata

SEQ ID NO: 265892 - DNA, 565 bp, Homo Sapiens
  misc_feature (69)..(69): n is a, c, g, or t
  misc_feature (82)..(82): n is a, c, g, or t
  misc_feature (112)..(112): n is a, c, g, or t
  misc_feature (158)..(158): n is a, c, g, or t
  misc_feature (174)..(174): n is a, c, g, or t
  misc_feature (214)..(214): n is a, c, g, or t
tgattaaaagggtccccggaggatgcgcttggagcgctctatcctgggcaagggcttggacccatttcncttctcagggctncatagcagtatctgagcatcctccacttcnccatgggggctctgttggcttttggctttgaataatctgcaaaatncagaaaagggaaggancagatggaagatgaaaagagatgaggaagttaatgcattnacaggtaaatcttaccaactccccaccccccaaatcaacctttacaggtaaatcttaccaactccccccaccccaaatcaacctcaatttctatggcccagaaatctatctccaggaaaatgtcaaaaatttgtagaaagatttacctataaggttgctcatagtggcattgtttataagggtaaacattggaaacaacctaaatgtccagctataggagaagagtaatatatttatgatagaccataattatttaaattgattctgtagaaaagtctggtagacttggaaattcaagatatgttattgaattaaaaaacagtttataaaacaatatacacagtatgagtc

SEQ ID NO: 265893 - DNA, 682 bp, Homo Sapiens
  misc_feature (520)..(520): n is a, c, g, or t
cactttgtggattcgttatcttcccctaagtgactgatttcctttggttcctgtctgtggccctggctttctttcatgaaatgtggtcatttgcaaggcagcaggccgtgccagtgctacacatactctcttaggtgggactcgcctcctgggcagttttccatgactcagagagaatgactacgaaccctagaactgctctaggtggccccagtcactgccacaaacccctagcactctgggtgtggccagcagtggacacaggcatgtggtggcccatcttgtccttccctttccctacagctcctcctaacacagtagccaggcttgtcctgcttagtctttgctgagggacctagaacagaaatcgccacctcctggtcataccagggctatcgctgaccatccacaagaggctctagaagtctcttagctctgctgggaagaaacagtgagaggtgaacaattcactgattaaaagggtccccggaggaagcgcttggagcgctctatcctgggnaagggcttggacccatttcacttctcagggctccatagcagtatctgagcatcctccacttctccatgggggctctgttggcttttggctttgaataatccccagtcagctccggtcctctcagtccaaggcccttcctgtggcaggcaggatggcgccttc

SEQ ID NO: 265894 - DNA, 764 bp, Homo Sapiens
  misc_feature (186)..(203): n is a, c, g, or t
cctatgcccaagtttcacagatggaaaattgaacattgccaaaggaattctgctcagcagattaagtatgttcatgttttagaataaaaattgccaaaactttgttgagaaaccacttatgaggaaaccttaaatactaaattaggaagctaaaaattgaatattggtatattggtatagaatgannnnnnnnnnnnnnnnnnctttttccaaattatgacattccgtgtaatatgagtgaattactcagctctgctgatcgaggacttatgttgattatctaacctactgtatggacagtgcagatacagaacacttctatcatcacagcaagtactactggacaaagctgatatagtaagcatggttttcttttcttaggaaaactaaattttatttttattaaaaaatctttccttagttctaaacagattttttttgtgaaagacaagaagatttattaaagttttattaaactatctcttaactcatcacaaaaatgagccctgtaaattcacacattcttcttggatgagtaatggtgaggccagtaagcccaagaacttaaaagaacattcttatacttcagtttgcattctcagagctggggaactgtctgtaggcacagaaatggaaaagggattttctggtctggtttctgactttaaagttacacatttttaaaaagtactctgaagacactggggtttgttcatccctggcttgctactaaagtagtaatgattgttgttttcacattttcc

SEQ ID NO: 265895 - DNA, 627 bp, Homo Sapiens
  misc_feature (413)..(430): n is a, c, g, or t
  misc_feature (512)..(561): n is a, c, g, or t
aaaagaccaagcaagtgcaatgagtaataagttatagaaatagcagcaactccacaagaaactgataagcatctgccactatcaactctatgctagatgccaggcatacagtgaatgtgatgtgcccacttcattcaagaagctcatcaggtggaagaccaatgaggtatcagtctaagtatgagatgaatttatagaaagcagcatccaaatgttccattatttcaagaatactcaagagtcaaaatacaatctcccctatagaaaacttactacagaagagcactatttccagaactttctgtgatgatggaaatattctatatctgtgctgtcacatcacatgtggccaatgagcacttaaaatatggctaatgccagcctgggcaacatggcgagaccccatctctacnnnnnnnnnnnnnnnnnnttatctgggcatggtggtgtacacctgtagtcccagctactggggaaggaggcaggaggattgcttgagcccaggaagtcgnnnnnnnnnnnnnnnnnnnnnnnnnnnnnnnnnnnnnnnnnnnnnnnnnngagtgaaaccctgtctctaaaaaaatagtaataaagggcagggcacggtggctcatgcctgtaatc

SEQ ID NO: 265896 - DNA, 358 bp, Homo Sapiens
ccctggaaaataagggaacatttgggatgcctgctttcctataaaattcatcctcataccttaaactgataccctcattggccttcccacctgatgagccttcttgaatgaagtgggcacatcacattcactgtatgccctggcatctagcatagagttgatagtggcagatgcttatcagtttcttgtggagttgctgctatttctataacttattactcattgcacttgcttggtctttttcttagtcgtgtagacagtaatttcttttttcagcttctatcagtatagctcattttttctcttcaatctgcttagacaaaatgaggttttcgttggtgtttaatttaaaaattaa

SEQ ID NO: 265897 - DNA, 586 bp, Homo Sapiens
  misc_feature (286)..(384): n is a, c, g, or t
agagctagcaccatgagcttcaataccctgaatatccaaatagaggaatatagaaaaatttaattgattccaaaagtagaggagacagaatcacttatccttgttacactgcttttcttcatctcttgccctttcctttcacatacattttttccctcttctcattattacctgtctttcaaacactgtattctgcctttgcaacactgagatccaaatacccacaagtggttaacttgtgtcatcacaagatctataaggtgaactgtaataaatgcaagtatannnnnnnnnnnnnnnnnnnnnnnnnnnnnnnnnnnnnnnnnnnnnnnnnnnnnnnnnnnnnnnnnnnnnnnnnnnnnnnnnnnnnnnnnnnnnnnnnnncctaaatcaataaatcaataaatgcaagtgtagttcacgtcaaggttagttctctgaactttctcattcctatggatgcaaacactgtatctaatttaaatggaaactctttcaatctataaattgccttcttctttacaatatagccttagatgtacttttttaaattcaacacagacttgaagaaaatgggctaaatgca

SEQ ID NO: 265898 - DNA, 452 bp, Homo Sapiens
  misc_feature (68)..(68): n is a, c, g, or t
  misc_feature (96)..(96): n is a, c, g, or t
  misc_feature (107)..(107): n is a, c, g, or t
gagattggagagaagcaactgtaagccaaggaacaccaaagactgcaggaagaagatcatccagctcnaagttcagtctcaaatgactgaaccccncagctggacanactggactgcaccagaatcaatcacctgaactgctcaccaagtcccaacctaaagaagacatgagaaggtcacttgagggtcatgaaaaaatttgcagaaggaatgaatgccttgaaggacgttgcgaccagctgctgatacccaggaatctggttgctcaagatgttacctgagaataaagaaacgcagacttttccccctcacttccctgaaactgcctctcctttactccttagctacctaaaaactcactgcttcctctttttgttaagatggatttgagacatcttgctctcccaacttcttgctttgaccaaattgaataaatcttgtttgatctccaa

SEQ ID NO: 265899 - DNA, 734 bp, Homo Sapiens
  misc_feature (229)..(237): n is a, c, g, or t
  misc_feature (681)..(681): n is a, c, g, or t
cttaaaacaagatacatacatagtataacacacctcacagtgttaagatttatattgtgaaatgagacaccctaccttcaattgttcatcagtgggtaaaacaaattctgatgtacattcaggacaaatgattagccctaaatgaaactgtaataatttcagtgggaaactcaatctgtttttacctttaaacagtgaattttacatggaatgaatggggttcttcacnnnnnnnnnagtatgaggaaaattatacagtgcttaattttcagagattctttccatatgttactaaaaaatgttttgttcagcctaacatactgagttttctttaactttctaaattattgaatttccatcatgcattcatccaaaattaaggcagactgtttggattcttccagtggccagatgagctaaattaaatcacaaaagcagatgcttttgtatgatctccaaattgccaactttaaggaaatattctcttgaaattgtctttaaagatcttttgcagctttgcagatacccagactgagctggaactggaatttgtcttcctattgactctacttctttaaaagcggctgcccattacattcctcagctgtccttgcagttaggtgtacatgtgactgagtgttggccagtgagatgaagtctcctcaaaggaaggcagcatgnggcctttttcatcccttcatcttgctgctggggattggggatataacaggagc

SEQ ID NO: 265900 - DNA, 294 bp, Homo Sapiens
ctggagaattattaaagtcctgtcagagtttatactgaacctctgacttgattttatccagctcatcaaagcaaaattgtcttagtagcactcttttgtagctgtttaatatttaatattcagtgggctccttaaggtgagttcttgaaggcttgtgagtagttgaagagctgtgaatggtggttaacaagctattatcatctccttgaaaagcataacatgaagcagagattcaggaaaatcttagacagtgattagtctatctgacagtgcatcaaaactaaattagttggg

SEQ ID NO: 265901 - DNA, 565 bp, Homo Sapiens
tatgcatttcccttaccaatactggctctcagcaggcggtccagcccgatgaagtatcagcaaaatgtcagctcccacagagaagtgcgacagaggcaacagtgcagcagtgacaggcctttcaaaaagctattgtgcaaattcagttttaaaatagggatgtagttgaggactgatgggtatttcattaccaatgcgttcatctcccccatcgtccaagacaatgagagggggtcatggtgcagctgatataaagccattaagttgagtagcggttgatttggtctgtagaagatttgtcttcctatctgtaatttttgaaaagttaatattcaaattagctggtcatttttagtacatacctcgctaaaggggggccaagaattgttcttttttctacttgatcaccttccagtgtctcaattagatcattaaaaacaaagttaatcatgtcattactttataaacctcattgagctactgatactgttcataatgaagttcgtagcactaaagacccatcatcaaccctgtttctagccagcttttgaccatgcttacgtat

SEQ ID NO: 265902 - DNA, 512 bp, Homo Sapiens
aactggacgacatatcaggctttaaaaaactgagatgaccatctgacttcagaggcgatggtactgttaaagagactgctagatcttcaagaagtatggaagaaacgcagggcttgctcttttctacactacacacattatctttacttaaaggtaggttagtagacacttcaaacatacaactttcatccaacacatcaggatgaaccggcaatgaaagccctgaagacagagatggacctttttcagatgataataatgaccaattatcatcactaatcattttaggacatggagaagccacccctgaaactagctcttctgttgtacaagctggtatagactcgcacttaagagtctctagcagctgcttctctggagtctttaactcccactcacttttttcagtacagttaacactgctgttctaaaagatcagaaccttggcaacaaactttttaaatatttcacccatttgtgcatcactcactaaattaaaagtaaggctcgat

SEQ ID NO: 265903 - DNA, 510 bp, Homo Sapiens
  misc_feature (447)..(447): n is a, c, g, or t
agagttcacagcgtagcaacgtgttcagaacttaaggactttgcaggtcttacaaaggcctggcattctaccttctttagttcaggattcaaaagacaggtaggagcttgggaaactcatgaggcctctcctaaggtcccgggatgctgcctccagctcctgtcatcctggggaattgctctggggtcctctccccttttagccttttccaactctcagccaaactggaaagccctcttcccagcagtgcagtgttgaaggtgcccgtagaatgggtgttataatcagagtgagcagcctggtcctaggcctctgtacaggaccagacccctgaggctggggtctcctgacccacacctgaccagcccccatcttccctctctgcttctccctccgctcttctctgcctcttggtcttgatgaaaatcaaagccattttaaaagagngcatagcacagtgcctggcctggttcggccctcaataaacatttcttaaatggatgaaagaac

SEQ ID NO: 265904 - DNA, 522 bp, Homo Sapiens
ttaatgcttctagatttctaaacaagtttcatgagagagagaccattttaatcctgggaagctagtgtgactggggattgaggtggaaaaggtgagaacgtgacggtcagggtgaggagagaaaaaaatcgaaataacaggcgagaatgcgtcctctacctccatttgtcatctaagccaccggactcacccccacccccagcctacctgttcaggaggcccttggaccagggtgggcagcattttcagagcccttgaccccagtcggtccattagggagggtgcctgagagcctgaaagctaccaggggcagacagatgagcctgcaggcaggaagcactgtcatctgaaacatctgtcacagaaagcactgtgataagaatacagcagctgactttaagtaaagggcaaaatcggaaacactaacaacatcaatgaatgttatcagaaaaatgggcaatcttaagtactgttaacagaagtataattttggaacgtaatttggcaaaaattattaaagtg

SEQ ID NO: 265905 - DNA, 709 bp, Homo Sapiens
  misc_feature (441)..(441): n is a, c, g, or t
ctattaacaaattttgtagcagatggaagtttaaacaggataacgtatatactttttccttacttgtgtgtaagaagtgtcagatggcttatttaaaattgattacttgataaatttaatcttttgtgaactgcagtggcaaattgctatcaagttattgcattttacatagttgaagttgtgaacaattgttaagaacaacaaatgatgactaggatcattatcttttcttacacacaaaggtcccatcttttagcacttttctgttctagatgtgaatgtaaaatgatgtgagatctaagaatggaactgaaagattgaaaagttctttcttctgcccctttggacatgaaaacaatgaagcagctgttgagcataactcaggactgccttcccctctctgactttcaacatcctatcttcatggttttaaccaattangtcataaaagagtgcatcagatgtgcaagcaagacacaaactgttagagaaaaacccacctagcttaacattttttggtagcaaatgaattcatttcttggttgcacaactttatttaacagcatcctggcatttcaaacacccagagtgtatgaaatcagtattgacaaaccttgggcaacatgtaacacacagtgaagccatccccttagtcaagcgacttgtcctccattgccaccatctgtccacatgcacagcccacacggac

SEQ ID NO: 265906 - DNA, 605 bp, Homo Sapiens
  misc_feature (241)..(241): n is a, c, g, or t
  misc_feature (254)..(254): n is a, c, g, or t
  misc_feature (428)..(428): n is a, c, g, or t
ctggagatggagcgcttacactacatccaccacaacgagaccgtgtcccagcagattggggaggtcctgtacaacgcggcaccactgtccatctggtggcagatccctcagtacctgctcattgggatcagtgagatctttgccagcatcccaggcctgggagtttgcctactcagaggccccgcgctccatgcagggcgccatcatggggcatcttcttcttgcctgtcgggggtgggcntcactgttgggcntccagcctagtgggcactgctgtccttgcccgggggctggctgcactgccccaaggactttgggaacatcaacaattgccggatggaccgctacttcttcctgctggctgaaattcaggccgtcacggctctcctatttccctggatcgctggacgctatgagaggccgtcccnagggcccagcctccccacagccgtttcagcagggacaggggctgaacaggccctattccagcccccttgcttcactctaccggacagacggcagcagtcccagctctggtttccttctcgggtttattctgttagaatgaaatggttcccataaataaggggcatgagcccttcctc

SEQ ID NO: 265907 - DNA, 762 bp, Homo Sapiens
  misc_feature (244)..(341): n is a, c, g, or t
tttacagaggagaaaattggagaccagcaggtgaagtgccttgttcaaggtctagcgctaagaccagcccccaggcctgctggggcccccattagtgcaattcccactgtcacccacggcctcagaaacatggacacatggaaaatgtaggctgtttccttggagaagaaataaatacagaacacaaaaaacatgcagacatagcgaagaaagaatttcaaggccgggcatggtagctcacacnnnnnnnnnnnnnnnnnnnnnnnnnnnnnnnnnnnnnnnnnnnnnnnnnnnnnnnnnnnnnnnnnnnnnnnnnnnnnnnnnnnnnnnnnnnnnnnnnntttttaaagttattcaagaaaaaagaatttcaaggccaaggggcaaaaccaagaagaggctacgacatcctgacttagccagggcctccagtgcggtccaggtcatgagaacttaagtgctttggcaaaggccagacccctggtttgtcatcaggtgaactgactcatcactgtagcccaggtgcccggaggaggtgaagccacagtcctgtctgctacttactgtcacaatatctgtcagcagtggcaggagatggggctaaaaatatatgcagcagaattcttaggagcagtcagtctgagcacccctgaagtgtggacagctcctgaagagctgcttctgcccatgccgagcagtgtgacctcaattgtttatcccctggtgtcgcctaatcggcccctctggattctaaggccttca

SEQ ID NO: 265908 - DNA, 651 bp, Homo Sapiens
  misc_feature (493)..(502): n is a, c, g, or t
gcttatgtaaaatgagggaaaagtgaagaaattggggtgaatggctaaataggggtcataaaaatgagcacaaattctgttgaagatggctcttgaagtgcagctccgaggcatcctgtctgccccacacacatgacagccaccgatttcaagggctgatcatcggaaggctctctggaggagtctgaagcagtgcgattgggatcagctctgtcactctactgatcccagggtacatttctgagattctaaagctgtttctcaatgtaggtccataggacatctgtatcttgaatcacatttttcagcctatgaatctgcaattttccattgctatccaagtgactttacattaaggttggagacgattgtctatctcatttgagcctttcatgcattttgaattgcaccgactgggatcctgtgaaggccatgaccacactctgtactcactgctttataaaagtcatctcagtgactggtttctgtatcnnnnnnnnnnaccctctccatcttgtgcagagtcatgaaagggcctggggcccagagatgctgaaagctggcccgaggtccacaaccagcaagcggaggagataataacattgggacttttggcttctgagaatgcgttcctctgccttacagaaagga

SEQ ID NO: 265909 - DNA, 969 bp, Homo Sapiens
ggcacgagatcactgtgatcttaccaaagaggagctggagccaagagttttccgagatgtgaccgtaaaaggaattgatgcttctgattaccagacagtccagctccccaagggtactgagtcttccagaaactgaatcactggttgattgatgatgacgaagaatgtctctgttcctttgcaatgagaggtcaccaatagggcaccagggtgtttatcaaggcccctcccacctgggagggctgggaccacacaggccacagattaggaatcagaacattgtttgtgaaggaagatgaggaataaagagcgctggatgttccccacaatgtttctgtgaaactagggcattattatagcttggtgaattacccttcaattgtctagaaatggtctagatgataggctacatctagatcatgaataaagctttgtttactaaaacaggtggtgggctggatttggtgtagagctatgatttatcagcccctgtcctacatcagcaggtggcaaactggcccccctgttttattgggagaacacatgcccccatttggtttacatattgccctgtggttgctttgggcacttagagtggttgcaacagaaactcctatgcccccagaaggcctgaaatatttaatatatggcctttaagaaaaagtttgcagaatcttcatctatgtaaatagcatttaaaagtacaacattcttgatagacatacagggccgagaagacatacagggtcaagaagctctgtcagacaggcctgaaatccacgtggggcaagtcatttaacctttctgccacagttttttcaactgtaaagtagagattgatagtatctgttttttaggattcctgtgggattattaagagataaggtatattcaagatctggcaatagaatataatgtatttttttcattcaacagttagaaataaatgtaacagacttttagtttcct

SEQ ID NO: 265910 - DNA, 775 bp, Homo Sapiens
  misc_feature (196)..(196): n is a, c, g, or t
  misc_feature (238)..(274): n is a, c, g, or t
agaggacaccactcaccacagatagccacatgggggttgcactatgcataagagagagcaaccagggactgtggtatgtaagcttttctgaatcaagaaggtgtgatagcccctgattcccttgaaaggatgcaactggcttgtttttaatttttgagacagggtctcgctctgtcactcctgctggagcgtagtngtgcaattacagctcactgcagcctgaactttccaggtttcnnnnnnnnnnnnnnnnnnnnnnnnnnnnnnnnnnnnnccataggtgtgcgacaccacacccagctgtaactggcttgtttgaattaactctgtgtgtagaaatgaaattcaaacttgcctacaaataaataataaacaggaactctgcttagtcctcttgattaaaagggtagttaggctaggacacattatacaaaagagcagagtgggaagggggatttgtactcagaccatttgaggtaatactagtatcaccagatatgaaggtagcacatgatattgaccttaaatttagggctcacaccataatgtggctgacatcatccacagtagtcttggtgaattaaaaagcaatccaaaattatcacagaattccaatggttcctaatagcagtggtagtaccaagtcattatacgaagccctccatgcataaatccacaggaaaaaagaacgttagtgttttcaggtattcatggccctattccacttctgtgctgcatttgttatcttcagaaattatgactttcttctgcccac

SEQ ID NO: 265911 - DNA, 895 bp, Homo Sapiens
  misc_feature (352)..(352): n is a, c, g, or t
  misc_feature (392)..(407): n is a, c, g, or t
  misc_feature (432)..(534): n is a, c, g, or t
  misc_feature (559)..(571): n is a, c, g, or t
  misc_feature (575)..(689): n is a, c, g, or t
  misc_feature (829)..(829): n is a, c, g, or t
aaagaaagaaatatgtacatgggcggggaacttgaaactggaagaaatagaggtggtcttagccagattgaatagtctgtgcgtaacttctcaacagataggggtttagttaacagagaagcatctctgaggtagaagcatctgaagtactgtgttttacagagacagatactagcctgataatttacaacagaattatcaccatgtttaatggtttcattaatgcatgactccatgatctgaagcaaattttttaaccacccagagtttattttctgggaaatgagaatgtctaccttgtaggagtggtttaaggcatgtaggaataatgtgtggcatttaggtattcaantacatgctagctgctattattattgttactgttggaatcnnnnnnnnnnnnnnnngagagatggggtttcactttgtcannnnnnnnnnnnnnnnnnnnnnnnnnnnnnnnnnnnnnnnnnnnnnnnnnnnnnnnnnnnnnnnnnnnnnnnnnnnnnnnnnnnnnnnnnnnnnnnnnnnnnngggcatgtcaccatacttggctaannnnnnnnnnnnngcannnnnnnnnnnnnnnnnnnnnnnnnnnnnnnnnnnnnnnnnnnnnnnnnnnnnnnnnnnnnnnnnnnnnnnnnnnnnnnnnnnnnnnnnnnnnnnnnnnnnnnnnnnnnnnnnnncatggaattttaaacggtagctcttttctaaccgtatctccccctgctgccctgttgtagccctatttcagctagtctggaattcttactagtttctttggatttacaatggtcttaataatactggttctgcggggaantccctttgcccattgcacttcaagtctctttctattgacatctatactcctccctcaaaaataaaa

SEQ ID NO: 265912 - DNA, 845 bp, Homo Sapiens
aagacaagagtgtctatttgatgtaagtgtagggaatattagtgatagttcggaaatttctccagataatggcaagacactcctttagcagcccccctttcctgagtttcccattgttccacttattaaactctgacatatgtcatgccctgtgtacctggatatccattcatcctgatcacaacctgatctcccacttaccacaccatctcagaacattgtctggcagattaaaatatctccccagctctgctaacccactcttataacatgactagctcctccttcccccttttatccctttatctataagtactttttaaaacaagggctgacagctttattgttcaggaataattgtcaaaaggcttagtggactgtacttgccagtaaaaggttatttgctggcttggggtgtgtgctcctcagctgtcctgtgtcattccaattatattgtcatatggtgagatttgtgcctgatgtcattgtaggcaaggatatagtagaggcagctcatttgtatgttggtgcttcccagttctccatttgttgagatgcttttatcattcagacctttgagacaatccaacctgcttccttcatcttaaaggtgaggaaatgggcccagaaagggaatgtgatttaccccaaatcatactatgtgttggtgatgggaccaagatgaaatccagctccccagcctctggcagggactcctgaactcatagctttgggcactgacctcatggggtgaaagggaagattatatttctatttgaatgttttctaacacatgaaatttatataggtagttatacctagcaggagccaaagaacaataattt

SEQ ID NO: 265913 - DNA, 470 bp, Homo Sapiens
gccccgctttgcctgctggagggtgttaaccttagcttgcttttcggcgtattctgatttagctttgggagagctaactttattggtcttaggtgttcagtgctacctggcccactgcttgtctgtttgtgacttttaagtcagaaactggagatggtaagatccgataatttccctaacttaatacatcgcggtccctctcactagcaactcctaggtatgtgacaaagttgggatgtttatcaacggtccgcctcctggctagggaaagagctctggggcggagaatgcactttctgttttttgaaaacaacctcattttgtgcccttaaaagccactggggatgacggatccaggattgtgggtggaggtagtgggtttttcatcccctgactatggggccaacttctgccagccaatgttttttctaataaaagaaatgtgtggttcctttttaaaaaatttcccc

SEQ ID NO: 265914 - DNA, 748 bp, Homo Sapiens
  misc_feature (27)..(27): n is a, c, g, or t
taaatgtttcatgaatcaaccaggcancaggctaatccagcagaccccaaacggacagacaaggtttgaaaggatcactcatcaaaattataacagtgtttagtttctccagttactcaccaaatttatttactccagggtaccattttcaaatatatataaggctcttaggagtaatctagatatgactttttaaacaccattaactgcattcatggtagccatttgtcattattttttcaataaaagaatagtaaaatttacttcctgcaggggcaaaggttgactctggcataaaaagggattttcatactcgatgactgaagtgctccatatttgtaaccaagtagaaactagacaaaaatgagaattattatgaaatctttccaaattaaatatgagtgtttgagggaaagtacgtttgtgaaaggagacaaataattagtgctcaagcttctgaagagtctcagcatgctctcaggcctcagaaggtggcagtcctttctgtacctatgtggccctcaagcctaacctcaagacagcttctaccaagtctttccataaacctccttttaacccactgctaatgtgtgtgcacaactcagcggacacactgccacctgtggtcccacagagctttagtcacactgctggcaaagtacttatcacattacattagtgtgagcttgcagagaggtcagttaccatgtcatgcccatttctaaatccccagggcctgactcttggc

SEQ ID NO: 265915 - DNA, 734 bp, Homo Sapiens
  misc_feature (551)..(551): n is a, c, g, or t
ctaagggacagagtctgttgccctggctggagtgcagtggtgcctctagctcactgcagcctaggattcctgggctcaagcagtcctcccacctcaacctcctaagtagctgggactgtaggtgcacaccaccatgtccagctacaacaattaataactgagtagctactgtgggcccagtcctcccattgataacatgtgtaaactgtggacaaaaatacaagaactacctgaagacactagaagagtaaccaaagggcaggtggagaccagagaggtgggggctggcatttgggaagaagagaattgcactggggaaatttcttatttctgatggctgtttagcctgttggtcacttcccagtcttttccatgctgggcagctaaagctggaataggcaatcctcagggcagcccacaacaaagagaaatcctagaaagggagagagccggaaggggttcgggggggcccagttttaaccttcccccaagtccggctgacccctgaaccacatttcccagctaaggctgaaagaattgaactgggattntcagctgccgcttactgtatgggagaagtttgtagtttgactatagccaagttaactgcactaaaacaggagtggagggcacttctctttggtggaacatagcagaagtctgagtttctgtagcctgttattcgcagtgtctatctggataataggaaaatgtgacctatactcaagaaaaaa

SEQ ID NO: 265916 - DNA, 1056 bp, Homo Sapiens
  misc_feature (282)..(282): n is a, c, g, or t
  misc_feature (517)..(566): n is a, c, g, or t
  misc_feature (668)..(668): n is a, c, g, or t
  misc_feature (700)..(700): n is a, c, g, or t
atctcaaaaaagaagtctcagaggggtagccagacccctcaagttcaagttcacaaagagaattccatcatcaaaaactaatgcaatgggcaccggagttgcattaagttccccataagagtgatgcaatttgatgaacacgtgttggtctaggggaatggaatcagtgggccaaatatgtcagtggtcccaaatctcccactttcttcttggaaaagactccatctctttgctcgctgagtcacaatgaagacatacgttccccgttgtttctgctcagantcactgggaagacaatgcccagtgatgatgggttttctacctgagataggaagcttttttgttttaaatgaacttatcttggggcaataggggacacagaatacagaattagaatatgaatgatatttggtggtgtagattctgtgacccctatgccagggactgcccactgaatcctctccccattctgtgaggtgggaagaggattggggttggggctggtggtaactagctnnnnnnnnnnnnnnnnnnnnnnnnnnnnnnnnnnnnnnnnnnnnnnnnnngtctgggacgtctgccttcagaattctcaaccaatcttcattaccacatctgccttgggcatatttattcaaggatgtaacatgccaagggagttaagtaanggtggtgggaagtgcggggagaagaacgaagnataagagtgagaccctcccatattgggctttgaagccttcccaggccaggatccaaatttggattcatcttcaaagtcccactagcacattgtaaggactccataactgtttactgaattaatacattcaagagaggcttcttgtgcatacatcattacgtaggtcagaaattatatttgcctcttcactgtctctgcctcttaactggtccccctacggttcctcttggcctgttactccattctctgcacagtagacaacgtgggcttcataaaaccttctatcagatcacatcactttggcaaagaaaaccttccaatggcttccatcatccttagaacaaaattccaactgt

SEQ ID NO: 265917 - DNA, 926 bp, Homo Sapiens
  misc_feature (730)..(840): n is a, c, g, or t
gaggctaccctgttctgtctcttgtaaaatatatgaaaactctcagggcatatattttctatagtcctccctgtatttaaggcaggaagttaaatctggccctattactttatcatggacaatagtagtagtcctgtattccttcttgaatcaaaattaatatatacttttctataaatttttccatttcttctaatttattgataagctaattaataattttatctttatcttttaattctgcttttctatagttaggtctacttttctatttataagaaatatatatgtgactttttgttttccttgactattctttccaaagttctgtattgtttgttagactgttcaatgaaacaaatttgctttctttgagccttttatttgttttttctgtttacttgacttttctgttattgttactattttctaatattatttttactttcttcaatttttaatagtttactatcttctgctttctcttagtttattctgtggtttcttttctactttattagttgaactttaatgttcttcctttattattttggtaatacaagcacttacactataaatttagattgaaatagagcttttactgaaccccacaaattttggtatgtgatgttgtcattatcacccaatttttagtatttttacaattccattataatttctaacttgatcctgaaaatatgttttttaaaaatttccaggccagacgtgnnnnnnnnnnnnnnnnnnnnnnnnnnnnnnnnnnnnnnnnnnnnnnnnnnnnnnnnnnnnnnnnnnnnnnnnnnnnnnnnnnnnnnnnnnnnnnnnnnnnnnnnnnnnnnnaattttaaaaaatacctgggcacagtggcgcatgcctgtagtctcagctgctcaggaggctaaggcaagaggattgcttgagctca

SEQ ID NO: 265918 - DNA, 659 bp, Homo Sapiens
  misc_feature (178)..(178): n is a, c, g, or t
  misc_feature (271)..(271): n is a, c, g, or t
ccaatagactgcaaccacctgaaaatatcttagagaaattctcggttatattgactttacagagttaattagatcttagtctaccacccggtccactcgggcttctataccaaaacaccttagacagggacagtgtaattataaaggactaaaatttgttaattatagttcacgaagnctgagaagtccaagatcaagtcaccaacagatttctggtgtctagtgagggctgctctctgtttctaagatggcaccctgttgctgcattctncacatggcggaaggcagaaggtcaacagggacccaaccgagccctttttaaaaggtcaccaatccaattcatgagaatggtgccttcatgacttaatcacatcctaaaggccccatatctgaatactgtcaaaatgggtcttagtttccaacaaatgaatttgggggcacacatacctttaaaccatggctcctactaagcacatttctgttaaatcatactgcccgaattctttccccgttattgcaagtcacaagcagaagataatttactcgcaaaattattttttttgcaaatctatttcagtttttatgaataaagacagattcactcaaataattcacataaatgtatttgtaaacgttatacctgaggaggaaatgaatat

SEQ ID NO: 265919 - DNA, 461 bp, Homo Sapiens
ctaaactagaatgttagtgctgagtcagttatcatcaaatttcatacactgagccttcaaatcccgttgcttccacccacctaaaagggagacagcctggtcctctaattgctatccctatctccctcgactacccgttgacacacactgttaacctagacaacaagccattgctgagactgttaagctctttaactttgtttttacctccacctggaaataactttcccctgtgtctcttatatagatcaaacgtacacttcaatgacgcgttctgtgacgccatcttcagtacaccttaactatcaccatcactcccagggggtaaaattattgtagttagttgtacaagtatgagtctcctctattataccatatgcttttttaaaagaaggaactttgtactttgttctttttatatccccaatatctactcaatatctggcccaggattcaatata

SEQ ID NO: 265920 - DNA, 800 bp, Homo Sapiens
  misc_feature (699)..(699): n is a, c, g, or t
  misc_feature (701)..(744): n is a, c, g, or t
ctccccgcactaaggattgaaaattctagccaaacctggatttagcagatggaggctgaagtctttctatattagaaataaaacctcatctttgatccccatcaactcccgctgcttacgtgtctttaaaccatgttccaaccctaaccacagcctatttcaatgtgaatctcaaacttagttctaacccaatgctaaatcaatctaaacccagcctttgatttagccctaactgtattcccaggcagagctgtaaatgaaactaaaactctattccttatccgtaacacaaatcccagccataaacctgagcctcaattctagctgtatttctaaccctaatcccaaccttaactctaatcccaacctcaaatctgacctcaacctcattcataattcaactaaccccaaacttaaccccagctctaacattagcccacatccagaacccaattaaatctgaagcctgcactggagtttagtggaaccacaatgttactgctttctcctcaatctctctgttcgtggtctgacctgttttccctcccactcaccctgaccttccatggttcttgttcgtgagtgggtctagtaatccacaggatcaccaagaccattttttggacctctctggactgacaccctgggtacctgggtatcccagcttaagcaccagccgcattggctgaatccccatgntnnnnnnnnnnnnnnnnnnnnnnnnnnnnnnnnnnnnnnnnnnnnccctgctcttcaaagggagcaggacaatcccataaacctaaaataaataagggaat

SEQ ID NO: 265921 - DNA, 432 bp, Homo Sapiens
  misc_feature (47)..(47): n is a, c, g, or t
cctctcaagcgtttcagggatgctgccagggcccacccctctggganaaaataagtcagaacattaaggaaacacaaggagtccacgcgtctctgcattccaagccgttgcacctgaactcccaacaataacagggcgctctgagacctaccagatgtacacaatgaatatctttatttccttatttatttttaggtttatgggattgtcctgctccctttgaagagcagggatcattatccccattttacagatggggaaacagagacctggagaaacatggggattcagccaatgcggctggtgcctaagctgggataccaggtacccagggtgtcagtccagagaggtccaaaaaatggtcttggtgatcctgtggattactagacccactcacgaacaagaaccatggaaggtcagggtgagtgggag

SEQ ID NO: 265922 - DNA, 600 bp, Homo Sapiens
gtgcccagccctgaaaccttttctaaagctctttaaccctgtagcgcattctggctgggcctggaggacaggacatgggaacccagtctcacggcagaggccacatcagtgggtccccacagtccagggggcacttctgggtggctggagagccctgtgccagagccacgtggccatgagcttttctcctctgtgggctcagcacaccccagaagaagtgactgctcctttatgaccctctttatctgccccggagagggtcctggcataatccccagatgctgtggcctccgccctccgggacagcacatggcacctgcatctcccagctgcagctgtagaggcaggagtgatccgaggatgttaatgccaagtccaaattggtgatttgatttttctagtgctaactttgaaatgtagccagtagagtaattatgagtttattgtagtcaatttattatgcagcatttagaacaacatgttttgttgattactgctactgccagattgctggtggcatttatagtccattgttgtattgaaattgatctgccgagcgcctactgcgttcggtaaataataaaatcagtctgttatccc

SEQ ID NO: 265923 - DNA, 536 bp, Homo Sapiens
  misc_feature (388)..(388): n is a, c, g, or t
tacaatggataagtgtcttggcaacgttgatggggaaaattgttggagagagcgcggagaggtcatctttaaggaagatgaagggatatctaggttttttttcggttttgtttaaagtactgtcaatttctgaatacatagagctttaaatttttcgatagtgcatttcaacgctcttcataaaattttaaaagcccactgaatactactttgtagcaaatgagataatgttaagacctacccctctgatgggaggtggggcgaggaccggaatattaaggatctttaaaggaatcgacttcagctctgcagaaagattagcaattcagtaaagatttggggatgaatggtcacctagagaagtttattcttgctctctgttatttcntgctactggcttttagatcttgttaatatggtaattcaggttttgtcaggaattgatccacacttttgagtaacctggctgccacttaaaaagctgttacattgttttcctcctgatctttaaatgtgacttgattgctaggatatca

SEQ ID NO: 265924 - DNA, 739 bp, Homo Sapiens
cagagtgatgtctggagctacgtggtgactgtttgggagttgatgacctttggatccaagccatatgacggaatccctgccagcgagatctcctccatcctggagaaaggagaacgcctccctcagccacccatatgtaccatcgatgtctacatgatcatggtcaagtgctggatgatagacgcagatagtcgcccaaagttccgtgagttgatcatcgaattctccaaaatggcccgagacccccagcgctaccttgtcattcagggggatgaaagaatgcatttgccaagtcctacagactccaacttctaccgtgccctgatggatgaagaagacatggacgacgtggtggatgccgacgagtacctcatcccacagcagggcttcttcagcagcccctccacgtcacggactcccctcctgagctctctgagtgcaaccagcaacaattccaccgtggcttgcattgatagaaatgggctgcaaagtgtcccatcaaggaagacagcttcttgcagcgatacagctcagaccccacaggcgccttgactgaggacagcatagacgacaccttcctcccagtgcctgaatacataaaccagtccgttcccaaaaggcccgctggctctgtgcagaatcctgtctatcacaatcagcctctgaaccccgcgcccagcagagacccacactaccaggacccccacagcactgcagtgggcaaccccgagtatctcaa

SEQ ID NO: 265925 - DNA, 980 bp, Homo Sapiens
  misc_feature (289)..(358): n is a, c, g, or t
  misc_feature (719)..(719): n is a, c, g, or t
  misc_feature (864)..(864): n is a, c, g, or t
  misc_feature (894)..(894): n is a, c, g, or t
  misc_feature (911)..(911): n is a, c, g, or t
  misc_feature (966)..(966): n is a, c, g, or t
ctggaagatgatgatatggccaagccaaggaagggaacctacagtgaagagtacaggtgtctctgatctacatatccaagaactgcaagaaaaatgtccagatgggcatcagatacctagtccagtccttggcaaaagtctgggctttggaaaccaagggcaagaggcgatgacaactaatctatagtaattaaaactcccacccccctattaagactccaccctcccacatcccccaagcgtgattttgcacaacaagttaaataaaagtaaactgtttattaaaagnnnnnnnnnnnnnnnnnnnnnnnnnnnnnnnnnnnnnnnnnnnnnnnnnnnnnnnnnnnnnnnnnnnnnncagtcttgctgttttcatgtgcactatatttagcagcacattatttaatcaggcggcattttaatggggttgttttgacacttgggcattattaagatacaactatagccccgtggaaatttcaacgtttgaattccacttctccgacttttaatagtagcaaagaggggaaggagaagggaatggagtaccaaggctgagcattaggttaaacacaagaatttaaaagggccaaggtagcaaagggaaggaaaaataattaaaattaaaggctatctgacaaacaacccagagaaacagtaagaaaccatcattaagggcaatgggctatgtacccaagatgctcacatcaacctagcantgaccttttccaatccagttcttgtgttgaacctgaggatctgccctctccgatcaatccctccacccgataaatttgctaccaccaaaatctagagctatagagccttggaagcaaattcgggaagctaaatagttgtaccttnggattaccttcccacaagtgcagggtgggnccatgttgggttggggntgtgattacactgttcttctgcatttcgatgctttttcattttgtggcttggttncccaagtgaattaa

SEQ ID NO: 265926 - DNA, 880 bp, Homo Sapiens
  misc_feature (276)..(302): n is a, c, g, or t
agagctagcaccatgagcttcaataccctgcaattgctgtcgagaaacttccccctcctaaccattgccgccaccacctaatatactagtctccctgttagtaaccggctccttgaggactgtattgttaacatctgcctccctaaagtttgacataggaagtacataagttatattacttaaattgttgaatccttatcacctcctaatggttttcttcctcacatctgagtttttacaaccggtctcttgaccatatcctatgataaaatgccnnnnnnnnnnnnnnnnnnnnnnnnnnnttgagtttgatacttttatgatctacctgtttcctcatggctactagtatttagaaaacaacagcaacaaccacacagctgaaaatttcagagagggggaagaatggggagaagctgttcattaagctctgcagtagacagggcccaggatcaatgagcactacattcaaaaaacaggcaggctgaagtcccttagaaacatgggggtcacttggaagacatattgacgacaccttcccaccctaaaggttacacaggtgggaagctttggactccagctcctcactgcataccctgtctttagatcctgctgattctaagcaaatgccctattaaagactagcttcaggaaacagaagcagcccaaagttaaagctggggaaaactacactggctcacagcatgagttccaggactttgggaaaggccacctcccctgcactaggcaagctgaatttctggaaccctaaactgaaatttaaaatacatctttgccacagaaatagtttgacaaaagcagctggggtctgtgactctaggagttctcaagatttatgataagataacacttctatgga

SEQ ID NO: 265927 - DNA, 1053 bp, Homo Sapiens
  misc_feature (932)..(948): n is a, c, g, or t
ctaccctgtcctcccactctgagtcagaatgatattgactgaaaccactagtatttggggctagagtcagctcatggagcacagttgatagatgacaaggcccaggagcaggtgtggcttgctcaatccctcagttacctcctaaattgctaagttaccagtagtttcccaaaaaggaagatagcttgccaagcacctgttcttgcatatgctcacttggaaacaaagcaagaagtgatgcctcaagggagttgtcttagctctgggagtgtgagctcctttaaggactttgttaaccacttgcagtaattaatacaattgcttgggtggtgggaccaaacaccaaatatccatctcaattatgttcagacatcattaagacccaaagctctagggtttggttgtatctttggtagcactttctgacgaattggttgggtaggcaattcctggccagaagaatagtggagaagaaaaagccgatacatttgaactgccaccaactgcttctggtgtcaatactataggaggtaaacagttatgggtccccttctccagaaaggccctgtgctgtgtccataagagcaggttaagaataagaaagagattttttaccttaataaaactgggccagaagaaacagtcagggtcaacgtcatcttccctcaggacacaaatggaagaatttttctttcacgagaggtggaaaataataccaaagcaaccaaacccattagcaccattccatcctatatgagaccttgcttggctatatgatttgtggaattgcatttgtctatttgtcagtgaatctgtaatccattgttgttttctgctctgtgttttttatttcctcagaggcccctgcaaataagcagcagggccaggggctggttgggggaggaagctggggtatttacatggtaacaggnnnnnnnnnnnnnnnnngatccacaaagtgtgcctattcctctccccccgccaaatggaacaccagtcctcaatgttaataaagtattgcttctttaaatattttaataaatggataaacat

SEQ ID NO: 265928 - DNA, 1270 bp, Homo Sapiens
aaggcaggatatgccagttttcctttgtggaaaagtgtatccaggcagcaaacttaatgaggagtgggcagttttgtccttaaaaaactgcagggaagggttctttccagggagtggtagttggtgctccaggtgctggcagggacaggacagctgattgatagaagtgagggctctaacaaagttcactatttacatcaaaatgacttgatgcgggctctgggcctctgggccttgttaaaagatgatgctgaaccatgtcttgaaaccccaccagcattaggcttaggtactaagcaagtccggactgtaccccggcctcagtgactgaccaatcacaacacgtgccccagttgaaatagtgaactgtaaacagatcaccacttttaaatgctccccagaagaaatgagcacacaaaaactagctgagaaaagccctttcccacatcctcctctgcctatgtgggcactgaggcaactgccctgactgtgaaagttcaccccttgtgaataccactctttaaatccaaattgcttcattgagatcttaaaaggaatcttgaaatccagatgattgggtagaaaatgtgacatggaattttactctagcgtcaaaacaacttttaaaatagtcctgcttattcaagttagtttctcctccagaaatctgaaattagatttgataagttaaagattatacaaacagggtggctttcaataatttaattagactcatgccaaaaaaatgagcttccaggaaatattaaatattattcttaaagcaatttggacacagacaatcacacatacataaggaatggagacaaaaagtttctcccaaaagtgccagtgttttgttttgtttggaaaaatgacaacacaattagaggtaaacaatattttctttggctccatctccagtttccccatcttgtctggtcattgtccttgtcggtagatttagctttgcatctgttataaacgcctgcagtagagggcggtgtgaatttgagtcatggggggttggggactcagtgtgggaggtgtccaaatctgcaagaaacagacagcacaggttacaggaggccacctgagatgtacaaggcagatgtcttggcgttagagctctctaagattaggaaatgcagtgcccatatagtcagccacagaatggccaagcccaatgagaaaggaacataataggtgtcaaaatcattcatcaatatcattaagatatgttcgattgtgtgcacaaatgtctcctgtgact

SEQ ID NO: 265929 - DNA, 457 bp, Homo Sapiens
atccaactgggcacgtgttgtgattggtcagtcactgaagcccgggatacagtccggacttgcttagtacctaagccctaatgctggtggggtttcaagacatggttcagcatcatcttttaaacaaagcccagaggcccagagcccgcatcaagtcattttgatgtaaatagtgaactttgttagagccctcacttctatcaatcagctgtcctgtccctgccagcacctggagcaccaactaccactccctggaaagaacccttccctgcagttttttaaggacaaaactgcccactcctcattaagtttgctgcctggatacacttttccacaaaggaaaactggcatatcctgccttccgagtagtatgggtctctgtgtgagaaaccaggagatattttcatcttgttcggaaatacttgtatgtattttggtgtcaataaatatcttgtac

SEQ ID NO: 265930 - DNA, 763 bp, Homo Sapiens
  misc_feature (547)..(599): n is a, c, g, or t
ctcccttcacccgcggctgcctcctgcccccatgactacagtgtgatgctgtctgggaagctgaatgtcatcttccctgggcttacctgccaggctcctctcatccacatcttccagcctctagccacatggacccctccggaaagcatgtgtgtgtgtggggtatgtgtgaacatttttcattgcttgatgtgagccggaagaaaaatgagcttctctatttgataagtgtggacctgcccacagcactaaatttggttctgccgtcaccggcggccattgaagcagcagcctggtttagaggcttgccttttggtttcaaataatttctccaggctcatgttacatatgacccattcacagaggctggagggcatggcttctccagtccttagcactaaagacgtgtcttttggctcctgcacgactagcacaggcagtagaaccagatgggggatgctctgaggttgcagaggcaggaaggcaagcgggagagagcttgggcctggacagagggatgagctggctccctccccagctgtgaaannnnnnnnnnnnnnnnnnnnnnnnnnnnnnnnnnnnnnnnnnnnnnnnnnnnngggactgaggattaacgaggcaatggttttagcagaataatccactgctgctattattatcagcatcttcgtatagcaaaactcatttggaccaatggggagtgcgttaagttggtctgaagtagggcaaaggaacgattatagaatgtttcaaaggaaatgtg

SEQ ID NO: 265931 - DNA, 854 bp, Homo Sapiens
tgaccaaaatatttacaaaactaaaactataaaatttctagagataaacctaaaaagacatcttcataaccttgggttaagcagattccgtagaacactgaaggcataaaccataaaggaaaacatcaataaatcggatttcattgaattaaaattatttaacaaaagatactgttaaataattaaaagggaagttatagatggagagagcaatacttgaaatacatgtctcacaaaagacttagatccagaacacataaagaactcttttaaaatggtcaaaagattttgaccattcttagtttgggcctcagtggcatgcatccagtccctccctactccagggtgttgacttacacaacggctgcccgcccttcaagtcagtttggacagtgcttttcttcagtgctaagctttcctacctgactctgttccactggaatctgctctgtgcacttcctttagcacactattatttgctcctttaaatgcatggatactttaaatttcccagccactgtgtttctggctcctcatttcctctttatagagtgagatcttggaaattcatgttattctcacctaacccctgccctgttagatgacaaccttactcatcagttagatttaattatatttttcctgattagccagctgaaagggacacctcttaatggaccacaccgagagctttgactggaagctcttgacagagaaaacaacagggagtttactgaccgaatcaaacaagctttcacgaggcctacaagaaatagggctgttgttaataatgatcacaaattaccaacgtctgtccagaaacttgttcctccttagaatttcaccagtctcgt

SEQ ID NO: 265932 - DNA, 693 bp, Homo Sapiens
tagtaggggacacttattactattctgagcaacacaatttgagaaacactgcctagggtgtgtattgctgatgttgctgggccggttccagctgccccagggttgcccttgcttgctttcaatagcggtcaggcaggatgtactgcagaatagcagttagtgaatcatggtattagaaccagaaagaacttctgagaattttttacattaggccagtctcttcatttttcagctgaagactgaaggaactttactaaagggatttgtagataggcaccgacttctccttcacaattgttttagggacacattttgagtcactgacatgagcctgcgctcccctcacctgcgtaccttatctatactcaaggctgactatttcacccaaattaattttatggtaaatccccaaaatcattattgtttcaagaagcttttcataagtaaggatgagaaagctgctttatgtcttactacttaataacaagccatctatgctgagacaatcaattaaaatccctgactcagtaataaaataattgctacaattcatagagtgtctattatatgctgagcatgctatagacctacagttgtcagggtttttattaagtttatttttctctcttagccttatttacattgaaggactagtgtcagggttttttaatatccccattttataaattagga

SEQ ID NO: 265933 - DNA, 740 bp, Homo Sapiens
caaggcaagtagaattactaataaatcactttaccctcaaccattcaaggtctctaagagcatgcacatggatacatgacggggaaaggcagcaactcagcataaacactttagtattaacataaggagtatatatacatatacacatatgtatagaatatcttgcttttgaatatctatgggccatgaaacttcatagagagctgcataaaaatctagcagagaaaggatcataagtgaagtgccagccatggataacagactaatctgtgctcacaaaaaagggcaggcaaggaacacacagacatcactcaggaactacaggaaaactaagcgtagtgctgttttccaaatataaaacatacactaagtacaaaagttatagtaaatttgaggactacggaagtaatacttactatatgaacatcttttgttcacataaaaagcttaaagtaagatcttagcataaaagtatgctttctccagtaggatggtgtgagagggaaagaatgtaagaaggaacttgtacaagtcctgaaaattaagtcttgaaagtaaaaggctacccataaaaaatattatgtcatttggtatgatcaaaatcagattttaaaagaccttaaaatataacccttgcacattgttttttataattatatacgtataattagagctacataatcttgtctttatgctgtttttgatattttttcagacatttactgctgtctgaaaagctc

SEQ ID NO: 265934 - DNA, 749 bp, Homo Sapiens
  misc_feature (403)..(424): n is a, c, g, or t
tgtgtctcttgatattcccatactcatcattactttagtatgtacttattgccattaaaataaaacaaaaataacttaaatgtattcaacatcaaacataacacatgctgtcatatataacaatcaagactctcatttgcaagtttggggaccccaactcaaactgacttaagaggagaaggttcatataactgaaaagcccagagacatttctggtttcgctacagtcaaatcgaagggctgtaacaaagtcatgagatttggtctctctcttcaccctttgctgcttctgttagtgtcactttcaggcaggccttcagaacctgtaaatttggcatgtcacatggcaaaggggaattaagagtgctaatcagctgacattaaaatagggagatttagaagnnnnnnnnnnnnnnnnnnnnnntggggagagtaccttggaattttgggtgggcccaatgtaatcacaagtgcccattaaaaatggaagagtgagagagaagtgtgttagagataggagtaggagaatggtcaggcagatgcaacattgctggcattgaagatggagggagagatcacagactgacgagtctaggtggcttctagcagcgaagaggcaaggaagcggattttcttttagaaactccagagaagaaaacaggcctgccgataccttgatttttagcccagcgaaacttgtgtcagacttctaaactacagaactgtaagaataaatttgtgttttatct

SEQ ID NO: 265935 - DNA, 761 bp, Homo Sapiens
ttgagacggatctcaacaacgaaataatttccatcaggaaaaaagcatggggaataataaaacatccaatgaaaccctaattataatccttttaataaagtgaaactgtacagggaggaactgcttggggtatgttctggattcctctacactggggcagtatccattgaggaagagtgacagaacgactaaagaaatggactggccaaggggccgccacacttcccagacaccagaagacagggactcagcatctaggccacagccttataaagtccaaggaataatattcatccaccctggcaggaaaggtaaaaagtaaagcaagagctccctggtcttctaagaagaggggaggggagtctcactgaggaagaatgtaaaagaatcctcatcccagaacacatcccctatgcctagctggcctcatggtttacagcttgagcagattcacctctttattagctacgtgatttgaggctggtatttaattctctgagtctcagttttcccatctgtaaaatggtaatgttattaccgctcacagggacactatgagtattaaatacaataatttacgtaaatacaatactttatagtactttcctggaacagagtgagcacccaatacacagtaacaattatgtttgtttcgctatcacagaattactgataataacaggtatccctgcaatctattccattgagactatttttagtattaagttccttcctccaaatcaaaatacttttatttcacc

SEQ ID NO: 265936 - DNA, 778 bp, Homo Sapiens
  misc_feature (446)..(446): n is a, c, g, or t
  misc_feature (722)..(722): n is a, c, g, or t
gaattcaagttggtggtggtggtgccctgcgttggcctcccgccgcagggggccagtgtggtccggaagccttgggccgcacctggggagtcccttgctgtacgtgggggtgggaagctgagcccttccctcaccagccttcttgctctggggcccgactgccgtctgtccagaaggcctccccaccactgtgtggagactccagcagacccagtctctgggttggggggcctgctggtctctgctgtgctggagcaaagcaggcacggaggtgactcagtgggtggtctgttccaggctgttcccctgacatgggctggcctggggacctaggccaaggccagcgcacaccaggcctcttggcgcagagcccccctgaggccagcctgggggctcggggccgtggaggggaaggcaaagtcctcaggctcgaaacttgaactccnaagtggccgggggcaaagaagagtcatcctcccggccagaagccctggggggccatgctgggcccagggcacactggggaacgccaggctgggcttggctttggaagtggctgctgagctgtcagtgctggcgacagcagatggggaggccgaggcattccttgtggatcctggaagcgaagagggggtgtttacagaggggtcaggtgtggcctcacttccccttcctgccatgtagcgggtctcctctgccccggcccagagaggtttggaganctctcacggtcacaccgcaggcgtgggtggtgtggccgggcgtggcttctttggcc

SEQ ID NO: 265937 - DNA, 352 bp, Homo Sapiens
gtgaaatgcaagaggcagtttaagatagctcttccacacagagttggaacattttcaacccagagtgtgacttccccgcagccctggcccaggccctctcacaaggaggaggccaggagcacgtgcaactgaacaagctgtgaagccagccgggcacagaacccccggggtggaaggctcccctgtgaaaatgcaagaggaaaggcgcaaagggaatcttcccaacctctctacctggaagcatcctcatctgtgacatgaagcaaagaacagtgccttcccgtgcaggctctttttgggattacaccagaacataggcatgctcaataaatggcagctatttgcaaaaaaa

SEQ ID NO: 265938 - DNA, 711 bp, Homo Sapiens
caaggtgaacaccaaaaagtaaaaagtctgggtaataaaatctacagtagggaaagaaaatgcttctgataacttcagtgaagcttgcagtttcagctaccaagtcaggattgttacccccaccacctgcgctccctccaagaccttgtccatcacagtctgaacaagtgtcggaggccgagttactcccacagctgagcagagccccatcccaggctgcagaaagtagtccagcaaagaaggatgtactgtattctcagccaccatcaaagcccattcgtaggaaattcagaccagaaaaccaagctacagaaaaccaagagccttcccactgctgcaagtgggccagcttctgcggcaaccatgaaaccgcatccaacagtccaaaagcagtcttccaaacagaagaaggccattcaaactgctatccgcaaaaataaagaggcaaacgcagtgctggctcggctgaacagtgagctccagcagcagctcaaggaggttcatcaagaacgaattgcattggaaaaccaattggaacaacttcgtccggtcactgtgttgtgacccccccatggttcaagtgacagtgggtgaccttgtctgccaagatctttcttttgaatgttttgaacccaactacttgtcatagatgtttgactgtgtcaaaagctgtgagcagcaaaatataatccatatgaccttttctcttgc

SEQ ID NO: 265939 - DNA, 584 bp, Homo Sapiens
  misc_feature (199)..(244): n is a, c, g, or t
  misc_feature (329)..(343): n is a, c, g, or t
  misc_feature (349)..(416): n is a, c, g, or t
aggaaagttatgaagtaacatcatataatacttactccccaacaatattaaatgtgattacaattttacagaatattcaaatcaaaatgttatataagacaaattattattcttgcttttacatctccttagaaggagaaacattcaattgttttaaaaatgttctatttatttttcagaaatgaggtgttgccttctnnnnnnnnnnnnnnnnnnnnnnnnnnnnnnnnnnnnnnnnnnnnnntgaattcttgggctcaagtgatcttcctgccccaagcctcccaagtagctgggaccacaggcacgtgccaccatgcctggctgannnnnnnnnnnnnnnaatgtnnnnnnnnnnnnnnnnnnnnnnnnnnnnnnnnnnnnnnnnnnnnnnnnnnnnnnnnnnnnnnnnnnnncatagatttgtctgtgttttctctaaataggttataaataccttgagggaggaatcacaaataactaaaagaaacttttgtagagactatcagagtattatttccttgtggacacagtaaatgtatgatgatgagaaatcataataaactacaacattttctccaaaa

SEQ ID NO: 265940 - DNA, 693 bp, Homo Sapiens
  misc_feature (683)..(683): n is a, c, g, or t
cctaaacttcacatctagaaaggcttagagagggaagtggttattcctgagatcacgttgctagtaagtggcagaaaaggacaagaacccatgtgtcctgactccagaaggttggccagctatcttcatttatatgggactttcctggtttttgcactgaaagtctagctttcaggaaacccctcagtcctagacaaactggaacaattggccaccttgctcctagaaggaacccagagaaagtctgtgtgtaggtatctgggatttaaagactcattctttctttaagataattatcaaatccataggcatgtactggcactaagtagagaattctcaagagtccctgctggcctgtagattttatttcattcagtttaattagtatgttttatatatcatgaggatgagtgaaactattattaaaaaagcaaattgcatagggcctgacacaagccacatgctcgataaatgtctacaagcttatgctcttaatgctgtttgattacatccctcatatacactcttttttgaaaaactagaaaaatgagtcaaaattttaaggactgatacttaggatatatagattaatgataactcctatgttttggtgagactgtaacctgatagaaaaattttggaagataatttggctttatcttgtaaaggtgagtattagcagnttcattcctc

SEQ ID NO: 265941 - DNA, 595 bp, Homo Sapiens
taagtacaataaaatgaaatagttaaggagaaattttttcctagcagttaaaaaaaatctcaatttacaacacggtctttggtaataacgctaatgaattccaggaggacatgccgtagccattccctgtcgcccccctcgcggtgattaaaggcagacggggaagaactgggttgtgagggcgtcggtgggggtggggtagtctcaatctgtcagtgtgggggcactgcttgccaccaacaaggccaattttggggatgcttaactcagacactcacagagaggaagactcgacagttctaaataatggttattaatgacgccctcctctaaagtgacaaattacttctgaaatttagaattgaagaagtatgaagagtgaacgtgtcctattgaacgtgacaggaaatgccggccagcacacagagctcccactcgttgtgtgctgggagaaggccagggtccctcctgctttgggcttttggctgttgtacaaggcagtgaccacagctacctctccctgacgtgtctcccagcagttactgttggtgactacgggcacatcctgaccgtaaaaacgctttttgggtgaaag

SEQ ID NO: 265942 - DNA, 755 bp, Homo Sapiens
gtagaagcaggacatctgtgtgtatgtgcgtatttaaattagattatttataataaccagagccagccctcgcgctggcaaggatcctcctgccgagctgatgtcgctcctgccctctgccggggtccggaagcgacatctcaggaggtagctctcagcagagtgaggattcctgcctttcgtagagttttgtgtgactttttaaattattcatgtgtcccttaaaagtttcactacgtgggagaaaattccagcaccaagtgttgtggcaacagctgagagagtgcaggcaccactgtgttgtggcttgttgaccgggaaatgtgtcacccctgccaagggaactcttctcctcgcggggggactttgggatggccatcagaccttctagggtctgggctggggtcatcctaggtatgggtgaccgtccctgagacataagcgaggtagattcagccatcgtcaccctcagacttgaggtccccacccaggccaagccggccccccgtaccccttgcctgggagcaaaccgccaggacgcagcctccacgccgcacctgccacacccagccctgcccaggaaggaacacatgacccttctgtctgtgactgttgctgagtctctgtctcatgtcgtagaattgtggataattgtctagtgaccctctcatcactgtaaccatcgcgcctggcctagatgtcgtgttttggatgctgtgttttcaataaatgcctctggggccctgcttttaaaa

SEQ ID NO: 265943 - DNA, 754 bp, Homo Sapiens
caaatgtttttacttttgtacataaaacatcaaatttatgctactatccaaagaataatggatgagtattttgaatgaaacacttccaatgtattcaattatttcattaaaaaattctctctctcacacacacactatatgtctagttgtgtactaagcataagaagtataaagatcacttcttttctttggagctcacagtatggtgaaggggacagatatgacaacaaataatttgatacgtaagacaacatgataagcacatcaatggccaaggcactcagacaagggaaggaacactcactctgcttgggaaagtagcagaagacttcacagaagaggtgatgctagggctgagtcttcaagggaaaacagtcttctagatgaacaacagaaagagcatttcagacagagagaaatgccatgccttactatgtgcaaagggcagaagcctgcagtgctcagtcagtgttacaggagaatacagagttgggagagaagaggctagaaaaagtagatgaggagacctctcttaaggggctttgtatacaacagaagccatctgtttgctacccaagaggctctgaacagccaccggaagaccttagtcaggggtgctgcatgattagattcgtgttttctaagatcagtttgactgcagcttgagaaataaactggaagaggcaagatggaagccaagggaagcaggtgtgacactctcgcctagtccagcttagaaatgctaaaaggcctc

SEQ ID NO: 265944 - DNA, 714 bp, Homo Sapiens
gagcttggtgtgtgaacatgaaattcaaatacacagttgcttctgctctcattgttatgagttaacacagcaggcgcagaatgaggaacaaagacagggtgaaatttcaaacgtgtagcatctgtactgataggtgcagaaatactagagaggggagatcccggacccaatccagaatctaatattagattctgaaggtgtcctaccaggaaagcctgtccagatggaaattcaaagacagaacttgaagtagggcccccttgtactggcttctgttcaggtatctgtttcataggacttgacagtactgatgagttgtatggaatgccctcatactgttctgccacccgggcctggtaatgtaccccagctacatacactgcttcctgaggaataaaatagtgagcttcttctggaagtactagtccaggtctatagtcactgtaaacttgagatggttcaaacataggatggacctgtatctcacatgactctccagttactctactggctgtagtacccaacataactacggcctctggtgtccagttagttgggctgccaccaggtggaagaagactttggccaacagtcctcagcaggggttggaagtggtgagtttgggcttccaggaaggaggtgctcttacgccgctgggaaatggctactttcggtgggcaggtgggaggtggtgaaaaagaaactggacgttca

SEQ ID NO: 265945 - DNA, 500 bp, Homo Sapiens
catccggaccaaacggggaggttgtgggaagcataaacaaactttacctacaccctccagtaccgtaaacatcacaaggtgatatgtggcagaattaaccagcagacaaccccgggatgcagccataccaaaggactccctcaaactccctgccccaatgtaaaccccctattctgtaagcttggggctgctttccttgactgttaagggggcagccgacaggttaataaaggcttgcctgaacttggggctctctctctctggtcctttctctcggctaaccttacattctcactctctaagttcacatgagatctggttgctttaaaaagcctggcagctctttgttctctctcgccatgtgatatgctgattacccttttgccttctgccatgactgcaagcttcctgagcccttaccagaagcagatgccagtgccatgcctcctgtacgccctgcagaagcatgagccaaaataaacatttttctttataaatta

SEQ ID NO: 265946 - DNA, 205 bp, Homo Sapiens
catattagtctgtttttcttttcctttcctggcccctgcatgccattttagatggggaaaatattcacgtggttaagagatttaaagcagtgcaaaaagagatacagtgaaaagtatttctgtaccctatctactttgtcctctccatgccaaatagataactggtttcttatactgtcttttgttgcttaaccacaggaatggg

SEQ ID NO: 265947 - DNA, 747 bp, Homo Sapiens
  misc_feature (78)..(657): n is a, c, g, or t
atgagggcctcggataaacagtcccggatttgcagagggagtcgcctgagggtcccgttctggtcctgtggagaggtnnnnnnnnnnnnnnnnnnnnnnnnnnnnnnnnnnnnnnnnnnnnnnnnnnnnnnnnnnnnnnnnnnnnnnnnnnnnnnnnnnnnnnnnnnnnnnnnnnnnnnnnnnnnnnnnnnnnnnnnnnnnnnnnnnnnnnnnnnnnnnnnnnnnnnnnnnnnnnnnnnnnnnnnnnnnnnnnnnnnnnnnnnnnnnnnnnnnnnnnnnnnnnnnnnnnnnnnnnnnnnnnnnnnnnnnnnnnnnnnnnnnnnnnnnnnnnnnnnnnnnnnnnnnnnnnnnnnnnnnnnnnnnnnnnnnnnnnnnnnnnnnnnnnnnnnnnnnnnnnnnnnnnnnnnnnnnnnnnnnnnnnnnnnnnnnnnnnnnnnnnnnnnnnnnnnnnnnnnnnnnnnnnnnnnnnnnnnnnnnnnnnnnnnnnnnnnnnnnnnnnnnnnnnnnnnnnnnnnnnnnnnnnnnnnnnnnnnnnnnnnnnnnnnnnnnnnnnnnnnnnnnnnnnnnnnnnnnnnnnnnnnnnnnnnnnnnnnnnnnnnnnnnnnnnnnnnnnnnnnnnnnnnnnnnnnnnnnnnnnnnnnnnnnnnnnnnnnnnnngaagaaacagctcccgacgcgccacctgtaagagcttatggctcactgtgaaggtcggcggcctcacggggaggaagaaacagctcccga

SEQ ID NO: 265948 - DNA, 437 bp, Homo Sapiens
  misc_feature (301)..(376): n is a, c, g, or t
  misc_feature (388)..(388): n is a, c, g, or t
gaaggaatagttgccatccaggtgaatctaaaataaaggctgttaccttgctaccttctcacctaatactattttccctcttctcttgagggagaaacaaactgttgctacaaatctcactcttcaggagatatatcccccccatttactctttgtcaaagcttaacagtgtcaacaccatttgcataatatagtaattattgtctaaacaagaacaaatatatacattagtaggtgaattttcagttgcacaatcttttagtttgcataactaaggaatatgaaaatatctttagtctannnnnnnnnnnnnnnnnnnnnnnnnnnnnnnnnnnnnnnnnnnnnnnnnnnnnnnnnnnnnnnnnnnnnnnnnnnnttaagactgtcntgggcagtgaagaccccggtttctattttaaaaaaattaattaaaatgg

SEQ ID NO: 265949 - DNA, 468 bp, Homo Sapiens
  misc_feature (394)..(394): n is a, c, g, or t
  misc_feature (402)..(402): n is a, c, g, or t
  misc_feature (416)..(416): n is a, c, g, or t
  misc_feature (434)..(434): n is a, c, g, or t
acctgttcaacctgtgagtaatccaattactgttctgtctttgaggccaagagcctcagtccaagccagccatgttcatgctgtgtctgccccaagtgaggaggctaaggctggtgcatagcccgctctagggtggggtaaagcgggcagcagttaactttgcctctcataggctggggttggtcctggtcaattctttattttgtgtgaatcgcaaacatagttcaggtatacgtaacggaagtgcccctccctatgcattctccagctgtagggtacagtcatctccggggcattatagtaaatctcattagtttcagacctgattaatgttgaactcacgactgttgagatgtaggtagtgcagtatacagaaaagaacaagagctctggnatgaggcntgttcagggctggnattccgggcttcccttcntagattagctgcctggccttgggtaaaagattta

SEQ ID NO: 265950 - DNA, 424 bp, Homo Sapiens
cccctccctatgccattctcccagctgttggggtacaagtcatcccccggggcattatagtaaaacctccattagttccagaccctgattaatgttgaacctcacgactgttgagatgtaggtagtgccagtatacagaaaagaacaagagctctggaatgaggcatgtcagggctggaatcctggctccatcatagactagctgcatggccttgggtaaaagatttatcctttctaagtctctgtttagtctgtgtaaaatgggctgccagtatctcatgaggggattctaaatattgagagggcatatgatagacattcagtaaatgcctcttgccttccctgtgccaactttgtttatcctccactccatctaatttataatattcaaacagtgccaagaatgacaagatattaaaaaaaa

SEQ ID NO: 265951 - DNA, 599 bp, Homo Sapiens
ttttcctctgtactgtcttcctttgtggtttttctggttttctgtggttgtatgttttgaatcctttctttttatactttgtgcaactactataggtttttactttgtagtataaaagttgcagataccaagatgaaattactcttctcaatcccaaacaaattgcagccagcaaagcacatagagagagaggtcgtgtgtggatgtctgagataaaacctatctcaagtactttctaaaatagccacacaagaactttttcatgtccttcacatatctccctcccacaaagggacccaaaatggcgaggaaatggaatatcctcctccaattcacttttccccctgtagaaaccatgggtctagggaaattctctgtgtgtgccactgtcccagcttgggggaggggtggtacagtcaaagaaaactgttccgcttattgttcagccacagcttttctcagttctgtggtcaagtggatgtctcaagttctgggttattcacaatggtattcttgcctgatgatagttgttagttgaatttctgggagagaggggaacagagaatgaggcccgataacttctattctaccaccttgct

SEQ ID NO: 265952 - DNA, 548 bp, Homo Sapiens
  misc_feature (69)..(81): n is a, c, g, or t
  misc_feature (118)..(374): n is a, c, g, or t
atcttaaacttgcagcttttatcttttgtatcacgaccactaaaagttgacatttgcattggcaataannnnnnnnnnnnngcttttttttttaatggcagagtttcgctcttgtcannnnnnnnnnnnnnnnnnnnnnnnnnnnnnnnnnnnnnnnnnnnnnnnnnnnnnnnnnnnnnnnnnnnnnnnnnnnnnnnnnnnnnnnnnnnnnnnnnnnnnnnnnnnnnnnnnnnnnnnnnnnnnnnnnnnnnnnnnnnnnnnnnnnnnnnnnnnnnnnnnnnnnnnnnnnnnnnnnnnnnnnnnnnnnnnnnnnnnnnnnnnnnnnnnnnnnnnnnnnnnnnnnnnnnnnnnnnnnnnnnnnnnnnnnnnnnnnncaataaatccctttttatccctacacaaaaaagcaactggagtgcaaatgagaaaaatggtgttatcacagagttacccttagaaccactattttatttatgtagataagtaagtactttgagggcaaggacttggtgtcattgttttatctgcagtgcccagaacagtgtttg

SEQ ID NO: 265953 - DNA, 730 bp, Homo Sapiens
  misc_feature (101)..(234): n is a, c, g, or t
  misc_feature (623)..(623): n is a, c, g, or t
  misc_feature (674)..(674): n is a, c, g, or t
  misc_feature (718)..(718): n is a, c, g, or t
gaaggggaaaacagcaaaagctagaagggttggagcagggatgttatgttgtgtgagtgcacacatgcccttgtattcgagttatgaggcacttgagagtnnnnnnnnnnnnnnnnnnnnnnnnnnnnnnnnnnnnnnnnnnnnnnnnnnnnnnnnnnnnnnnnnnnnnnnnnnnnnnnnnnnnnnnnnnnnnnnnnnnnnnnnnnnnnnnnnnnnnnnnnnnnnnnnnnnnnncaagttttgagaattaaatgctagtgcatgttaggtgctataaatagcatataataactgctgaaaagtgtaaactattattgtaattattagtaagaaaatgtttaattattaattttttatcattgacctttaaatatacttgcttcagttatattttaaactttaaattattaacaatttgggccccatgctgtgtagcaggaggaactactgttataccacttaaatttttttcctagcttctttcttccaccagtctcaactttcattaataatagtttttctgtttgtcagatacttgtaatatttaacatcttttctgtgattataattttcatgttttagttttaattttatagtttaatggtgggtccagatctcaatgntagtacttttgtcatagcttctttattcatctcttggttagctgaagttgnttttcctgggattttgtcaaaaaattttcgaaattttggcaagntaacatgctttt

SEQ ID NO: 265954 - DNA, 1044 bp, Homo Sapiens
  misc_feature (17)..(17): n is a, c, g, or t
  misc_feature (48)..(48): n is a, c, g, or t
  misc_feature (74)..(74): n is a, c, g, or t
  misc_feature (86)..(164): n is a, c, g, or t
  misc_feature (381)..(381): n is a, c, g, or t
  misc_feature (757)..(854): n is a, c, g, or t
  misc_feature (857)..(866): n is a, c, g, or t
  misc_feature (952)..(989): n is a, c, g, or t
tgccaccaaccaaatgnggattaaaaacagtatttgaaggatgaggancccatgtatagtcaggactgagtttncctatatgtggnnnnnnnnnnnnnnnnnnnnnnnnnnnnnnnnnnnnnnnnnnnnnnnnnnnnnnnnnnnnnnnnnnnnnnnnnnnnnnntacattaaatattgatgtccttctttcctcttactgatgtactaatatagcttctgttgccataactccctaaaacaactgccgcaaaacccatagtaatgcctcaataaactatttgagttattgaactcaattaactttaattttaatctcttattttcagccatatttgaaactatttactaaacaattccttgcaataacatctcccacatcntaagatgtttttatctacttaactaccctaccataggctccacaaagacatgggaagtaagtcttttcatgactgtattcttgagcaattactacactgcctgatttaaataaaaggcaccaataatatactttgaatgaaatataggcatataaaatatcagaatcataaccttaagagattaaacagttgttttcaaaggggaatgtactaccgtcacttttctacacttactagttcatatgagcttttaaccagcaaaagagattagtgtaacatatttttaataaagtcaaaaagcttgtgaaagtcatggtcatttaacacactatgtgatgcttgatactacaactgggctggactcagtggcttgtannnnnnnnnnnnnnnnnnnnnnnnnnnnnnnnnnnnnnnnnnnnnnnnnnnnnnnnnnnnnnnnnnnnnnnnnnnnnnnnnnnnnnnnnnnnnnnnnnatnnnnnnnnnnggtgcaaaaattagccaggtgtggtggtgcatgcctgcagtcccagctgctcaggaggctgaggtgggaggatggcttgagcctgnnnnnnnnnnnnnnnnnnnnnnnnnnnnnnnnnnnnnnagggttaccacaacccacaacaatgatttctgttacgatgtattacaagtatact

SEQ ID NO: 265955 - DNA, 964 bp, Homo Sapiens
  misc_feature (548)..(548): n is a, c, g, or t
ggctgggttaatgctgtttccttcattgctgcctcacaaaaagcctcctccaaggtcacctcactgctcctcagtttcccttcctttgggacaggctcaggaaagccgctcagtgtaaatctgtggcggaaccccaggccttgtgaagaggtagcagaatgggggcatctgctttcttctcttcgatatccaagtttctaaaaggaagaaaagggagaattacaaagcacatgcaagctcacaaaaatgtagatggctactgaggatcctaaagggcctgatcacaattcctcccttaatttaggggagccaagtgcttcccaatgtgctctggaaaaaacatgttgacacaaacatgcacttaggatatctaaacactgtgcataggatgcaaaaatgagtcagactctcgcattcactcctgcacgcattcgtctactcaatcaacattcaattgtgcgttcctactgagtgccaggcatcatgctagtcactgacaattcacagaggtgatgctctcccccagaaccctagttccttcccagccncagtgaggacacacacaggcaaatgagtccatggcctgggttgagctgccaggttcctttgaagcaggtatggggtgtacccatggggccccaaaggaagaaaacaccgtcccatggtttgtgagaaaggcatgaataatactaagaggtgagcactctggcacttgtggtgaccctggcagccctccaatgaaggagaatgttgtgacctcggctagcaaagtgtaaaagttttcactttgacagaggttgagttacattcaagtttctaaagcattccccagcaattccctccagacagcaactgagctatgaatctggaatttatttggtagggacttttctctctcagaaatgcagccaaacaccaaagaaaaagatcaccttttaaataaaagaagcacattgtactatta

SEQ ID NO: 265956 - DNA, 673 bp, Homo Sapiens
ccctgcattctgcacaataggcacgttatcttctctagactgaattcatatccaccttcttaacaaatcaagatatgctaggccagccaagactcctggtggccctggaccccacaatcagctgcttagacccctgtggctacattttgggaaaagagccatgcttattaggccttatttttcctccagaattgacccaggctgatttcaaagccctctgggactgtttatacccaggggcatgaggcaatggagcccctcctggacaggaagccctgccacaccaaggagaagtctcaagaaggcagaaatgccttcactcagttcttcagctctcttgcagatgaagtcaaagcaggagtagaggaagtcctctacactgaccctctttcagcaactaagtaattttttgctcagctcaaggtccaaaaagggacagggaaactgtctttgtcagaccaggtggcttcaaaggactgaaaggcagacccctttctttgcagacgagtccctcttcctgtaggagaaaaggcaaaactagcttctccaaattctccatgctgcattgtcagtcacaaacacacaaaaaacaccagccctggacaagagaatggaagaagagttaggagatgcccttgatggggtttcattcgatgcaaaaggatgcagcttt

SEQ ID NO: 265957 - DNA, 371 bp, Homo Sapiens
  misc_feature (16)..(16): n is a, c, g, or t
  misc_feature (359)..(359): n is a, c, g, or t
aggccaaagaaattcnggcacgaagaactggacgcaacctaaacacaaatgagggaggtactggcttctgcctcagggcttctgcacatgctctcttcccttgcactgaacactgccctcaccccctgcccacatcttcacggttcttaagttgttgctctaacgccacctcctctgcgaggcccgcccctaaccactctacttaaaaacagcaccagactggggcatgggtgggctcatgcctgtaaatcccaggcactttggggagggccaaggcggggcaggattcactttgaggattagggagtttcggaggaccagcctgggggccaacatggacaaaaaccccatctttttanttaaaggattac

SEQ ID NO: 265958 - DNA, 1142 bp, Homo Sapiens
atgagccaaccgcgcctggcctggccatgctaattctttcatgtattgtctataactgctttcatactataacagccgagttgtgtagttacgacagaggctatatggcttgcaaagcctaaactatttacgatctgttcctttaccaaaaagtttgctgactactgctgcatatggtatgctgaattgggtttaaatggcttgtaatagccctgaaaatttaaagtggctctcctgtcccctgccgttgaggctggactgcatggagattatggtatctgttggctgtagctgtgactatgagctgagtgccatgtcccattggatagcatgtacttggtgacccctgacccacatacagctgactctttaaggcagttccctgccacacagtcaaggacaggaaagatctggtgtgatttcccagatggggagttgtgcctaattactagcatcccccagaagtagtgagagatagcattagctaatgggtaaataactggcttaaaagtgtaaactcctaggttttcacactccagtttttatgtggtcctggatatgtgattcttttctgccttggcattcctgtctaaaacactgatctagcaatcccaagccaccctttcctttttgcggcccttgttctgaataaaacagtgatttcatgtctcttctcactttcttccagaaggcagctagccagcacatactcactgaccagttgctgcctgcacagcagtgttttcactgctgtgttggagaaacccgaagtcttaaagggccataaggtattatttaaagagatcagtgtcatagtttaactgtcttcacagttccaggctgtaggaggtacagtttctgaggacaggggcaatgtatgtgggtttggtgatcatttctaaggcctttttcgatgacccctttgtcctttctgacacattagaattgctctttgctgctgcctgaaaaatgatgtcctcatgctggacagccccagctgaaaactcaggctgctgccttgacctatttcccttctccctgctggcattaaaagggaggatgcccccggggagctcattctgcaggctgcagtggccagggcagagtcctgggtttcctctctctcccttactccctgcttt

SEQ ID NO: 265959 - DNA, 471 bp, Homo Sapiens
  misc_feature (172)..(201): n is a, c, g, or t
tataaataagtattgataaaaacaaggataaaaatctttaattaggtccctttcattgttccaatatgacagaaaatcatttttaccataattaaaacctaatcctttgcaaggaaatagcaccttataaaaatgtttattaggccgggcacggtggctcgcacccataatnnnnnnnnnnnnnnnnnnnnnnnnnnnnnngcataagcaccgcgcctgccttcaggaatgactaattaaaatgtcaccgggggcctgacagttaaccaagagatgaccaggctgggtgatgccatggtgagctcactgaaggcacagggccccatctaaggtgtgactccactcaaccttataagatcactgccatatgggaatgcattcccagtttgctggattattcaagagaaagtgaaattcagatggtcttattaaattttttatcctgatttttaagcattattagtcaattca

SEQ ID NO: 265960 - DNA, 438 bp, Homo Sapiens
  misc_feature (138)..(138): n is a, c, g, or t
gaacaatagacataaaattccagacctagagtgacaaatcaacacgtatcagttactttcattgtcaagggcattttgggtgttcacactttatcacattactggtaaccaagtattattcctgacctgtgtgtttgntttataatgtatacagcagaagtttgctggctaaaagcaaggaagcaactgctaattctgaggagtcagagacagggtgctcccatccacctgtgagcattgtctgtagacacaataaatagcacatcttgcatgtatctgtgctcgatgaggtcaggcgccgtattggttttacctgtgtgtcttcagtgcctacctcagtgcctgctacatattaggcattccataagtcaataaattcataaaaggaataataagcacgagtttcctatctgcaaatgctattgtaataaaatacaa

SEQ ID NO: 265961 - DNA, 900 bp, Homo Sapiens
  misc_feature (812)..(812): n is a, c, g, or t
cttcctcctcccctgaggactcccaggggctttccccggcagagtcagcatgggttggggaggagggaagctggccccgaagccgggccctgtggagtgtttccaccaccacattccctcgctcggaggccccatcttcttcctcagaccaggttggtgggtcttcctggggaagactgcctccttttaggattccttccggcagttcgggggcgcttcggcgttgaggagcttgggggtcgggagggtggggacgcagagggatgtcccggagttccagggtggagaaggtgaggcgagggtcccgccgaagggctctttggcgtagacggctcagtggggagcgggaccccgtgggggtgcctgggatcaaagtgccgtagccagagtctgaggtatcatctggcacaaggggagcatcttcatctgtgtcttctgtcaccaccaggtgggggataatggtcgagaactcaggagtcctcccctctgcgctgctctgagagccctccagggaaggcgtggagggcctggtgctgggggactccctgtccctggtcccgaatagagggtcaggagctccctcttctgttgaacatactcctctgccttcagcttctgtagggcgccctgggcctgctgggtcttctccagccactgggcacggtctgtaggactgggacagtgcacaaggagggcgctggagacacactggaattcagtgaggtggatcagcaggaagctgttggggtctcgcaggggttggcacacgagcttctccagcatgagagggggtcggatgaccttggctttgntcgccttgcgctggggcttggtcacaaggagcacatcagagaagaggaacaggtacacgtccagcttcccttctcgtccctccttcac

SEQ ID NO: 265962 - DNA, 683 bp, Homo Sapiens
  misc_feature (537)..(537): n is a, c, g, or t
  misc_feature (597)..(597): n is a, c, g, or t
atgagccaccatgcctggccaagattcatggaatttttgaactccttgtcttaactactctgccagctcttgttgaacaaagaccaatccgctcttcatgatttgctcctcatgtcttcttataattctaatgtgtctacatccttggataccatataataggaaaattcttttaaacaactaaaacagacataatcacaattccaacttaatgtaatccaatacaacttcatacaaatagcagttaaatcacacgtagtaaaatttcgtacaacatttttttaaagtttcaaattcaaatgttccaaatgtttaattattttgtcttaaggtacatttgcaaagaattctaactgctgctattacctttgtccttgctgaaggaaaacattaggagaatgagctgtttttaagctaaacgtgtctccacttgatgaatggcgtgaaggagcttttccacccaagagtgatgtttctgcttcttttatttccattgcccttttgtataattcagcagctttttcaaaatctcctccntcatagctaagcacagctaaatttttcagtgtttctccaactcgaggatgcatccgaccnaggctatcttcataaatctttaatgctctttcatataatggcaaagcttcaacgtgttttttcatttggctataaagaacagctaa

SEQ ID NO: 265963 - DNA, 722 bp, Homo Sapiens
  misc_feature (704)..(704): n is a, c, g, or t
cgtagctgattacttagtaactttaaagatacaagtaatatcctcacttgtgtgctcaggcaaagtggggagagatgtgggagagtctgtgcaacccccgcaggtccatcctctttgagcccggcctgcgagatgagacctctcactgaggcgtgtggtcctctcactgaggtgtgtcgtcatctcactgcacaaggagcattaaggatgtgcagtgttcccgttttgtagtcagatagtttatacaccttagggaacgttttccaggggagccatgtcccataagtccatgggattttagggtatgtttaccaaacacaatcctaaactaaccacatcttggctaaaaacatttcatagataaggacacttctcctagcaaataccagtcatttatttacagagaagccagtctcagcgttctggggagatcagccccagcgactggctttatttcccaggagtatctccattgtgctggggaggcatgaagagcaatttcactgcttagttcctctttcttctgaggagaattgaaatctctcatgctaattatggattattttctctcagctctgcaggttttgcttcatgtatttgagaatgttataaggtgcatgcactttttagggatttttacatcatatttgtaaatttggaccccctttatctccagtggacattctttgttgtggaagtcaccntggggctggactactctc

SEQ ID NO: 265964 - DNA, 834 bp, Homo Sapiens
cagcctcccaagtagctaggaccacaggtgcgtgtcacaatgcttggctaatttttttgcagaaacgaggcctcactatattgtccaggctgagtggctcttttattaaccagtcattacactgcggaacagccaacatagagtacttgctctcgccctgtgaattttctttcatgagggagtcaatatgtagtggaaagaagcatgtagcaaaaaagacaaccttgatctttaataaaaaagaagttggtttatttccaaaataaatcccctgacaaaaaacctgggtgatgttaagtaattgactgtcttaggagtccagcagaagaccttagacaaaaaaagcagaacccactggagtagaaaaggaagcatgtagcatatactcagtagtgaaatttaattttactgactgttaggtatctatgccaatttgttttcatacttcagttggttttggaatctgccttatacctaatatttaattatttattcacactcataagcatcaaatatttaatgccctcagtgggaaatttgtgtttaaactcaatggaatctaatatttctttatgtcgttagtccctgtaaaatgttaggtcacccaaggaaaggggagaaatagcaatggttgttcctaaggtattgcttgccctccatgtcttcctaaagagcagaacttggagtttctcctttatgtagagaagaagtaacttagggtgtatttgcaatgaaatattcatagatattgaaagcttgtgtttacatgaaatatgtttattatcaagaagtcctttttccaattctgtacattaaatatatgtgttttaaagg

SEQ ID NO: 265965 - DNA, 843 bp, Homo Sapiens
  misc_feature (537)..(642): n is a, c, g, or t
ttcggcactagaccttccagagcaaaataaatcaggaagagttggcctcagggactcctcctgccaggttccctaagggccccttctaagctgacagtgggggggccatggggccaaagtcaggaaaaggaaaagggagacaagaattcagccaccccgaaacagaagccattgcctcccttgtttaccttgggtccacctccaccaaaacccaacagaccaccaaatgttgacctgacgaaattccacaaaacctcttctggaaacagtactagcaaaggccagacgtcttactcaacaacttccctgccaccacctccaccatcccatccggccagccaaccaccattgccagcatctcacccatcacaaccaccagtcccaagcctacctcccagaaacattaaacctccgtttgacctaaaaagccctgtcaatgaagacaatcaagatggtgtcacgcactctgatggtgctggaaatctagatgaggaacaagacagtgaaggagaaacatatgaagacatagaagcatcnnnnnnnnnnnnnnnnnnnnnnnnnnnnnnnnnnnnnnnnnnnnnnnnnnnnnnnnnnnnnnnnnnnnnnnnnnnnnnnnnnnnnnnnnnnnnnnnnnnnnnnnnntttaaactaacaggccctattcaagtcatccatcttgcaaaagcttgttgtgatgtcaaaggaggaaagaatgaactgagcttcaagcaaggagagcaaattgaaatcatccgcatcacagacaacccagaaggaaaatggttgggcagaacagcaaggggttcatatggctatattaaaacaactgctgtagagattgac

SEQ ID NO: 265966 - DNA, 648 bp, Homo Sapiens
  misc_feature (623)..(623): n is a, c, g, or t
aggagacagcacaatacagcaaagcagctggagggattgccttgtagagtggaagaccttccgcagaacagaacgctctctgtcctgttctgctggagaatgaaaagggatgggtggcctgcgtgaaacctctttatggggcttgtgcgttctgacactgtgaccgccgaggccacagctgcctttgtttcttcctctctgacctccatgaagggctagcgcaaaacttggacagggacggctctatctcttgggtgatattctggaaaagtcagtcttgacttagtcaaaggcatcggtaattcccccaaacagctgagagcagactccatgctgcggttttcttgtaacttgaatcgaggagacttcccacatctttgctatccattgcgcctggctttgtccactcgctgacttcttcatatataagctcattttccacagtaactcagaggcagggcagttcaggagctgtacatgagcagaggcccgggtgcttggaggccggccagcgttggtgggccttcccaggcacgccacggacaccagcaccgcaagggctcttttgtgaaaaatgtctccgccagcacgctctcaaaagcttctctctgaatccgctcatnctgaggagtccagaggatctgggcc

SEQ ID NO: 265967 - DNA, 583 bp, Homo Sapiens
  misc_feature (372)..(372): n is a, c, g, or t
tcaaaagtctatttttatctgtaagaatatacagtagattcatgtgttctattgttacattggattattcctcctactttcacatcagctgttttagaagtgacctttagcaaacattatgttttttattttcaaaaatagcattacagaaatcacattaatatacaacatatcttgaaggtgtacagaaaccaataaagccagtaatatataaagaataatgcaaatagttatgccacatggcaggcaatgactacccataacggccccttccttgttgattctcgatgactagaataaaccagagagacaagacttgtatttttgtctaacaataatgcccaaaaagtactaaattttcttgaaaaaaanaagtgtttttgttttccttttcccatactcctacattatctctcctccaaaattgaatagtagaggatgatctgcagcacttcctcaatttccccacactatccccgccccctaagccccacaaaacactggctggcaccagagccaagatgggtaggtagtttgttaagtgaaaaggaaaattaactggtttccccaagaaaagcaaaat

SEQ ID NO: 265968 - DNA, 1028 bp, Homo Sapiens
agaagaagatggcacaatagaagatgacttgttcttcatcgtccttgtcagccgacggctgcagcgtttgagaacatcaaaactggagtcaaatgatcagaatcacacactctagtagccagataggaccaagtaagtgacgacccattctgccacggagatatcagggagggtccagaggcaatgagtccatctgaggacccccttttctttcagtcaccatgaggtctcgtaaactgcactcttacggctgactgctattcacttgatacacgtggtctgggccatactggttaatttatggacaaaagtctctttctagtttaataccagttgttaaatattagcattgtgaatattgttcctccatgtatcccatattccctgaagctctcttagagggaaagcctgaactctcaaacacagagaattttattcaaagagactgatcatttacctaaagagactgctaaatatttggatcagattaacacatcaggttggacaaaattaaattgtccttctttttgccactgagttaggtggggagacccataatgggggatcagatcaaatgattagatataaacaaactatattatttttgtatgaaatttagtatatttgcagctttgtgacaaattctagtgtatgggaaatggaggcaatctagggattcccatcgccacttaaatctgttagtgagctaagttacacacgggcagggatttctgtgtttgttcactgctgtatctgcagtgcccagaataagtgtctgacaaatggtagatactcgatgggtatttgtggaaagaatcataacaatagcataaaacagacttgcaaagtgctccctaaaaatgccaatacaatttcaacaaaagcagtgtgtcacagagagtcagttgggagccaatcccttggttgaggaagtatttccatatatggctctttttgttgttgctatttttcaaaaattatataatttaaaatcttcaaaaattgtaaaatgtttaacattaaaaagt

SEQ ID NO: 265969 - DNA, 480 bp, Homo Sapiens
aagctagaagcagtatcactaaaaatgctgggcctcatcgtctgttctcttgtctacctatctttctttttctgcatccattcaggcaagaaacctgtgccagggcctggagtaggctcagaggctgttggtgaggcaaaaagcatgttggctttggagcccagctcatctggtttcaaatcctagttctgtcatttaccagctacgtgacattgggcacgtgactcaatctccctgagcctcagtttccctcgtctatagaatacaggcattaatacctacatttcagggttattgtaaaacttaattgaggtgagaaaaatgtatgtaggtgtctggcatatggtacttaataaatggtaaattttaaaatgtctttgcttattttggtagtctgatagcttctaaagatatgtccatgttctaatccccagaacctgtgaatgttaccttaactggaaaatgggttcatctttgagg

SEQ ID NO: 265970 - DNA, 284 bp, Homo Sapiens
  misc_feature (19)..(19): n is a, c, g, or t
  misc_feature (27)..(27): n is a, c, g, or t
ttatatgatatgaaattanttgatttnttttgagaaataatttttaaagtcattttttggagagggtgtggatcccgttgacaatctgaattctatagcttctctcaaaaatgtagatattcaaaactttgtataccagttcaggggttctcatgttaaacagttgtccatggcttctattaagagctctaggtacatatgctctgttgtaaaatattattactctttagtaagtggcctaaggcaagtcatttgagattttaaaacccatttcctcatctcca

SEQ ID NO: 265971 - DNA, 412 bp, Homo Sapiens
  misc_feature (383)..(383): n is a, c, g, or t
caagatatatgtaagtaatctcatatattatacccgcaatcaaaatgagaaatggcacatgagatccaggctctcaagagaaatattatgaaatctcaaggtattgatgaaagtttttcaaggctgatccaaatgggatttagattctgtggcagttgaaatgtgtattattaaactccttaagcaaacccgaatgactaccagtggaggattaagacattctatgtatagcaaagacgaaattctcatgtctgagttttctctcttgaattccctcttgattaggcttctgtaaatatttaacttccatgccatgccataattatttaattaaaagggtaaatataaattattatttcagtgggggcctatggacctttttnacccttaatgtttattatttacttaaggg

SEQ ID NO: 265972 - DNA, 370 bp, Homo Sapiens
  misc_feature (322)..(322): n is a, c, g, or t
  misc_feature (329)..(329): n is a, c, g, or t
  misc_feature (341)..(341): n is a, c, g, or t
  misc_feature (346)..(346): n is a, c, g, or t
tccaaaaaagaagaaaagtatcaagcctcagctcaggacatgattccgaatctgcatctcaacgagactctgggtgatttgtgtgcacagtagtttgagaagctctggggcctaccacatagccctcaacctattgctgttttctaaaattcctacacaaactccgttcctgacagacttgccatgatgggagcagcattgcaggatcactacaggggaatattaataatgagtctttcaaatcaggaaccccactaggacagagccaccaactgggcagttacgttcaggcactaatgggtgacattttcctaggcattcnggggggntaccaagttccntaaanggttaatttggggcacccaggcat

SEQ ID NO: 265973 - DNA, 696 bp, Homo Sapiens
tgaaaccccatctctactaaaaatacagaatcgatctttttaaaaagctccctaagtgtttctaagatccaaaactgagagcctctaagtggactttggacggaagtggggtggaggttgatggtgtaggaactttgggaatttttgactgtagctattttggtggttgtaattgaaggtaaaactgcaccaggggtcaggagacctgcggtaggccccagcaactctgtgacctatctaaactacacaacctcaagggcaggctgtggtacggggctgccccactgagccatctgcagaggtggtatcactcaacgatgaaagactcaacgaaccagcctttaacgacccagtcttttcctatttccaagagcagtctggactctgacagcccctgattcaggtgcaaactaaaaattttaagattggcaagcaacagacactccttaagtggttcctaactctccccaggtgcagaacacttaagggtcccaacatctgattaaaacacagcccacaccaaaccacgagatggcacctcatacacattagggtggctactattaacaagaacaaggatgtggagaaattgaaattgttgttacaccgttggtgggaacataaaatggtgtagctgctgtggaaaatgggacagcagttcccccagaaaaattaaagaattaccatatgatccag

SEQ ID NO: 265974 - DNA, 623 bp, Homo Sapiens
agtttttttaagctgcagaggggtcagccttcagggaatgttgctctcaaagacttgggatgtggtgggaggagccagcagaccctcccctgcctgcccagcccacagctcagcagagccttctttcttgtgctttcccccaacagcgagtgcggttgggcccgggcgctgtatgactttgaggccctggaggatgacgagctggggttccacagcggggaggtggtggaggtcctggatagctccaacccatcctggtggaccggccgcccgcacaacaagctgggcttcttccctgccaactacgtggcacccatgacccgataaactcttcaggggacagaagctttttgtctggagctgcccacaagaaagagggcaaggaaaaaaggctggactccatgactatatatacatacatctatctacatctgcctgtggacacacacaactttttatactagtaatttattggcaattgggctggtaattagttgatgcaaaagggaactcaggtggagaataatattgacccttgcttttttgcccccctcaggggtgtgtggaaggcagtgggggagttgggaggggggcagggaaattaaatggagttttgtcctggc

SEQ ID NO: 265975 - DNA, 409 bp, Homo Sapiens
  misc_feature (180)..(180): n is a, c, g, or t
  misc_feature (366)..(366): n is a, c, g, or t
  misc_feature (392)..(392): n is a, c, g, or t
tgtaaattactagtataaaaagttgtgtgtgtacacaggcagatgtagatagatgtatgtatatatagtcatggagtccagccttttttccttgccctctttcttgtgggcagctccagacaaaaagcttctgtcccctgaagagtttatcgggtcatgggtgccacgtagttggcaggngaagaagcccagcttgttgtgcaggcggccggtccaccagggatgggttggagctatccagggacctccaccacctccccgctgtgggaaccccagctcgtcatcctccaggggcctcaaagtcatacagcgcccgggcccacccgcacttcgctgtttgggggggaagcacagaagaggctcttncttgagcttgtggggcttggggcagngcaaggggaagggtctt

SEQ ID NO: 265976 - DNA, 442 bp, Homo Sapiens
tgtagatagatgtatgtatatatagtcatggagtccagccttttttccttgccctctttcttgtgggcagctccagacaaaaagcttctgtcccctgaagagtttatcgggtcatgggtgccacgtagttggcagggaagaggcccagcttgttgtgcaggcggccggtccaccaggatgggttggagctatccaggacctccaccacctccccgctgtggaaccccagctcgtcatcctccagggcctcaaagtcatacagcgcccgggcccaccgcactcgccctgccgcctggagctgcactgggtctgtgtgtctccgatgcatgagggccgcattcatttcactgcccaagccggtgccacaatgcccatcatttatgtcaaggctgcctcctcggcgttcctagaaacatacaacagaagactggtcaccccactg

SEQ ID NO: 265977 - DNA, 1022 bp, Homo Sapiens
  misc_feature (1001)..(1001): n is a, c, g, or t
ttctctctgctggggaattcccatgcaccagtcaaggaaggcaacacagttcctgtgaacctcctctgtcttacccgtttctttctagagctaagcctgagtgtctctccagaatctgtctccaacagtttatagaattcagtgtttacaacttgcttttcacaaacacccaaagggccaaagagggacccggcttccttctgggtgagtaaaataaggcaggtggcactgaagaagaaaggaatcttggtgataaaggagttctatatgagtggcagagaggccaacctgggtttgcctcttccatccctgctgtgcgaggagccatgtcacttatacaccctgagtcctgaaggcctgacacataaaatcagggtatttacatccctgccccaggtattatgtggaaactgaacgaggttgagggtgcaggcaatgctttaaatagtgacagagggatggcagaagctctagtaggaaaggcagtctcttgcccaggtacctccaaagctacagatgccctgcagagactgagatggccacagggtcacacaggcttctccctgtcacgataggcagaggattctaggcgtgagtcacctgcacagtgaacacctgagtcccatcctagacatccgaattcaaagggttgagcactccccaagatggctgtacagagaagtcaagccctagaattctcctcagtgtcccagacttcagggcttatgctttcatggccctattgtcttgctgtcgttctagggcagtttcatcagctaccagggtttcctgaagaatccagaagattatagtctcagtcatgccacagggtagctgtgcagtcacaagatgggtccttcacctctctggactatagccccacaaaatgatgatgatccctaggagaagtggtatcctgccctcatctttcattctgtaaacatggatgctttaacccacggagggttggggggaaagaaaagaatacttaaaatggaganacttcacataaaaatccgcta

SEQ ID NO: 265978 - DNA, 353 bp, Homo Sapiens
ggggggccagtggccctgtgccctgtagtccctagcctaccccaggaggcctgaggggatacagaggttgcagtgaagctgaagaggtcaggccactgcactcccagctttgcaccctgggctacagagcaagagtctctttttaaaaaaaatcagggagtttcatgaaatgtagttgtgggatgattcaatatttgtataaaactggctcttcctctccactttgttagaacgaactcttgctagacagacacttttggtaatttattcagtggtgtaaatgcacaggccagggctaaactgtgctttatttttgagtataacaccaataataacttctgcagaaaagttag

SEQ ID NO: 265979 - DNA, 972 bp, Homo Sapiens
aaattccctctgggatgctatgagctaatgagtttcttcatgcttatcccatgtgatgttgggaatccagactacagggcaaagtagatactttaactccattttacagataagagtgaggttcagagagatgattgagttagtgaggactgagcctggcctcaaactcgagttgactacaagcacctcttctctgcacagtgttactcatgaaagagacttccctgcaagacctggggccttttacttcaaagggcaaagagacttatttttcctttcatgcctttccatggcccactctttcattctggtttcaggttgccagtctggctggcagtcctctgtcatttggtcggtaacaccctgggtcatatttccacacttaaagatggaggtaattgcttcaagatgtggccctttaaggagagaataggttgaaaggcaaattctttttttcagctttagtcagagcctgagttttggaaaaaggaaatgatgagttgctccgagatataaactttctttcatctcttagaagaagtatttgtccttctgaaaaggttagtggcagttttgtccattgattttttttctaaacctttattacccagtttcatggtccatcacagtaagtaaaacaaaccaccctcccccagaccacctccctccttatttgcacagggaaccttcaaacaattgggagcagaagcagaatgatgcctgtgaagcctttgccccttatcctcagctcgctgcctcccctcaactccctccccatatactgcggtagctgcatgactccagcaggattccaccatgaaggtcaggaagccttcagcagggggcaagcattgcctggcgaggatgtgggtgctccagacagcctggatcagagttgactccagtcttgggtgagaatgagattaagggctccaagaatgttttccttacaggattgacagaataaaggca

SEQ ID NO: 265980 - DNA, 735 bp, Homo Sapiens
  misc_feature (465)..(528): n is a, c, g, or t
atccactgtccaaatggaaaaattattaaacaaatcttttttaaaataaaatgctagctcttgccctaggcttgaaccataaataagtggtgggaagtttatagtcacaaataggtggtgggtattagaaagcaggataaactatcctctcacccttccaagaaactgacagtttcagtttattcctcttgatgaagtaatgctaaatttttgtagtgatgttttggtatattttattacttgtaattaatattactgttcaaaatttagggggaatctgtcatcttcctgaaacttcagaatcacctgggagtaagggtcatttgtattcatggtcactgaccacgtggggtaggaaactgcaagtccatggttccttcaggcaaagttaatagtggtgacacggaggcatcatgatagagcagcagactccagaagccaatttgactttgtgatttctgaaannnnnnnnnnnnnnnnnnnnnnnnnnnnnnnnnnnnnnnnnnnnnnnnnnnnnnnnnnnnnnnngcctgatagaagattcttatgagggaacatgatacgtgaccagtaaatgttaatgctttccttatacgtgaaatgacataaaatcttggaatattaatagatgggaagaagatgtgtaataaaactgtctataaacacaattctgacaaatttcagaactgggattcatagggctttattcagttagattacatgctttacaacaga

SEQ ID NO: 265981 - DNA, 809 bp, Homo Sapiens
gaagtacctttgtcgctagttactgtattactggaaaatgtattcctaggctttaagatttgggaagcgtgtgagtctaacttctcaaacagaatttgacaaggacgtagcagtgttttaaaaagtcagggaaaggaaagaggtgtgttcagcattcctgccccatcttaacatattctttttctcgtcttaacagtggtaatattttatgttattttggtttgatttttgtttgtggcatatggctctgctgtcctgtgactctaagtagaagagaaaatagtgccaataattcttcatggagatgcacctctctcaagtcttgaacaatgtttgaggaaaagtgctttcagctgggctgatgagaacaccttggcactctttcctgcaatgggcactgattgagggtcttcctggtgtggcatcatcaaatccctgttgctcaaacccactaattagctcattcttatctacaagtagcaggggccctaaagctctctgagaagatctcatactgtgtctcctacatttcatcttctataatctcttattcttagagacagaaagatggttaaaagacatcacttcatttctttctctggatttggaaagagttatatattgggattatgctgttagtttacacttgcattgtttaaattagaggaaaggttattttgtgcagaacaaataaaaattactctttaactacctttcagaatatcccaacttttaacataagctgttttgtaaaggctggttgtagtgacttgcttcataatagactattaaaataagatgcattgaaa

SEQ ID NO: 265982 - DNA, 424 bp, Homo Sapiens
  misc_feature (31)..(31): n is a, c, g, or t
gacccctcaatccagtgccccattgccaggnaaagagtgccaaaggtgttcctccatcagccccagctgaaagcacttttccctcaaaacattggttccaagacttgcagagaggtgcatctcccatgaagaattaattggcactattttctcttctacttagagtcacaggacagcagagccatatgccacaaacaaaaatcaaaccaaaataacataaaatattaccactgttaagacgagaaaaagaatatgttaagatggggcaggaatgctgaacacacctctttcctttccctgactttttaaaacactgctacgtccttgtcaaattctgtttgagaagttagactcacacgcttcccaaatcttaaagcctaggaatacattttccagtaatacagtaactagcgacaaaattact

SEQ ID NO: 265983 - DNA, 803 bp, Homo Sapiens
cttggggaataaaaaaaagatgagattcattcacttctgaacccatctgcaaccatccaagcatggcagctgatttctaaggacagaaccaaggagggcagtaaacactcagtattcacccatctttgaggcgtaaaggggagtaaagacttagactgtaggtccagagcagacctcagcaagtaagaacaagtgatgctggccatttggtgtaagcctccacctttgctgatcccaggctctaaatagaatttgattgtggactccatctctctgaatttgctcctgccttcttctgagtgttgaaggatcctgaactatcatctccgtttctccttaaacaacagctccttaagtagcaggctttactcttgcagtttagtgtgatacaagagttggccgatttttagttggcttttgtgcaaatgagtgctatgccccaagctctgaaaggggaaacgtcaccactcacaggtagcagaagggcaggcatttggaaggaagttagtattcagtggggaggagctggagttttatttcttttcttccactcatatgaccctctttctcccctctttcagatgctgtttgtttcataccagtgtatctaatttgcaaaaaatatgtagaacttatgaaaggttgtttagtagatggggggataattggctcactctatggagaaaaaaacaacaaaacttatccctacttaacactgtaaaggaaataggacaaaaaatgtaggcgaatatcatgggagagggatggggaaggatttctcatacaaaacttcaaaagcataa

SEQ ID NO: 265984 - DNA, 748 bp, Homo Sapiens
agcacatctatagctacgagaggtgtgatgcattccaacaaagcccgaggatatgctcattgccaaggaggaggatcaagttttcgacccttgcacaaacctcagtggtttctaataaataaaaagtatcgggaaaattgcctggcagcaaaagcactttttcctgacttctgcctaccagctttatgcctccaaactcagctattgccataccttgctctactaaccattccaatgagaaatcaagctcagatttcttttatccaagatattggaaggctccctctgaagcgacactttggaagattgaaaatggaagccctgactgacagggaacatggaatgatagaccctgacagcggagatgaagcccagcttaatggaggacattctgcagaggaatctctgggtgaacccactcaagccactgtgccggaaacctggtctcttcctttgagtcagaatagtgccagtgaactgcctgctagccagccccagcccttttcagcccaaggagacatggaagaaaacataataatagaagactacgagagtgatgggacatagaagccagcctgctaatcagattgctacttcacagcttcatttttgtttcattcagtggtacttcagcagagttaatatgcttttctgatgaattacacaacagtttgttaattcttcattcttgtaggatttcatcacaagaaacctactcttctgtcatcttgaagtaaatagaagatca

SEQ ID NO: 265985 - DNA, 426 bp, Homo Sapiens
  misc_feature (250)..(250): n is a, c, g, or t
  misc_feature (296)..(296): n is a, c, g, or t
  misc_feature (372)..(372): n is a, c, g, or t
  misc_feature (383)..(383): n is a, c, g, or t
  misc_feature (395)..(395): n is a, c, g, or t
  misc_feature (410)..(410): n is a, c, g, or t
gcacatctatagctacgagaggtgtgatgcattccaacaaagcccgaggatatgctcattgccaaggaggaggatcaagttttcgacccttgcacaaacctcagtggtttctaataaataaaaagtatcgggaaaattgcctggcagcaaaagcactttttcctgacttctgcctaccagctttatgcctccaaactcagctatttgccataccttgctctactaaccattccaatgaggaaatcaagcntcagattttctttttattccaaggatattggggaagggctccctcntggaaggcggacactttggggaaggattggaaaatgggaaggccctggactggacagggggaacatggggattggntaggaccctgnacagcgggaggntggaaggccccagcntttattggggagggac

SEQ ID NO: 265986 - DNA, 616 bp, Homo Sapiens
  misc_feature (451)..(467): n is a, c, g, or t
ggccgcttaattaactgtagttcccatacctcttttgccaatgcattgccaaacagatggggattgtccgaaaaccttggggacaggacagtccaggtaagctgagatgcagcatgagtgtctggattagtccattcaaatgcaaaaatgtattgggtgtccaggtgtaaaggtgtgtgaaagaaaacatcttttaaatttaatactatgaaccaataagcatcttcagggacttgagttattattttataaagattaggaactattgggtgactggaactaatgcctcattaactgccctaagatcctgaacaaatctatattccccgtttggcttattaacaggaaaaatgggggtgttatgttgggactgataggattgcaataatccatacttcattatcaggggatggatgccccttggagccaaaggtctaaaaggatactggannnnnnnnnnnnnnnnncttgagtcagagtcttgctcttgtatccaggctggagtgcggcggcgcaaggctcactgctacctttgcattccggttcaggcgaattttctggcacagccttttgagtagtgggattactgatgacaccaccatgcctagctaatttt

SEQ ID NO: 265987 - DNA, 383 bp, Homo Sapiens
  misc_feature (332)..(332): n is a, c, g, or t
  misc_feature (348)..(348): n is a, c, g, or t
  misc_feature (355)..(355): n is a, c, g, or t
  misc_feature (372)..(372): n is a, c, g, or t
cgcttgagtgggtacagcccagtggaggagggggtacagtcctggttaggtggggacagaggatttctgcttaggcccctcaggacccagggaatgccagggacattttcaagacacagacaaagtcccgtgccctgtttccaatgccaattcatctcagcaatcacaagccaaggtctgaacccttccaccaaaaactgggtgttcaaggcccttacacccttgtcccacccccagcagctcaccatgggcttttaaaacatggtttttttaggattcagggagaaaattcggggcattcccttaaggttccattcttagtttgtgggganttttttccccatttgnacccttnaactgaattaggggganttttgggattt

SEQ ID NO: 265988 - DNA, 412 bp, Homo Sapiens
  misc_feature (18)..(18): n is a, c, g, or t
  misc_feature (28)..(28): n is a, c, g, or t
  misc_feature (45)..(45): n is a, c, g, or t
tccaaaaagaaaatttgncatgcaggtnaaggggcctgttgaagnattgagaactccacttcccaggctgttaattctgttcaaagtcccaggcccactcagctagagaacgggttgttgcagcgagtagttggaggtcagataccactgatcaggctgagtgggagggaatatcaggggacactcacagtgtagagtgtctctgggtacaaagttctcgatgatcatcaacaacaataaactataggaaaaatgtcccacggtgtattttgtaagaaattgccttgggaaagcattctcatgcgttttcaaaatgagtcagatgacaaagacattgcttctttgaatgcttcagtaactgtcttgtgatcacttgcaggcgcatgaggtcgagccttttattaatgttctc

SEQ ID NO: 265989 - DNA, 1008 bp, Homo Sapiens
  misc_feature (600)..(600): n is a, c, g, or t
tacaaacctgagatccttcattcataaagtaacaccgcatagatgcacccaaggagacacagacaatccacctctgtattgcaaccccaaggacaattcaacaataagggccctttttccaagtttgggaacttatgatttagaaaaggcaattctaaacatttccaaagcaatggaacaggaattcagtgccactaaggcaggaccttgggaaggcacaccaatcaaaagttaggcagtttaggcctctggcatcccgaaaggattcatgtcttgggatattaccgaccacccaacggacaaacggcttgtggaactgttggcaaacagtgttgcctctatataaattattcggaagaaataaagtctaatatacagcgtctccacgaagcatccgagaacctgaagaatgtaccgttacttgattggcaaggcatatttgcaaaagtgggagactggttcagatcatggggctatgtgcttttaattgttcttttctgcttattcatctttgttttaatctatgttcgtgtctttcgcaaatctcgcagatcccttaactcccaacctctgaacctagccttatctccacagcaatcnagcacagctccctgtcagtgaaacctccatgtccaagttccaaataggggcaatgaaggggactaacaacccactcaatatggacacaagcctactttgagaatatcctgaacaaacagcagctgcagacaaaaagccttagctaaactttgatgagtaaagcaggtcttacccgagaattcagctgccaaaaccctcctctgagtgttccctcttataagggcacttagcactaggacctcccaaggtattgtaaataagccttatcagaactttttgtagtttcattctgaagccttaagacacacaccataaagctgatctgtaaacccttaccccttgctgttcagagagctactctttgtagtgttcttgcatgcatatataataaatgttttttctattgat

SEQ ID NO: 265990 - DNA, 435 bp, Homo Sapiens
ccaccctggcccaacgtggtgaaacccccgccctcctatttaaaagtaccaaaaatttacacaaaaatttagctgggccgtggtggtgtgtgcctgtggtccctcccactccagccctgggcaacagagcaagactctgtctcaaaaataaataaatgaataaaaacatggtagtatctaggcaggaactttttttaagtcaatgcagcagactacaaagcacagatacaattctctacttgtatgagaacctgggtatgagagcaaaggcatcataaactagaaggcaagtgatagactagttagtaaactgtcttggaataactaaattttccataataagaaaatcaactagatgtaaacaaaaaattaccacatggattaaaggcctgtaagttaaaaaataaaactttcagagaaatacttcataagaat

SEQ ID NO: 265991 - DNA, 434 bp, Homo Sapiens
cagcatgctttatttacacccctgtcaaacgtacatgaaaatatttctctccaaagaaccgttctagagaaccctttcatacaaagtggtgtgtgcacatctaagaggttgctcagacagtttagctcaaaggctaaagagtctggtaaactgagttaccaagtcttgacttttaactgggtaggctaccagcagaaagagaggacttcaagcacagatttctagcagcaaggccagggattaaaaacccatgtgacaatagggcttcagagagagggaacaatccattcataattcaaaggccgtcaagcccgagttgtaaggaacattttgactctgaggaatcttttctttttaccaaggaaatcccttgcagtcaggggttagtgtcctgaattaagaaataaaaggaacaggccgggcgcggtggctca

SEQ ID NO: 265992 - DNA, 714 bp, Homo Sapiens
  misc_feature (431)..(587): n is a, c, g, or t
ctggcactgagcacatcatgtcagcctcacttaattttcacaccagtgccctgaggtttctagaaaagaggaagggccccagtttaggtggcagtacttttcaatttggaggcaggagatcccagttttcctctgacctctctgagcttccgtgtttttacctctaagacagagagaccaatctctgttcagccaccttagaggattgttttgagggtctataagatgattgagggaaagctctgaaactggtaatagttaaatgtatgtttgtgttatgttgatacgagattcctctgagatgctctttagtccagggcaggtttatgggcttcacacagcgttcctaggggtctcattcttctgcacaggcaggcagctcccgagccagccagtctggacccaaatgccacctgtgctcttggctggtnnnnnnnnnnnnnnnnnnnnnnnnnnnnnnnnnnnnnnnnnnnnnnnnnnnnnnnnnnnnnnnnnnnnnnnnnnnnnnnnnnnnnnnnnnnnnnnnnnnnnnnnnnnnnnnnnnnnnnnnnnnnnnnnnnnnnnnnnnnnnnnnnnnnnnnnnnnnntgttactttaagcaaatatttagcagcctaaaatggtggctttaccagtttctgtaatggttgaagtgatgacagaattcagccaatcccacccatagtttttcttgctaataaagcagtttgtttc

SEQ ID NO: 265993 - DNA, 419 bp, Homo Sapiens
  misc_feature (294)..(294): n is a, c, g, or t
  misc_feature (329)..(329): n is a, c, g, or t
  misc_feature (396)..(396): n is a, c, g, or t
ttaggtttgaggctgtggaaatattgtctctggacaggagaaataaaatgccaaccatgagccaatgggaatttctcttccacaatgaaaatattcactacgggaataacagagggtgcgaggaagagaagacatttttcagccaaaaatcaaggacaggaagtattaattatacgcatcaaaacacacttaggaaacaaactgctttattagcaaggaaaaactatggggtggggattggctgaattctgtcatcacttcaacccattacaggaaactgggtaaagccccccnttttagggctgcttaaatattttgctttaaaggtnaccacagcttactttttctgctagggctcttgttctgtgccagggggtcccctgcttaaccattttncatgaggtctcttcacactcgtt

SEQ ID NO: 265994 - DNA, 380 bp, Homo Sapiens
  misc_feature (125)..(125): n is a, c, g, or t
agagcgaaacaccgtctcaaacaaacaaacaaaaaaagatagacaataataggtgttggtgaggctgtggagaaaattggagccctcatacaattgccagtggaaatgtaaaatagtgtagctgnctttggacaaacagtttgaacagttcctcaaaaaagttaaactctgagttaccatatggctcaactacttcattcttaggaggattgaaaacacatgttcccacaaaaacttgttcatagaggtactcatggatatttataatagcagaagtgaaaacaacccaaatgttcatcaactgataaatggataaacaaaatatggtatgtccatacaaagggatattatttagccttgaaagaatttccgggcacggt

SEQ ID NO: 265995 - DNA, 456 bp, Homo Sapiens
  misc_feature (364)..(364): n is a, c, g, or t
  misc_feature (392)..(392): n is a, c, g, or t
  misc_feature (423)..(423): n is a, c, g, or t
  misc_feature (430)..(430): n is a, c, g, or t
  misc_feature (435)..(435): n is a, c, g, or t
agtgatatagacaggataattatagacaatgttcaaattcttggttaattgtaagcttgaaattgttcattttttaaagaggaaatgaaataagtttactccaaataatgatagcttagatgactaactaatgataggtgaaaagcaaggattgatagttaaaatgcctctcttttgttattatcttctttgctctgtacttagaatggacgtacttgttctgatttgaggacttcttcatggtcacatgttctgtttgcaccatgcttagggaaggagcatgtgtaccaatgtgagtgacagtcagatttcttggcatttctttggggtgggttttattttaaggagggactccaatgttacntgtggaattaaaccatggtaattataantccaaaggtgggtggaatttttatcccggtngaggggntattngggggtccaaaaggaggtatt

SEQ ID NO: 265996 - DNA, 581 bp, Homo Sapiens
  misc_feature (210)..(502): n is a, c, g, or t
tgccatcctgagtaaaatttgggtcctgtttctaaaagggaccaatggattttggctgggtcactggtggtctctgccctgtaggagatgtgagtttttagtttaaaaagattattttcaagttgtcaagctctttgccaggggagattccttctggcagcacatcgaaacactggttccctcagcccatgccaatcaagtaccatggannnnnnnnnnnnnnnnnnnnnnnnnnnnnnnnnnnnnnnnnnnnnnnnnnnnnnnnnnnnnnnnnnnnnnnnnnnnnnnnnnnnnnnnnnnnnnnnnnnnnnnnnnnnnnnnnnnnnnnnnnnnnnnnnnnnnnnnnnnnnnnnnnnnnnnnnnnnnnnnnnnnnnnnnnnnnnnnnnnnnnnnnnnnnnnnnnnnnnnnnnnnnnnnnnnnnnnnnnnnnnnnnnnnnnnnnnnnnnnnnnnnnnnnnnnnnnnnnnnnnnnnnnnnnnnnnnnnnnnnnnnnnnnnnnnnnagattgcagaatcaaatccctcctggcctcagagcttatgatcacaggttcaaagctgtgtgatgtcaaacagcccctg

SEQ ID NO: 265997 - DNA, 776 bp, Homo Sapiens
  misc_feature (510)..(510): n is a, c, g, or t
  misc_feature (703)..(703): n is a, c, g, or t
acttgtccaggtcgcgcacctagtaagtggtggagctcggtccagctgactcctagacatgctcatagcagtcatactgtgctaggctctggggatatggcagagaatagaaaggaggaggatctctgtccttcctgagggagacacaaagcgggatggtaaaaattcggattgggggaaactgggttctatgggaagacactggcaggaaccctcaacaagggcttccctagggcttttcctcccataccttcccaaagtatttaatcttctcataaaacataaggtcccggaggttctcatccaggacttctccaggatgtcaaccattatcccatcacctgtggccagagtcgccatagttactgcagcgcatggggggctcagcttaaggcacctccaggtttcctcgctcttccatgcccattcttgtgcctttgccgtgaactgatctttactttttcagccagattttattaagaaatgatttaaggaatttcaagcaggggncatttcccttagcaaccgattgacataagcacaaggcccaaatctgtgctgttaacagggaatggcgttctgtgggctccgatctgcgtctctgaccctcgtaaaccttgtcttctaaaggaggaggctgagagcacatcattgcttttctaagagtccttttgaagagggaaatgtctcaagtgtgccccgntaatagactgatgtgggaggcagttatatttggatgcctttaaaagccacttggaaaacattttccccctctt

SEQ ID NO: 265998 - DNA, 784 bp, Homo Sapiens
cggcctgtggcaccgggttgggcaagcctgctgtgataaccattgctgtagtgcttgtcatctttgtaggaaggcgtgtagtgaggcttacaaattttgaacttgggaatgtctgtctgcctccgtcacatgggagctgagagccatattgaaatggtgctcacgtggtggatagaatagggtcttcaggctacgtgggagtcatagaggctacctgagagagaacaggcttttcttggttcagaaattctaaggtttgagaaggaaagccctacatacagccatctccacactgcacaataggtgagcagttttcagcagacatctccacattggtgttcttattggtctaaatgtacacctggtcagaaatggttttcatggccccagatgttcaggaagagctacatgaactctgttgatgatgtctttttaattgttagacattttggccactgttcctggatcagcattttttgggcagacccattttcttaacaaactgtactctctgaggcagcttggatctatccaggaaagtttccactagttaatttgcatagctcatgttgacattatggagactcaacagtttatctgcagggtgtgaaattggggtattagtcagcaccataaggcagaaaaggtggccagacccactctttggactctggatcctggatttactgaaaccgcagataccctgagcctgaagatgccatgtccagtcctaatacctggttcctggaacccacctccaccactgttgccacttgaacaacat

SEQ ID NO: 265999 - DNA, 706 bp, Homo Sapiens
catttataatagatgtcctactaattccatgcggtcctgacacaccttgaaaaacaggctaagactgagctgagggggatgttgaaagaggcagcactttcaacaaatgtccagctattatataggtcatgttataactgcaggtgtggagcttctgctccagagactgctcctataaatgattttgtaaaacagattacacctactctcttgatttttcaacaattcagattttcatatactgagactgcttaaagcagaagtcttttatgccattctaaagcaagaagatatgctggtcattttgcgtagccttttagtttttaggcatttttaaaatgcttaaaaaattaaataccaacccccaaataactcagtcaactcaattctactgactcaaaaggaaatggtttcagataaagatgcccacatggcttttagttcagccagttctttctaactacaagtaacataataatttcctttgcataggaaagttcttagaatcatcagtcatgaaaacagatgttgggcacagaggtgaagcagcagccagcatcagtaaatttgccattattaaccgcccaccgccaccctcaaccccattcccaccccctgttggaattggattagccttctggtattattttaagagtgattggaatttaattttagttaggaagaactgagtccattgtttacttac

SEQ ID NO: 266000 - DNA, 926 bp, Homo Sapiens
  misc_feature (414)..(414): n is a, c, g, or t
ttggtagaaatacattactagtgagccaatgcaatgcaataatctggttggtaaaagagagtgatgtgattctaggacagagttttagaagtacagcttccaaatacagggggaaatcatttcacttcactccacgttgatcaggcagcggctagaaagtaaagttgaaatcttaaggtcaagacctaagaaggaaagtgagacgctcagaacaaggtgattagaatgaggtgcaggttttcctatgaagtcagggtatattgcagctattgataattaatactttaggatggaaaagattcaataaatcatgttcttccctatgctgtgctgcgatcaatgaattgaaggaaagtggggctggacagggggctggtgggtgggatgatgggagagaaggctcatctgtgcaantggggagctttggccttagttgattgtgaattagaaaaatagcttaaatataacaaattatggcactaatgtaactattctaccatttgtagagattaattacatgttctcaggatgcttcttgacaatactggctttctgccagtggaaacctctacagctccaactccctacgcaatcccttgaagatgagccagatgggtatcactcccctggtcatctctccccttcatgcctttaaagtgaaaacaaactcatgacaaatgctgtcccagacgagcaatcatttcctaagaaagaggtgaagctgataaggaaatagaaagaaacctctctttctatttattttctctagaaagaatgcttactttatgtctagtcaaaggcatgtctaccattaggtttcatttagtgaagctgtgaaatgaagcttattgctttgaagttttaagtgggactgaaagtctctaagtaaaaccttatttggaagaagaggaactctctgtgccgaa

SEQ ID NO: 266001 - DNA, 1043 bp, Homo Sapiens
gaagtactgagtactaatctcctaacttgcttatctttggatgtagacgaacaccaatgaactgagcaaattgtatgtgctctgttttttcttttccaaaggaattggttatctgtcttgtatttggggatatgtatgtatacttactatcaaatgaagaagataataaaataattcattgagtttcatgttaagaaagagtgtgagaaaagaagagagcagtaccataaatgtcagattaaaagaattaggtagctacctctccaggagaaaaaaatatggctaaatgctatctctacagcagaaacaaaaattaatttttgtttcagtgatgtttttgttttagatacttttatagcatgtgttgtagaatcacaaaattgagccctcgatatatataggaagtgtattcggtctagaataattaacttctccaaagtcacttagataataagggagctacaaattataacccagaattcaagattcctagaatagtattgtttcttccattttaaataaagttctgcagggacttaatgattctgcaaatgtacctcagaagctgtctttatttgttttaattattggagttccacgtttgaaaaaagaaaggttgaaaactttttgtactatatggatagtctatttttagacatgatttttgttttacgtactttcaggtcccaatcccaccttagagaaccatatctcttgttttattttagtgaggaaagaaatatacttttgctaaaatttactttatttcatgcgtttcttgaacatagtaaatgaggaattgcttttttgtgtgtttttgtagggtctcgtatagtgatatactagatcttagcaaggtaccaaaaatagctgcctcctgctgaaaagctttgtgaccacaaacaaagttgtgaactttgtcagacacagtgccagctacttggaaggctgaggcaggaagatcacttgagcccgggagttcaaggctacagtgaacctatgatattgccaccatactccagcctgggcaacagagcatgacc

SEQ ID NO: 266002 - DNA, 761 bp, Homo Sapiens
  misc_feature (16)..(16): n is a, c, g, or t
atttgcaaaaaagtgncaagttccctgccggccctggcattcaaggaatggtgctgctctgaaatcttccaggcagctgccaggtgacataagggcctgccctcctccttggtccccagctcctgtgtgctacccagaaaacaagagagaattagggctcagacacacacagacaaccccagacccaatcagggacacacccaggtttgggtctgatcttaacatttttccttagattatcccataaagaacaaaatacaagcgctgaaaagaagtcgtactcagcagggtaagtatgcacacaaattggctccaatttcaaccgaatggctgaagcaaaactcatccttctaaattctaccaatgtgatcaaaatcaatcacaagtgtttttaaaagataatggccctgcaatcccaacaggctatggtttgcaacagtccccgtgaccttatgtcctaagcgcagagtgctcagaattactgtccaatccagagagaaatggcgggagaaggtgttaggaaatggtgaatgagccagggttttcaagggcacgggactcaccatcaggaatgaatacccgatccagaggctcctccaggtctgcggacatggggggatggactggtcctggctgtgcaccgccaccgcctgggccggggcctcgcataccgcacagcggctgacataggggcggatcgcctcttcagagagtggcatcatggggaggggcgcagcgctggccagccagtaggatctgtc

SEQ ID NO: 266003 - DNA, 724 bp, Homo Sapiens
atcaataggcacattccaatgagcaaaccccaggaatccacctgttctcatcttgccaacaatgctccttccacggaaactgaccctgtcctatttcctcgctttgatcattgcccagaaggaacagggactgttgagaaacagaggcagcgtgcagcctgaaggcatgcaccgtgcagaagaggatccctgcggctgcgggctcttttccaggcccaaggacaaggcggtgtgtgccgggttgatctgcactgctttagccagggatggttctttcttagagagacaaaccgctccaacgccaaacttgccctcgcaattccaatcgcaaaggcaggctagggccacagttcaaacccaactgccaatgtccacaaagaaaagaagaaagctggaaatgcagttggtcttgccatgctggccgctcagcttctcacccccaggcctaagaaggacaaggtgaggatgagttccatttacagagtcctcaccaggtgccagtcacgatctcaatgtctcacagctgccatcccgccaggctcccaggaggaaggtgctgctatttattatccacaggacagaccccacagctggcaagtggctgggccaggaaccagctagggcaggtttgtcccatactctctacccatgagcacgaggctgtgctgttcatgtctccattcaaacacaggctgatatttccactccaggggaaaaaaggtag

SEQ ID NO: 266004 - DNA, 893 bp, Homo Sapiens
  misc_feature (860)..(860): n is a, c, g, or t
  misc_feature (876)..(876): n is a, c, g, or t
ccttaagaaagaagcagctaatcttcccccagaggatgatgaccagtggttagatctctcaccagatcagctggaccagctgctgcaggaagctgttggcaaaaaagaatccgagtctgtttccaaggaggagaaggagcagaactatgacttaactgaagtctcagagagcatgaaagctttcatatccaaagtctcaacccacaagggagcagagctgcctcgagaaccttctgaggctccaatcacttttgatgcagattcttttcttaattattttgataagattttagggccaaggctaatgagtcagattctgatgatctggatgatgaagactttgaatgtttagatagtgatgatgacttggactttgaaacacacgaacctggcgaagaggcttccctgaaaggaacacttgataatctcaagtcatacatggcccagatggaccaggaactagcacacacctgcatcagcaaaagtttcaccactaggaaccaagtggaacctgtatcccagactaccgataacaattcagatgaggaagattctggtacgggagaatctgttatggcaccagtagatgtagacctgaacctggtttcaaatatattggaatcctatagctcccaagctggactggcaggacctgcttccaatcttttacaaagcatgggagtgcagctgcctgacaacaccgatcacagaccaacaagtaagccaacaaaaaattaaccagcacatttagcttctcttttttctttttaaataaatattgaatatgattctggtcatttctagtttagattactcatttaggtaaaaatggtttccttccattacaaggtttttcaganttgacttctccatcgnggccccaaatgtgggcc

SEQ ID NO: 266005 - DNA, 746 bp, Homo Sapiens
ctgattttctagctgtaaaagtagacagcaattcacctagttttgtaaacagctattataggtctatatataatgctttcttctattttcagtggtgatctctgaatgaacttaatttctaaagaagctaaaataaagggaaagccttgaaagtttcctaggtaggatagcaatcatttataaagctcttattactcccttgccccaccctaccgctagaggcaggtagtaagggaaggggcggcctgatcctcactcacaagcacaagagggattaaacaaggcaggaaccacaaattccaaggtctcgtggcctgggaagggcaaaaccaatgaggggagcaggcccagcctggcccttggcaagctggtctcctgtcttaagaagcagctgttactaagctctagctattatcacacaagaatttacaagtggcattgctggatcttctagtttttcaagagatagggaatgtggatttatttctaaagcctcccaacttttaaacgttgacatttaaatctaaaattttaaaataatttgtgtgccaaagaaagcatatccacaagccaggattgaaatctgtttatctttttcccattcattattaacgaggtgacctggggcaagagccttaaattttccacaactttcttacggatcagttttctcatctgtaaaatatggataataatatttaacttaaaaaaattctttagaacatgtggaaaaaataatcaaaaaa

SEQ ID NO: 266006 - DNA, 709 bp, Homo Sapiens
attaccaactaaggcttcctgccaaaagccagagaggaagtaaagtctcctgacaatagccatcctcccaccccaaagaggccttcagatgacttcagccttgccaacatcttgcctacaatgttatgagaatccctgagccagaacaactctgctaagtggctcctaaatttctgatgcacaaaactatgtgagataatagataaatgttcattgttttaagctgctaagtttaggggtagtttgttatacagcaatagataaaaaatttaagtatctctcaattattaaatttctcacattgtttgcacctcaacttttttcctttcccaacattcatcagaatcttgaggagcaaggcagctattaattagaaaaggtatctccacatgatcgtcacaccctcccctgattggacagtcaccccataaagaacataattagcctgaaaataaatgaggtgcccctttagatgttaagtacagtaagaaagagaggcactgacaaacttagcactattacttactggtttgacttatttaaacctcagggggattccctctactctctcttttatatttgccctgtggaaaggctttcattgggagcagggcaagagccctaaccagaatttttatgaaaacctaataaccctaaagtacctaattacatatcagacaaattttcaaaactttgttagacagtgagt

SEQ ID NO: 266007 - DNA, 968 bp, Homo Sapiens
  misc_feature (62)..(108): n is a, c, g, or t
aattcggcacgagcggcacgaggggatttgtatttataaatcacttcccttttagggatgannnnnnnnnnnnnnnnnnnnnnnnnnnnnnnnnnnnnnnnnnnnnnnaccctcaagtgtactttgctcaatttagacgtccagtatttccagaaacaatgaaaaaagtaagatgttttcttctttatgattctgctcaaaacaccacgtgccgcctcagagctttttctagagcctcggtcctcaatgacgcgcttgacctgttgatgcctcagcccagcgaagcccctcacctgtgccccgggcgacagctcttcagtgtgcagtgcaggcctggggtggactgccaggccttcgctctgtgccagcaacgccgttcttgttgctcctccatgaacaggggtacaagccctggcccctcctcgacactaagccccccacagactcagcctccaaggaaccgctgagcacccttgaagcatgtcattgtcagtgataccttttaattctatggaactctaacctattcgtgtcatattgaccttttgctgcatgagtcataaattatgaaatcagtcttacagtttttgaaatgtagccagcatttgtaaggctaaacctttttcatgaactgaatttaagtgaataaccaagccacagttcctcctcaaatggagagtgatgatcgacatttgaatctctttgccctttccaacggctatggcatcaggttctaaaataagctcggaatttttccctgttattttaataatatggaaatattagcatagtgtttcttttgatagtgatagactataatccatatttaaattttatagagaagaaattttattgtactgtgatgtagatatttattatccaggtaaggatttgcccggtgtgtattttttacaattgagacattttactttaatctttaaaaaaaatgcattaaaaacacactcaaa

SEQ ID NO: 266008 - DNA, 412 bp, Homo Sapiens
ttgtaaccccctgttccatggaaggaaccaaacaaaaaacgccgtttgctggcaacaaaaccgaaagccctggcaatcccacccccaggccctgcactgccacactgaaagaactgtcgcccggggccacaggtgaaggggcttcgctgggctgaggcatcaacaggtcaagcgcgtcattgaggaccgaggctctagaaaaagctctgaggcggcacgtggtgttttgagcagaatcataaagaagaaaacatcttacttttttcattgtttctggaaatactggacgtctaaattgagcaaagtacacttgagggtcacacacgcacgcgcatacactcacacgcacacacgccccacaccgctcatccctaaaagggaagtgatttataaatacaaatcccctcgtgcc

SEQ ID NO: 266009 - DNA, 848 bp, Homo Sapiens
  misc_feature (27)..(27): n is a, c, g, or t
  misc_feature (168)..(215): n is a, c, g, or t
  misc_feature (455)..(455): n is a, c, g, or t
catagtggtctttagtagcacatgagnaaagactatccccagtgatgtgcttatgatgttgtgttctcattgtagcctagggcttttcctcgcctcctctgtttccttttccctagagccctgtgtcagcggcaatgaatgcttaagtatgctctgtcaggaaaactnnnnnnnnnnnnnnnnnnnnnnnnnnnnnnnnnnnnnnnnnnnnnnnnaaatagcaaagcaataatgacaggagctgcctccttcacaagcctatgagttgtgactaagaaaagggattgtaaaacactctgaacatcttaaatactacggacaaatctaacaatgttaatcactcaccagctcatgcccagtggtcatcaccagacccttaaaatccagtggctttctaggagtcctaggtccacttcctgctgtaaatgccaacaattttcaccagcattagatgncttgtttataagaaaactgtggattttctgaaataaatgtgaggtcgatcaatgctataacaaagtgcttttcccgtggttaagctgaggttatgagtgctttagtgtggctccattgaccagcactaacttcatgaaaatatttagaaaaagtttttgaaaacatatttttttaaggagaagaaaacagatttggcataagttatatgacagccacagtgaggctttcttatatatgaaagacattgacaatcagtcccatggggtttatgtaatttgagaatatagctttaaaaatcatattacaggcagcagtacttaagattaatacagaggccatttacctttttattacgtgttttattagcacttagcagcttgacttatgaaaga

SEQ ID NO: 266010 - DNA, 772 bp, Homo Sapiens
atgagcaccacacctggccaacctttcaatttgaagcaacatttgagaaattctccaacttgtaagctcatgtgcaagtattccaaatggccttaaaatcacccttatttagcagctttggcagtaaattagaaagaacatggagcctagagtcagaaaacctagattcaatttcttctgctacttactatctgtgtaacccttataccagtcactgcatctccatctggtcttgggtatattacatggaaataacaaaaccaaccctaacctgcctcatagggttgttatggaaataattcaagaatacttgaaaaggggctctgtaaattaaaatgtcaccattacagtaacattttattaaatcagcctggctctaattcagaatggggggaatgttggtggtctagcccaatgtggctttggttttcacgttatctgtaaggagatcatcgcctccttacacatgacagacagtgataggcattggaacacacagataagcagtagcttcctgttccacggcaaaattataagattggatgtgcaagatcaggggaacctgtctactgtatgagtactgcttctacaggactagagtctcagctatcagtaaagcaaagctgacaatattcctactggaagttagcttggttatgagcagttaatgccagtcatacagtaaaatcaatctgaagaagttttctccagactaggaatattaaaggatttttttacactggtatttaaatttctaaaaaatactatattt

SEQ ID NO: 266011 - DNA, 486 bp, Homo Sapiens
gtgtgagctgccacacccagtctttaccagatgtttttttaagttaatataaattgcaggatttgattaaaatattctgatacaatagtcaaactcatattattttatgcataatctgaaaaataccagatgtaattgacagtaattttttaaaatgtaaacatttcctttcctttgtgtaggttatggttattgttaactaaaaacagtccatgtataagacaagtaagtatgattcccatccctttccgtgtagtcatcaagaatgaccataagccaaaagttaaaattacattcttgatttgtttaaaaatgcaaagcagatattgagaagccatcaactgtgcctgacgtattttctaaattatttttgttaatcaattacatcaacatgatttcacagagacctaaagatgccacatagagtagtatggcatatagactcctcagctgaaagtttctatcacggccaggcgcgatggctca

SEQ ID NO: 266012 - DNA, 614 bp, Homo Sapiens
  misc_feature (142)..(142): n is a, c, g, or t
  misc_feature (362)..(362): n is a, c, g, or t
ccacagcaacacccgaaggccaacctctacagtgggtaacttgttctgaatgcctgtgctggctacgaggaaaatgactggagagaggagccaggaaaagcccagctgcacacattaccatgaatctcctcagacagctttntaagtgaggagctggggtatctgaattgcccctaggaggctcgttaagttctaagaaggtgagcaaaattgatttaatatattgtttgtgttagctagcatatttgtttaaggttaaatttacataataataaagttgtatttttatgtgcgttttgtgtatttttatagtacagtgggggttccttatagaattagtgtgcactggacattcgtggccnttttataggatttaagagcagtattttacattttaaatgattactgtgaattcagttgttatttttatttttcctgctgcattgctggtaatatctaggtttatctgatgctgagtttatagtcagaattgtatcccaggatggtgaggccggcgatgtggagagttcagcctggtttacatacggttcaccctgggttgggggttgccataacagtttcatcaatagtgggtgctctccctccttaaaatg

SEQ ID NO: 266013 - DNA, 505 bp, Homo Sapiens
  misc_feature (429)..(441): n is a, c, g, or t
  misc_feature (473)..(473): n is a, c, g, or t
ccagacagaagatacttttactacaaacttgtgttcatagcttatatatctgatatacaagtaaagtgaaacagcaatcaacagagtaaacacatttttgacctgaggtatcaacccatggaccttccatggattatcgattttcaaaaacgtagaatgcattagaattgcactcaacactaaactatgctgaaaagactataatgtataatggaacattagggccttgcagccatctcaggtaggttgtcattgtgaacatcagtcattgtttaatagaactgtggaaatgctgaagttagtttaatcgaattctgaataataaagtttaccattattacctcaggtagtcttgaagtagcttagaaacaaaaaccaaacctaataacatttaaggttagagcagaaaaacattcagtctacctgaannnnnnnnnnnnnaatgacaactttttggttaggatttttgtttnagaaaaataagaatgttataaaaataagagag

SEQ ID NO: 266014 - DNA, 520 bp, Homo Sapiens
aagtcctttaaaatgttagggtagtgtcttaggaaatcagggatttccaaaggcaggacttcacgttgccaacatgagtgtgagaaggattcctttcagtgtagaaggtgcttgcctgctctgtgcttccagaaatccccgagacttaataaggcacctggctccgtcactgatcaaagaatgggtaccacaacttactgtccactgcaaagctccatggcacctagctctagccagtttgttcacagccgtgattaaggtgcccacagcatcctcaccagcctcaggaacgtggcacagtcagctcgccacaggggtgaccccaggaaacaagagacaggactgttacagggacaacacgtgggacgccaaaaaccagaaacaagagacaggaatattgtaacagggacaaagtccagaccacacggaaggttggatgactcatttgtcacaggtggaaacagtttatctgcgagtttgaaaccaggtggatcaagaatgaaaggcgccgccaggcgcg

SEQ ID NO: 266015 - DNA, 452 bp, Homo Sapiens
tgtgacaaatgagtcatccatcttccatgtgggtgtcgactttgtccctgttataatattcctgtctcttgttctggtttttggcgtcccgcacattgtccctgttacagtcgtgtctcttgtttctggggtcacccctgtggtgagttgactgtgccctgttcctgaggctggtgaggatgctgtggacaccttaatcacggctgtgaacaaactggctaaagctaggcaccatggagctttgcagtggatgctaagtcgtggtacccattctttgatcagtgacggagccaggtgtcttattaagtctcggggatttgtggaagcccagagcaggcatgcaccttctacattgaaaggaatccttttgacactcaacgttggtgtcgtgaagtcctgcctctggaaatccctgatttcctaagacactaataaaacattttaaaagagtt

SEQ ID NO: 266016 - DNA, 755 bp, Homo Sapiens
  misc_feature (17)..(17): n is a, c, g, or t
  misc_feature (720)..(720): n is a, c, g, or t
  misc_feature (731)..(731): n is a, c, g, or t
agacctttatcgatatnagtgaacccccatgtttaaaatattagaatgtttagagataaaatagagataatagagataaaagaagaggagggcttctatcaatgctgtaaacagtctgataagcgactgtggttattcccctaaagtttacttcagcactaacactagtgcttccgctggagtttgcagttttccagctttatacaggattttcctttgactggaagagtcaaggatatagagactcaacagtgacatttattgtacaacatcaaggggaataggatactcatcaaactgggattattcttatcaaaacatggtcttctttgaataagaaaaatacatagttggttattatggacttaaaactgtgttaaatggatattctgataaaatatttgctgctctgtagagtgtggaaaatctgagaatattagctttactcatcttgagctttgaggatgttctctgtacgccgatggtttcatattaactaaaaaagctgggtattgtaaaatctcatttataaaaactcagatgagaagaaaattttctttgatggtgagactgttgtcttagttcaggaaattatttaataatcctttgttacctgtgaatgaaggaactttgtaattctgatttatcgtaaaacatgagcctttccagagtcagcttaggacactgtttgtcgcaaataggccatgcttttgccttttngcccaagggtnggcccagagggaggggcctaggtt

SEQ ID NO: 266017 - DNA, 834 bp, Homo Sapiens
tatatagcctaattcctttcatgtgctttcctgccttagggatttttcaccaggccaaaatcataagcatctttaaccacctgagcccataagagaagtgaaaaggagagcgcaaggctgatggcaggagcattggcccctggatgcaaaaggggagtgaggtctgtaaggagcaaggaacgctctacctcctcgacacccacacagctacttctgaggttctgccctctgaatactccctatgggggtttaaagcataaatgcctcctcacagggtcacggcgcagtctctttcttgtgttactccttctccaggcttctccgtggctcctccctcctcccttctcggtgagcagcacaccagctgccagccccacccactgcagcacctgctttcacctcctgacgtcacgggcatctggggaagttcaccatcaaaagtccctagtggggctgttttaaaaatagggagctgtccttaaaccaaactgtaaagttgaagtatcttatctttggaagcttcatctcccatttctgggtccacctatttattgcttccatggctttctattacattccttgagggctttgtgcctctccctccttttctgttgaaaaaatttgctttcaacaatagaaaatagcaacttaaataatcaaaaacaagggatgatttaatattttggtaaattaatgaggatactattaaggttgttgaataaatttcaatgacaggaaaggatattgtaatgcattttgggggaaaattcagattttcaaacctatatcctaatgctgggtgttgttatagctggatggtaagattgtgggtaa

SEQ ID NO: 266018 - DNA, 525 bp, Homo Sapiens
  misc_feature (441)..(441): n is a, c, g, or t
  misc_feature (450)..(450): n is a, c, g, or t
  misc_feature (502)..(502): n is a, c, g, or t
ttacccacaatcttaccatccagctataacaacacccagcattaggatataggtttgaaaatctgaattttcccccaaaatgcattacaatatcctttcctgtcattgaaatttattcaacaaccttaatagtatcctcattaatttaccaaaatattaaatcatcccttgtttttgattatttaagttgctattttctattgttgaaagcaaattttttcaacagaaaaggagggagaggcacaaagccctcaaggaatgtaataggaaagccatgggaaggcaattaaataggtgggacccaggaaatggggaggatggaaggcttccaaaggttaaggatactttcaactttaacagttttgggttttaagggacaggcttcctatttttttaaaacaggccccactaggggacttttggatgggtggaactttcccngatggcccntggacgtcgggagggtggaggcggtgctgcagtggggtgggggctgggcgcngggtgtgctgctcaccgggatgg

SEQ ID NO: 266019 - DNA, 437 bp, Homo Sapiens
  misc_feature (54)..(93): n is a, c, g, or t
agcaggaaaaaacccagatgctccttcctgcttctgatttctccgctcctattnnnnnnnnnnnnnnnnnnnnnnnnnnnnnnnnnnnnnnnngcacccgcctctgattcctgcgggaaatggcagtgcctttggtcgcgctgtgtgttcttggcctgagtctcgttgccaccttaggacgtggcgatggtgagaggccaccccagccacgcacagtctcggagggagggtgggaaacggtctcgagtggtggtcagtagataatgggtggtctggcagcctttaggtaaccgaagtcggcccctcagtcacccatgcactgatcattgcttcactaacacttattttaagacttgttgtttcttggttatcaaattaaccagttatggcagaacagggtttatgaagggcaaggccagggaaggagattttaggaa

SEQ ID NO: 266020 - DNA, 482 bp, Homo Sapiens
  misc_feature (146)..(146): n is a, c, g, or t
  misc_feature (267)..(291): n is a, c, g, or t
ggaatcttagtttaacagttttgggttacagctccagggatgggggtgggaatgattgactatgcatttgatatgtgtcttattaatcataaggttctttcccccatagcaaagtacatataaatgcaaagctttagtgccttagnctgactgtaataggacatccttcataaaaggaataaacttaacacctcagcccaataagccagagaatcttacgccgcacaagtgtgcagttttaatgtgttgctcaggctatagtattannnnnnnnnnnnnnnnnnnnnnnnnataccatgcatttatttccctctgaattaatcacaggtattttctttaacataagctattttaagtataaactttattcctgaatatcttcagatactttctgctagttcaaataaactcacacagacattaatccaatttgaataactacatatgaatgaggctacagtattattcaatccagagtgtgt

SEQ ID NO: 266021 - DNA, 633 bp, Homo Sapiens
atttggtgagctgcaatcccctcttccctaagcatggcctatgctgaggcttagatctccaggagtcccacagcttcccagggacctgctggtccactgtgcttaccaaagtcagagtgggttgtagggaacattttggggtgatctgggggtgtggtgactcaaaggcacattctcaagcagagcagtggccaccacagctgcacaagcagtatggtacctgtcatcttagttcaggtgtacagggagtgcagacatgcctgtgcaatctggcttcccagttctttgtcctctggaactccccaaatcattattgatagtgttgctgtgggtcacaagagcagaagtgtttctcaacagtttggcagtcagccaactgttgcaggggtgaagacagcagagatgtttttctgtctaccccttccgtgaggctctgagttcctcaggggttcatccctgccagactcttgctgctttccttttctgcaacccaacttctttctgtgggcactctaatgggtcctggcccacttccctcagttttccatgcataacttgtccattcaccagtaactgtgatcttctttctgaggagaactgacatccaatgtccctagttagacatcctgaaaa

SEQ ID NO: 266022 - DNA, 796 bp, Homo Sapiens
  misc_feature (560)..(659): n is a, c, g, or t
accaaacactgtggtccacagagcagcaggaaactcaacatagtttcagctatgtcctaagaatgtcacatggattactgacacaaccactgattttgtctcttctaaggtcagatctaaacattaaggcaagagttggaaaggaaagaggctgaccatccaggatcctaagcagaaacccacagagaagcctgttggggagttagaacagagagagtaactcgccaagggctttctcttgcccaaggagtgactcacccttcaggacaagccaagggacctccctgtccatcattaactgccatctatgagacagaaacatatccaacctttaaggcccttctgaacatatacagaattttgtcttcagctgattttctcgaattcttagttggtttcaacaattagttaatttcctatttgaggggaataaaattaataatttacagaaagatattctcattggttttccaggatccatatttatggcctttaaaatttagtaacagaaatattagatttttatatacagagagagagacagggtcaccctctgtcannnnnnnnnnnnnnnnnnnnnnnnnnnnnnnnnnnnnnnnnnnnnnnnnnnnnnnnnnnnnnnnnnnnnnnnnnnnnnnnnnnnnnnnnnnnnnnnnnnntgagcccctgcaccgggacagattattttttttaagcctagaggaatccagtaagtttgagttttggttaaggatgcctttgcactcagggagctgaaggtagattgttgtccagttctgatctattttccttaaaa

SEQ ID NO: 266023 - DNA, 692 bp, Homo Sapiens
  misc_feature (461)..(469): n is a, c, g, or t
  misc_feature (679)..(679): n is a, c, g, or t
ttttgttccatggggtcgtctttatccccaaaccacatctgtcttgagtttctctcagattagtcaggtggatcagtgctccccagggcctgctccagctgaagtattttaatttgactaaacacctgatttattttatctctccgatgagaaaggcagtttgtcttaatagagcctgtcagcccacagccccattcacagcaatttacaggcagccagggacgctggaagagaagagtgccgtgattctgtattttatcctcctccagaaagcacctaaaagcagctattcactgctactgcatgtggcattttagaactgaattagctttttattcaagtaactacacttgttgtgaatagcttatctgtaaaattgctacattcactactgattttattaacctttggctctatcacaaaatggtcttcagttaggaaaacctttaaaattgacacannnnnnnnncttaggggcctttattccagtgacttcagatttactgaatttgatccattgaattctttaccagttgtacttaaaattttgagtctcaataggaagtcaataatgcgtaaataaggaaacacttttcaaaatataaatatgatgacaatttcccccatcaaaagttttcaaataccatctttcattataacagtttcaaaatcagccctnctagagagtcaag

SEQ ID NO: 266024 - DNA, 716 bp, Homo Sapiens
ccaggcccagcttccaaagcagcctccaccctcttgcccagctccagcgacagttttcatgccctgccccctcaacgacctttcccttctcccgccgggtccccacccactgtccagaacccacccagacagggttgaaggcccacacacggttgttcttcagcactcgaggctgacacaggtgagtggtttttttctcttcctgcttcaaacctggctttcgcagcaccccagcaccaattccagccacaccaggaatctgcatgctttgggatattgaaatcccccacgtgagtttgtgcagttgtcaggaagtcccaacttctccatgggaagcaggcaggctggtggctttgcagcttttgtatcgttttataaaatgatacaaaagatcttgtatgagccggtatgacacatctgacaactttacaggtaatattggagtattatatataaggcagttgatttgcaggactgctatgagagtttgggaacgtaaatacctatccagccaaaacgttcccattgtagaccagaaattcccgacccaagatcctcaatgggataacgacacagtccactaaaaattcatgaaagatataagggaaatgataattaaaggaattcaggagtcagtgccctgtgctcagaatcttccccgagcattttagataaaacagaaaaaagatgaaagccctaaaaactttctaaaaaga

SEQ ID NO: 266025 - DNA, 1023 bp, Homo Sapiens
  misc_feature (911)..(911): n is a, c, g, or t
  misc_feature (978)..(978): n is a, c, g, or t
  misc_feature (985)..(985): n is a, c, g, or t
  misc_feature (995)..(995): n is a, c, g, or t
ttagcagagaccgtttacagtactactcagcaaatccactcctctaagactccagcggctggaattgggtggggggcttcatacacatgagataatatgcagattttgcccttgacaaagtcaagtccacatggtgacttttgaaaagaggtgtgcaagagagggatgcatggagatagccccacaggaggtggtctgggactctcttgattaagatctcagtggttaagattcctaataatcattggattctgagagctgtgcatcagctagaatgacaggtttgggacccctggtggttcactcttggagcctgcagagctggcgggctgggtgtggtctccactggggatttgggcccctgccagatccccctgggagactaaccccaccacaccctccctctactgggagcctacccacccccaggacccctgagtaaaaaagctgtgtgctctccaagcccagttcagcttggggacaggggcaggaggaaggggtaggattactaggtgcccagaatgaggctgctttccaaagccaatgtgaacagcggctggacttggaggtagctttgaggtggaagagggctgcaaatccttgtgggaaaagaaatctatgattccaggtggcatcagtgtctttccactcctcctagccacccaccacactgatccagccctgagttcctagccaccgcctcctacagcccacctggcttttctttctaccaaatgagggtcttggttccagcctgccactcaggcccaaagccttcgacacagagtgggactgttccctgaggtggggagatgtgggaaaagccaagaggttgcagccagggccactggcccctggagattttcttgcagggaaatgggctgtgggagtgtgggcagttttgggcaaantcttcccaccacacgttaatggaaatttgggttttggcttcagtgttttgggcttgcaggagcattngggggcntggggccagncaggttcccccagtttttgggttatttg

SEQ ID NO: 266026 - DNA, 1069 bp, Homo Sapiens
  misc_feature (447)..(697): n is a, c, g, or t
ctaaaaaattctggtccctaaatttcaggactagcacactatacgacacatctgcaaaccattcacaagttttcagactgttttgctcaataggtacacaaatagtaacgactcttttaaacagttgaaaattcagttacgtagtaaaggcaaaatacaattttaagttaattgtgatagctaccactcagaaaaagcaaaattgtatgtagattaaacaaacaaacaaaaacatcagattgctaaatataccaaactgcaaggattcgggagtttaggggctgtaatgatgggcttatttcctatttgctttctacgagtgcttataatgcaggaatacataccactttataggaaaccatacacttacaaccctaacaaggaaccaaagtaaggatttgtaggtctttatcaataattttctggccaggcgcagtggctcactcnnnnnnnnnnnnnnnnnnnnnnnnnnnnnnnnnnnnnnnnnnnnnnnnnnnnnnnnnnnnnnnnnnnnnnnnnnnnnnnnnnnnnnnnnnnnnnnnnnnnnnnnnnnnnnnnnnnnnnnnnnnnnnnnnnnnnnnnnnnnnnnnnnnnnnnnnnnnnnnnnnnnnnnnnnnnnnnnnnnnnnnnnnnnnnnnnnnnnnnnnnnnnnnnnnnnnnnnnnnnnnnnnnnnnnnnnnnnnnnnnnnnnnnnnnntccatctcaataataataattattattttctaagaagtctagattattccctctatgtggggaaaattgttggcttctaatgtgctacaatagttgtgctacaatagttgtgcatgccccaaagtttttaacgacttacttggtaaacatataccgtgcacattttcagatacatacaagaaccatgctcatgtgcatacatgcctggctcttggtcataattcctgcaactctattcaaggtgagtttcatgccttgtgcctccttaacaatgtaacttagcagtaactttataagttgaccacaagcattctgaaagctgtctccaatggatacgtattcaacaaacattttatttcttaaattaatttg

SEQ ID NO: 266027 - DNA, 1084 bp, Homo Sapiens
  misc_feature (12)..(12): n is a, c, g, or t
  misc_feature (374)..(374): n is a, c, g, or t
cttcaaactgtncttttcttacatttattctattggcagaactttacttctaaacacactccagctctatcggtaatatttctctccacctccactactgtcaccctggcatgactcacttcctcctgcggtacttcaggggtctctttccagtctccctgctgtagtccacttggaaaccctgcatggcataggacaagagttcaacagagagttgtggaattaatgagtgatttacgcacgttgagaagatagggagtttgggatctgtgcatttaatacagatgttcatgggaatgtccaagagtaaaaatttgagaaggaaattgaaagagtttcaggccagatatatctataggaaattcattagcatnaaatatggatagttgaggacaaaagaatgggtaaggtcatttaatgaaaaagttaagaacaagaagcctgaaaactcatattgagactaagtaaggctaaaccacatatgaaaatgaggtagaagaaatttagtgggtaagagcaatccagatgaaaccatctgggatacctgagaaaaactcccacagtgagacttcataactgaagatagaatttcgggtgaaggtgggaaagtttcctctctaggaaaaggtagcatttgctggagtgagtgcagctgcaagtagtagtggacagctaaagattatacctcaagggttctggaaggttctcgcatgggctaaaaatgtacctctggtggagccgaagcccacatgggatgccacatgggatctgggcaaggaaaatgaatcagggctgacggcccagtactggtttcagccatgtcaatctgtggttagactagttacttacattgaggaatctttcctctttaagctcatttacttctatccttgtattattatgatgattttgttttggtcatttctcttagtctcctggtaaaaattctttgagggaaaaatccatgtttcctctgaaccaaggagaaagtctttactcacaggtagactagaataattagggacatcatttgattcttgaagcagtggttctccaccattttccactagaaacaccttatgag

SEQ ID NO: 266028 - DNA, 361 bp, Homo Sapiens
  misc_feature (323)..(323): n is a, c, g, or t
  misc_feature (328)..(328): n is a, c, g, or t
  misc_feature (339)..(339): n is a, c, g, or t
cagaactttacttctaaacacactccagctctatcggtaatatttctctccacctccactactgtcaccctggcatgactcacttcctcctgcggtacttcaggggtctctttccagtctccctgctgtagtccacttggaaaccctgcatggcataggacaagagttcaacagagagttgtggaattaatgagtgatttacgcacgttgagaagatagggagtttgggatctgtgcatttaatacagatgttcatgggaatgtccaaggagtaaaaatttggaggaagggaaatttgaaaggagttttcagggcccagattntatcntattaggggtnatttcatttaggccttaaaatt

SEQ ID NO: 266029 - DNA, 723 bp, Homo Sapiens
ggtatagtaatatccttcccccaagacacagagttaaggcaacttaatatgtttgtatgtaagaggggaaaaaaaggtgacacagatgtaaaccggaagcccaaggttcttatctttgggcagaggattacatctgggtgctttttattttccatttgctcatcggttttctgaaatttccacagcagactgttaccttggtagtgagaaacaaaatgatacttgatttttcaaagagggtcatttatacctgtccccagcctcttccgcctcccaagtgaaatggggcttgcagctgattcatttatgttctttcttgttttctaagttagtatattgctcaaaacagcccttgcgagctctaggagctcaggagcagtttggtgtcctcaaagcagccccttcccctaaagctacagcctctgggttaaggacatgtagcagaggtactagtgtgagatgtctgggttttctggtttgttcttggacccacaaagcgcagagagctcccaaacatgttctcaggatgggcgaggatagaaggtgtaagtcttggtgcctatctgcaagtgaaggtgtttttaagacaccatgtgcgtgagcatgtgacccatgtggtttatgatgctgactttttcctctggggaaatgcgaaatacttaaagctcttatctgtctgtactgattttgaaagccaagagcctaagattttgacaattagtt

SEQ ID NO: 266030 - DNA, 746 bp, Homo Sapiens
  misc_feature (372)..(372): n is a, c, g, or t
  misc_feature (724)..(724): n is a, c, g, or t
aactgtgaccagtgccgccctgggtggttctggagagactgccgtcttcttgtttggccataggtgctgggcccccggcttcagtcactgtctcagacaggagtcccgataagcagatcaccagtcctccactgtccttcctgtcggccttgctgcatgagaagatagctgcttcctccctcttttcctacactgtaattattgttttacaattgagtgtcttaataatagtctacaaatactatgtatttatgcaaaactgttaaagtctcatctgttatgattggatacttggtcttgtcagtagtggtcagcattgggttgtgagcttgtcctactccataagtgtttatcctgctatgcagtctttancactgtgtgttcacatctattccaaggagccttgctagaaacaacactggcggttcctgcaggccaggcaggcattggcccatgctgtgtcccataggagccaatgaaagaacgtagcttggtctgctagccagccgtggggtggcgcaggccaggcagcctctgcaccagagtccagcacctgcccattccccagtcacacaatcatactcttctttcatagagattttattaccacctagaccaccctagttttcctctctgttagtgtcctgagctcttttgcaacaaaatgtaggtacagaccaatccctgtcccttccccaatcaggagctccacaccatgagttgnttggtttttcagaagctgccag

SEQ ID NO: 266031 - DNA, 542 bp, Homo Sapiens
  misc_feature (20)..(20): n is a, c, g, or t
  misc_feature (39)..(39): n is a, c, g, or t
tttgggtacttccctccacngcctttccatggcatatangtaattccactggtttttaaccatgggttacaagcacattgaactttatatccatttttctttttcatttgacataacattatggcaaacaaaaactttaaaaaaagcacatgggctttacaagtgagcatatgctttgcaaacatttctgtcagctaccagtaaccaactgcaaaaactcatattctgcccaaaacagaaattgtgccagtcggggagtcctttgatcaccatgcagtaaacctcgccaaaatattgtaaatttaaacaaactaaaacccaaccacttgaaaaaatttaaagcacttaaattgctattggttcaaggaagaaataaagaatgtactgacaaatatttagaaagcattgaaaactagaatgccacatacccaaacctatgggagacagctggcactattctcatagccttaaatgcttttattattaaaaagggagagagaaaaggcaaataaactaagcattcagcctgagtgcttagggaa

SEQ ID NO: 266032 - DNA, 808 bp, Homo Sapiens
  misc_feature (369)..(369): n is a, c, g, or t
  misc_feature (378)..(378): n is a, c, g, or t
acttggtctaaatctttgcacatgttcgctgcaattacatttgtgacagcaagttttattttgaatggatcttattaataagagtaataacatatcaaacaattcagatcttcagctttttaatctacaaaggggagattgataacacctgccttgctaggccgagggggtggttgagaagactacctgaaatgatgtatgtgatcatatacgagagtgagccccaactgcaatctgcactgagtgggcggccctcctgacagctgccatctctactcatttctgactgtctggctctattgaaaccctctgcctactgtctatgacccaatctttgtatgagcaagcctctgcctctagtcttaggantccccagancctaggcacaacattgggcacataggcaagtgctcactaagtgtttgtaatataaggaggtccatgacaaacatcgtggtcatttcattcattccagttgtacaaggcaccattaaacaggacaaaacgtgaaggccaaaaaagggggaaaccgggaaatgattgagaggctacccatttatcaggcaccctatatatctgattttatttcctaggttatttcatgtcacctgtgaaatagctaacattgtccttattttgcatggaaggactctaagcattaataagttagtattacgccaaagaatgacaggtcagtaacaggcagagccagggtttgaacccaatacaccatactgtgtccccgtgataaaacctttacgctccaggcactaacagtctccagcacatctgatgtcacagagtcaac

SEQ ID NO: 266033 - DNA, 770 bp, Homo Sapiens
  misc_feature (341)..(341): n is a, c, g, or t
aagtccatgagggcagaactacacctttttaatttgcagtgttctagtgaaaacactagaatagtgttgagtatataattgaggtttgataggtattttctaactaaataaatgaatgcgtgaacctgactgtcccattatatcttattaacaataccttgaaacaacttagaatgactatttgcttccaatgtttggaaggaatgaaacacaaatttgaatatggcagtggtatgttattatcctaagtgaaccttaattataaccaaaacatggtttcaggtgctacttcggataagtttctgcccccacctcccactcccggataatatattactttnaacaattagccaagactattcactaagcaaagaacattactgagcaaacagcatcagagaccatactaaataaacaaaccaccaaatggactgctctataatgagattaagctttgcacagttccaaaaaaattgaagttctagtataatactttgtatcaaccctataaagttattgtactttatcacagtgtaaagaatgggcaaaaaggaagaagcttttacttcatttaatcatagttttaaatgaagtttaatttttttccatttaaatagtaatttcttttcctttccctgtattcattctccagaaaactcaaatcaacattgagcaaatggtactaatttttacactaactctgcagtatttttctggaaatatggggggaaatacactattttaatcatcaggatctaagttctttcaaa

SEQ ID NO: 266034 - DNA, 696 bp, Homo Sapiens
  misc_feature (18)..(18): n is a, c, g, or t
aaaaatcatccccaaggnaaaaaattgtttgcattttgcaaaaccatctgatgtactcagatgccacctggaaagaggtaaaatatttaaaaccacgaaaaagtcttaggaggtcatttccatggccagagctctgaggctagtcctctctcttccccttacttaacagcaacacacgtctaacgtgtgaaatttctgctgaaatggcacttctcccaatgaggtggagcccacttctctgaattaacagcgggttgacatgccaatggccaccctgtggtgacctctgacccccaggcagaggcctcgaggacacccatttatggggaatggggtgatgagggctggtacatgagcaagatgggctgtcacaggagggagcaattggagaaaaggacaatggaaacccagcggggacaccctgagcagaagcagaggcaggttctgtttttctagacggccttttgttgctgttcttcttatagtgggaaagctcaaagaccctgtcctggctcagtgtgcacacagctgaggggggcttgagcgcaacagcgtcctaaccctcttctccaagggagtttacattcgtaaaagtttgggattccttccctgggaaatcaaatataaattatatggctgattacatcacctaagggtatgagaaagtttcataagtgcctactttggttttttttg

SEQ ID NO: 266035 - DNA, 901 bp, Homo Sapiens
caggacactctgcttcccctcttgtagctgaacttaactccactgaggttttctggggcccgagatctcggttcaggggagtccagcaacaaacattagaccagggttggaacggctggcacagtaacatcaatggaaagggacagagtttgagagttcaaacgtgatgcactcagcagccaccgccagcacatcctccacaccgtctcgtgcaggggcccacccatctctgtgtctttccagcacacaacagtcacccacactgggcattccattcagaggtgggagagaggaggacacccctcctggcccaggagcagaggccatcaaggtgtccccggaacttagagtagatacattgccaaaaggtgatatcctcattctcagggattctggtcttggagcagcccactccaaatgaggggccgtacaagaccaaagtcacccctctgaggcaccgtgtggtgatgctgatgccagcccagagttccttagcaaaagttgatggatggggacaagcagctgctagattaagtaattcctcaaatttgtaaatgtcagcagtggaagaggagcagtctcttacccatctcttgctcaactttctacccccacgcttctcagcacaatgtccttaagcgttattggcgctcccaaaatagttgccaaatgaataagtgacctggggaaggaaaggaaggagggagggaacagaagattgcctgaaaaaggaggagagagttgggtggaaagaatgcattgagctgtgtgccttggttgcaatgcctgtcctgtgaccagaaaatgcatcccaacacatgtcaggctgtgtctagcaggtgggagggagtctggtggagaaatggcattggaccacatactcaccgctaggtctgttcgg

SEQ ID NO: 266036 - DNA, 807 bp, Homo Sapiens
  misc_feature (589)..(634): n is a, c, g, or t
tattgcagcaccggtaacctactgtgttttgttgtttcctggtatatgtctctctatgaacttgaagccctctcagctagcccccacccagagatcctagtttattttttattttcagtaaatctagtgaaaaacccagtcattttcattttcaaagtgattttaactcatagtctaaattgaaaaataatgttttcctaagtagatattagtaagtttgcaaagctaggaattaaacgaggggctttctttgattccccagttataaggtgggggtcatgtttttgaggtgaaagggctggggttttctcccccaaattaatggggtcaggttaaaaaatatacacctgtagcatgatcaccacagtatctctccctgtataaggcgctccagcatagtagccctgctggacagacagaagatgcatctaccatccagcttcagcctttggccagtgggtcccagagttgaaactgaattggtaaacgacattatcccaagcatgccttccatgaaaagaaaaatgtagattataatttctgacaacttcagttctcaatctatccccctttagatagctaaccattnnnnnnnnnnnnnnnnnnnnnnnnnnnnnnnnnnnnnnnnnnnnnnttctatttgcctttgttttctttctgtcactgcattaatacctattaatccactaatcctcttggccactctcccacagacgaaaaacacattcttccttgacagtaaacaagcaaatcgatcctaatttatgatttggaataaatactgtgactgggcatggtggctcactc

SEQ ID NO: 266037 - DNA, 639 bp, Homo Sapiens
catgcatcctggtgactggggctgttgcttggtgcttactcctactttcggataaaccggagaacaatcggcttccagcattttgagtcggaagaggacattaatgttgcagctcttggcaagcagcagcctgagaatatctcgaaccccttgtatgagagcacaacctcagctcccccagaaccttcctacgaccccttcacggactctgaagaacggcagcttgagggcaatgaccccttgaggacactgtgagggcctggacgggagatgccagccatcactcactgccacctgggccatcaactgtgaattctcagcaccagttgccttttaggaacgtaaagtcctttaagcactcagaagccatacctcatctctctggctgatctgggggttgtttctgtgggtgagagatgtgttgctgtgcccacccagtacagcttcctcctctgaccctttggctcttcttcctttgtactcttcagctggcacctgctccattctgccctacatgatgggtaactgtgatctttcttccctgttagattgtaagcctccgtctttgtatcccagcccctagcccagtgcctgacacaggaactgtgcacaataaaggtttatggaacagaaacaaaa

SEQ ID NO: 266038 - DNA, 497 bp, Homo Sapiens
  misc_feature (297)..(297): n is a, c, g, or t
  misc_feature (325)..(325): n is a, c, g, or t
  misc_feature (378)..(378): n is a, c, g, or t
  misc_feature (383)..(383): n is a, c, g, or t
  misc_feature (390)..(390): n is a, c, g, or t
  misc_feature (425)..(425): n is a, c, g, or t
  misc_feature (438)..(438): n is a, c, g, or t
  misc_feature (458)..(458): n is a, c, g, or t
gaggacattaatgttgcagctcttggcaagcagcagcctgagaatatctcgaaccccttgtatgagagcacaacctcagctcccccagaaccttcctacgaccccttcacgatgaagaaactgcagccgagttgggatgatttgtcttgggccacccagcttcaagcaggagagactaaaacaggtggccctacccccagcccatcctgcctcccaacacaaggcagcagcacaaacaaacacgcccagcacatacgtgttcacagtgctcagggagagtcatgcctcagaccagtngcaccagaaagattcaactaggactcancacacagaatgccctgcccccttacaaccctctctttttccagggactctgangaacnggcagcnttgaagggcaatgaccccttgaggacaattgtgangggcctggacggnagatgcaagccatcactcanttgccacctgggccatcaactgtgaattctcagcaccag

SEQ ID NO: 266039 - DNA, 484 bp, Homo Sapiens
  misc_feature (218)..(218): n is a, c, g, or t
  misc_feature (247)..(247): n is a, c, g, or t
ggtgctccaggttgggtgagtctgagccggaaagggggtacgtggtgggcgcccctcattgtggctggggagacctcataccccatcgcccacccccgtcctcctggtcatttcctcccagacactgttttgccccagcgcccttcggaatcacagtcccgccgtgtcttagaaactgctttggccgatgcaaacagccccctacccggtccccctcngccttcacacggtcactctcccgaggccngagaagaccttctgttcctgtaaatacagcccagcaagtgcaaactgtgattttattttccacgtaatcctgaaggacggactggaccgtctatgttttttcagcccttcatagggggtcttttattttggtgggggggtggggtggacttttagagtagaagctgcacttggcaataagctcgtgtcgtctgtcagagcccctctctcaactctgtgacctgataatgtttctaag

SEQ ID NO: 266040 - DNA, 690 bp, Homo Sapiens
gagcagaagagactgcctgccttcaaccgcacgctggccctactccggcaagtgctgaagtccgaggacccccgccaccgagccctggcctggtgctacctcgggatgctgctggagcggaaggacaccttctccaccacccccatgggcgtccatgactgcgggtactcagggaccgaccctctagactgcttcggcaaggccattgagattgccaagaaccaacctcccatcctgaatcgcctggcaaaaatcttctacttcctgggaaagcaggatatggccattggaacctgcaacatggccctgggatgtcctacgagatccagagcttcaactgggcaggcgtacttgcacaaggggccaagctttcccgcactggtcccagacctgcctcctagagcccacacagagcccatgtgcttgaggaagccgactcggagctcccagtttacttcactgcaagccgaagagtcctcccatcccctcatcttctccactactatccacatgacctagtggcaaatctactcccagtcttggtctcagtggcttaattactttgccagcaggtacgaggcaggagtgaaattccttcactgtcgtggatgtggttattattctagataataatgacattaaccataatagtaaataataaaatatctctataaaattctgcatttcatc

SEQ ID NO: 266041 - DNA, 413 bp, Homo Sapiens
ttatctcactgtctcttgatgcagtccactgcatagtcattcagctctgcaagttacacacttaggtgagttctgcctcctgctagcttccccgcactggtcccagacctgcctccctagagccccacacagagcccatgtgcttgaggaagccgactcggagctcccagtttacttcactgcaagccgaagagtcctcccatcccctcatcttctccactactatccacatgacctagtggcaaatctactcccagtcttggtctcagtggcttaattactttgccagcaggtacgaggcaggagtgaaattccttcctgtcgtggatgtggttattattctagataataatgacattaaccataatagtaaataataaaatatctctataaaattctgcatttcatcaagc

SEQ ID NO: 266042 - DNA, 650 bp, Homo Sapiens
  misc_feature (13)..(13): n is a, c, g, or t
tttcggcacagtnttccttctggcatcaactgaggtcacttagtgggacttaggtggcaaatgagctgctttggagggcccagtttggctttgctctccttgtcttatgtgttggtggtactggctagaagtttgggctcagagcaccatcatgtgacctctgcagtatggtggttttagaacagtcttgttacatggtatctggcttccactgaacaagcattactgaagaaccaggcaaaagcttcatggcctcttctaatctgaccttgaaagtcatacgggattactttcacattttttggcatacaaatgacccaaagcactagcccagattccaggagaggggaattagattccacctgtcgatggggaaattgcaaggtcacagtgtacaagagcatgtgggatgcaggcatctttggaaaatataatctgccactggtttatttatgttaaaagcttgaataaataagacaggatggtaagaacagaactgagaacaatttcagttatatcaaaagttaattcataaaagcagacaattttcaggcttgctaatgaagcagaatttaaccctgtgcagtacataagagtcatacctaccacaaagaagtaaaggttaaaaataaaggactgcatattgctgt

SEQ ID NO: 266043 - DNA, 794 bp, Homo Sapiens
  misc_feature (65)..(65): n is a, c, g, or t
cctgtccccaggcctcccagtggcctgctcagaatctcttcttgaattccccagatcctccacancatagctgtagggaatgcctggcagagcaggggcttccaaaaccctgctccagctctgcagccagcctctgttgggtttggtcagtgtctttattgtactgatagttaaataccgtggtccaatgagtctatgataacacatttcctgcccatattttattatttctgaaatcaggatcttccttaacagaaaaatggtgggtgtaacagcttaataggtagcttttagggacacataaataataatgcagtttctaatcaatggtgccttagaatcactgaaataaggtattttgaatatcatccattattaacagtggtaaagatcaatgggtgacaattgaggagaagtaatatataaacactaaagcaaaagaaaaaacttagccatgccattctggctccatcttctataggaaggaaaacaatacaaaactttaatcatattttcttccataaaccattttaaaagcagaaatcaagcaccaatttgataattttaattaccttcaaagccatcattgtcaatgtcgccaagattaactatagattccccaaatcttgcagcatatttgtcacttccaacgaggtttgtttccattgcattcattactgctccctagatagaaagggagagaaaacgtgtcattataacactccctgacaactttacacgatttactgttgtaattggatatggattttttctaatgtgtcaaacaagttgga

SEQ ID NO: 266044 - DNA, 490 bp, Homo Sapiens
  misc_feature (27)..(27): n is a, c, g, or t
  misc_feature (306)..(330): n is a, c, g, or t
catactttcatatcactttggcccttngacacactcaattctttttattcctgaattacaatataaaattctcatttccttgtgcatctcttcttctaagaagtacaatcacaaatgatacaattccatggtattattgctcccttaaaatgctatcttctgcttttaactaactgctgttaacaattaagcatccttaacttttcaagaaaattgagtaattaaatgtaatcagaaatcacatctttacatacataaaaaggactcttgccattactaagtgctttaaaacatggacacatgtcnnnnnnnnnnnnnnnnnnnnnnnnnatagattctatgtttctaccgattactaccagtacataccatgacacagtagaatgcaaaatataaaactaaaacccagccatttttaacaggattggttggtatatttaatcctgcccacacattcgatgaacctttatgcagaattttttctctcgtt

SEQ ID NO: 266045 - DNA, 579 bp, Homo Sapiens
cattttctccttgaagaaaaggcacagtccaacaagtcacttagaaaatggatgcttgtcagatttgttttctatcctgtagcgtaaagattgtttaaagtttaccattacattctaagagaccccgattgagctggagttgggtagaaggccaggtttatctgaaaagatcgacatacacagaaagctccagtgttctcctgatctacaggccccaccaaatcccagcagcagccttttcttcctcaggctgacttggaatgttctgatatgacaggctacaaaagccagaggggattccagctcctcaccagacccaaggctgccttgggaaaggcccaggccagtgttcctagacaccaggatctcttttccccctcagattttgtaaagggagacttcatggttacaggagcattatcttagattatgcaggacccgggagtgctggcaatgtccctggtcactatgaataattccaaagcctgaactcatttctctccccaagaaaacttactgcatcctacaccagaaaggcaaaaccttcctgttaatctaagagtgatgagatttaaaaaa

SEQ ID NO: 266046 - DNA, 541 bp, Homo Sapiens
aacattatggaaaaaaaccaatgacctttagtttagcacctcctggcagttcagggtgctagggtgacaaaaatgaatatgatataatcctgacctcatcatctactcagaggtccgctagagctcacaaactaaggcaataaacagagataaaatctctactacactgtattctgtacaatgatggagatatgcgcacatgagcatggggacccagaaaagggctacttagggtggaggaaggggaggcagaaagaatagcaggaacaaaagcacgtgggtaagaaataaagcaaacatgcattaatggagagctattagcagctccgtgctgctggagaggagggagaaatacactggtctttcagtggtatggaaggtcaacaggggacaagtcattctcaattgtatatttctgcataaatgagaatacaagatcattcttctacctttgaggctatacatgtaataatgtagtagctcatatatgatataaagtgttaattcttacttctacataagcaccaaaacctaaatggta

SEQ ID NO: 266047 - DNA, 408 bp, Homo Sapiens
  misc_feature (170)..(170): n is a, c, g, or t
  misc_feature (295)..(295): n is a, c, g, or t
ttgtgattatgcatatttgcatctgaattaattttgacttataataataattaaaactttaagatttgtttttggtattattcaagtatgaaccatttcactgaagacttattctaaagccagctctatcccaagttaaataacttgataagtataatatttttcagttntataggccattgtttaaaattgtgtatataacttcatatgcttatgaagtaaattagaagcattttacatacatttgtttccaattctttttcaccaagtatctaatccccagcccacccatctnccctccacccccagcccttggccacagacccgcagagaactttttgcgtactcttttgaggcctcacctgtatgtagttccctcttctccagtaccttattctataaactccc

SEQ ID NO: 266048 - DNA, 786 bp, Homo Sapiens
  misc_feature (477)..(510): n is a, c, g, or t
tctttcccttcacaaataggcacatgcttacttatacggcaagtttagaaaatccacaatgcaaaaccatgtggaaggacaaagagaaaaagacgcagaaggacttcctcttccagccaagatggacttgccctcccaccatgaccaacgagaaaactgaaactggatagaatatttgagaaaactgttttcagagattggaacacaggcagaacaggactgtgatatttgagaacaggaaaacactggaggcaaatctcatacacacttgtgttttctgcccaatggcagtttcttgaccacacggagagaggtagagacctccagaaatgaggcaatgtcactgtcactaagctgagagtcttacagtgctaacatgttgggagtttatagaataaggtactggagaagagggaactacatacaggtgaggcctcaaaagagtacgcaaaagttctctgcaggtctgtggccaannnnnnnnnnnnnnnnnnnnnnnnnnnnnnnnnnataagatacctggtgaaaaagaattggaaacaaatgtatgtaaaatgcctcctaatttacttcataagcatatgaagttatatacacaattttaaacaatggcctataaactgaaaatattatacttatcaagttatttaacttgggatagagctggctttagaataagtcttcagtgaatggttcatacttgaataatacccaaaaacaaatcttaaagttttaattattattataagtcaaaattaattcagatgcaaatatgcataatcacac

SEQ ID NO: 266049 - DNA, 221 bp, Homo Sapiens
aaaatatttcccctagaagtagaaaaggctcatgtgctgatggataattttgagtcttctccattctctgtgaatgacccccttccccaggcatccccacctcctaccttgttcttagagcaaactaaagccaactgagggtgcacacacagccatgagcccacctgcccagggactactcccatctgcttcttcccgtccccgtgggaagtgggcccctg

SEQ ID NO: 266050 - DNA, 345 bp, Homo Sapiens
  misc_feature (327)..(327): n is a, c, g, or t
ttttacccatcagatttattatctcttctctgtctcttttattttctgttcctgtagacatgattagtgtatctattctcttggtcaatcagtttatgcaaggtcttctagctctctattctcctcatgtctaattgtcaactaaatcttgatttctcaagatgctcagtcaaggaaacatcatctctttcaaactataaatacctaatcagatattttaaagaaatgcgtgtataagtgaccaggtgaattaaatggattttgcctctttctccaccattactctcaccaaaaatgtttaaagaaagtttggcgtaactagagttntagtaagcagttattatt

SEQ ID NO: 266051 - DNA, 997 bp, Homo Sapiens
  misc_feature (77)..(77): n is a, c, g, or t
ttccatttcgtcaggcggctgttcttgtctgcgtagtttcaaaaatcttctgactcggttcccacagcctacaaggnctgtttcagcatcaggacagacagcacggtcaaggcagccgacggtctggctctgctggggcctgagttaggtttgatcaccttgttactccctgggatgatatttgtcgtgagctctgtgaagcacatgcttaactctttggagttgttggccttcagcccctgctcctggacagacgtgcaggtggtgatgacactggtccccaagctggtactgtcactgaggtcatctggcaaagaaggcgtcttctccacccgaggggcctgggtggcctggaacgaggggccttttggggacacgttcacgtccgtgccgttgccaaaggcctggatggcgttccggaggcatgggttctcggtgaagtccctgaggaacttctcacactcctcctccatgttcccgctgccacgacagctgcaccagggggacaccacgatgccagtggggctggagtccacatagttaggtgtcatgtcaaacccaatcatgccagcataagagcccagacacgcctggtaattgtccgcagggcagctggtgaccgtctggtaggaggctcgacaattggcatggaagtcggccagccgggaccgacacaggtggtcagtccggcacacgccacgcaggtccaggcagttgggcttctccttgtcctcataggagcagctgggcaggatggtttgccggcggcgctcagcgcacgcctgatcttggcaggagcagaagagcatgcggtaggtgtactcgctgggcacccggtcgaagaactggcgcagggccttgtggcacttgcggcggttgcagcgctcggtgggcgagatctcgcggttgcagatggagatgtaggaggagcgcagcttcttgcagttgtcattcaggttgcaggccttggcagcatccaggcaatggttgctcttgg

SEQ ID NO: 266052 - DNA, 334 bp, Homo Sapiens
ccttgtttgatcaaatttgtgtaaaatttttttagaagagatggcttattaacagggaagaagcttgttatattccagttgtaagaatagccttagtgtttagatttttttatgatagggaagatgcggccatcactgggatattttcaaatcccaaggacatcagagtgaagtgtcagttgtcagatgattttaaaagttacgtcttcagagaaaaaaagattcattttctcattttaaaccaattaaatattctgagtgagactaatcactcatttgcctacgaccttttagaaaagttatttgtggaaatactgaagtaaaagatgataaa

SEQ ID NO: 266053 - DNA, 747 bp, Homo Sapiens
  misc_feature (12)..(12): n is a, c, g, or t
  misc_feature (719)..(719): n is a, c, g, or t
ttcggcacaggnagtgtggacgctccacctgacactaccgccttccctgcccctttgcaacagtgtctcttggcttctctttcaccatgctctcctggtttccctctcatttctgtgattgttgcctctgaacttccttcactggctccttcccctcctccctattcctgtcccttcaaatgtgggtgttcttggggttcactgacccccgttttttctgtttgccaactctcagttctgtctctaggccgagccttcttttctgagcttgactctcttgctcagctgctttttggagatcacatctaaaatcagggctcaccatctcccccagaatttggcccacaccgttttgagagttgactccttgcaggcatcgggctaaacattgtctcagttaatccttcacaactttatggttgtagaggaggaaactgaggcttggagaggtagagccaggatttgagcccttctcacacaaatcaacttctgtgctctccattcattctctcaacatctattgacagttgctatatccaaagtacggggagtgcaacaataaacaagacctggccccatggggcttccagtcctctgaaagagactgtgatagcccaggaaatacacatccagtcacagaatggcaagtcacctgcccaacagaaatgcgggcataggtacggactcatttgagaacctttccctagagctgctggtgnaggtccaatttaatatttggttggagag

SEQ ID NO: 266054 - DNA, 770 bp, Homo Sapiens
  misc_feature (737)..(737): n is a, c, g, or t
aggaaaggagctatccgacatgtccttagctctagtttgtcagtaaagacattttgaaagattatcaattcctgtttgtcagatgctaaaatattagacgacacagcccttactgtttaggttgtgttaccttttaattgttaactcctgcgttgtagtctggttttacccgttttcttcagtgtgaatgatagagaagtcataaatagcctggggatctgttcaaccaggcttataggaagtgttaaaaacattgaactctcaatttagatgcattgggaaagtattcaaagtttctttgttgttgctcattaaatgattatgtaacgtacataggcaggggatacaacttatatagagtttaataaaaccatgcgggaaactagcattcagactaagtaaaatagagcattaccatacccctcaaacccttacgtgcacctctcagatcatattctcttttcctgtatcagacgtaaccaccctgaattgtgttgcattctgttcctcttcttgtagtcatgaagtggcttaatttagcctgttttttaattttatatacatgaaagtggaccgtatgcatttttctgtgtcttcttagatttagctttttgtttttcaaacagggtgatacttgcgggtgtagttttagtcttttcactgttatgtggtgtttccttgtatgaatataccccaatttattttttcattttactatcggtggacatttggattgntcccaattgcttgcaattataaacaatactgct

SEQ ID NO: 266055 - DNA, 808 bp, Homo Sapiens
  misc_feature (751)..(751): n is a, c, g, or t
tcttactaatatcttagtgtagttcatacacaatggaatccattctcaacaccgatttttcacaatcatttgttcacttacaagcatattttcaagtcattaaaaatggtttttgtagatatctggatggtttccaattattctctaatataaatattaattcaatgaacacacttatacagaaatcactgtccatatttctgacaattttttttggtctgaccaatgtacatccctgccagcagggactgacagtatctgtctcatcctaagctcgcaaacactgagaatgtgctatacataattagctgctacccaaatataatacagttttctgtttactcaataaagagaaaaaaagggagttttaaaggaaaactcaaaatgaaataaacataagtagggatctccctaagaagacaaattatacatccctaacaaataccaggcagttgatagcaatattgaaaaccctctaacaggacacagtataatattaggttctagaaatctcagaagtaaaaacaaatcaaaacattcttctcatagatgtatttcattagttggaactgatgaaatgaatcaagaatcactctcaccattggagaaaaaaactgacatcgaaaacactgttcataaattaagatgcataaaaatcaatgtttttatgtctgaattatttcaaatttttgtcagcaaacagtattaaatatggatatatacctttggtttcccaaatataacagaaaantctataaattcttatcaaggtaaacaaataaccaaaaatggcatttattcaacaaat

SEQ ID NO: 266056 - DNA, 796 bp, Homo Sapiens
  misc_feature (515)..(525): n is a, c, g, or t
ggccgcttaattaaattctttaagttcaaaattctgttgagttatacttcattcaataataaaaggagtcctgtcatattttacatcaagtcaatcaccgattggtttaagcatctacattgactagatacttttaaaagaggctgatggcattgagaaggccaatgtttttggttggtggtcacatgcctgggataaatttggacattctcatccaaaaaccttgcccagtaagctgcagctatttacagaacagctggggcacaccaccgacactacagtcaacaaacattgtgggtgtgagacatagccagatgcacagccaactcagttactatgaaataagaggcataccaaaattcaggaagtaataaaaataaaaccataagaaaatatttcatttccctcttttccttcatgtgttttaactatttggaacaagagctaagtcttatgcataaagtttacctctttcagcttctgtcttcttaaaggtaagggtccagttgaaaggnnnnnnnnnnnttccaaaggaatgaaagaaaagaaaatgggcctaaatgatctacaaactggaaaacatatccctgaagagagtggactgtaatgctttcctgaggagtgtgatagtaaggttctcaaaaaaagctcaggaaaaaatctcaagatggtaaatagagccatcgcagagttaccttctcctctcctcatgagagaagagagataatgctggtggtcaggaaaatcccagccctaactctgaactgacctttaccactctaatcttcagttcctt

SEQ ID NO: 266057 - DNA, 742 bp, Homo Sapiens
  misc_feature (14)..(14): n is a, c, g, or t
  misc_feature (44)..(44): n is a, c, g, or t
ctctatagacaaancagattccacatcttagggagttcagcaancaagaagagagaaagcaagtttcttgcacgattttcactgatcttttctttggagatgacatgtgccaatcactgcctttgagacagggaacttcaatatgccagttctccatagaacagggttgggagggatggacagagggagagatgaagagaaagataccaagagagggaaagagagtgtacttgatgaacactgaaataccataaaaaaactgaggttattagaaatataagggcacccacaggaatgaacactacagtttttccctaaggaagaaacaacatagaagaactggcagaggaaactggggctctccccggtcctagcacactgcatttcctgcagggctgttcaagtaacccgggtgcagctcgcctcagctcccatgtgtgttgaactctcacccaagcctggcttctgtcttgcggcaacctaagaatgaaagagaggattcttcgtctttactcttagcctgcataacaaaatggtctcagcagaaacggaaaaatcaatgggaaagtgagaaaaaaatcacttcctaatgagctctttaatccttgaagaaaacattaaatctctattctggcggagctaattttcagaaactgtgaaatttgggaagtggttaataagtgattgctccagggcatgaaataaggacctggaggtgttaactgcttctagaaatgtttaa

SEQ ID NO: 266058 - DNA, 574 bp, Homo Sapiens
  misc_feature (14)..(14): n is a, c, g, or t
aatttgccctcgangccaagaattgggcacgagctcacacttgatagggcaggaattgcaatcccctctctgtgagcgcagattctccaccaaggcccactgtgggttcacggtcaaagctggctaccttggggttaccatgggtgagttctttgggaagccttggagaacctccccaccaggagatttggctctggctcaacctctacctataaaaagagtggagcacatataattaccttttatgagtttatttaaaccttgagtaacatccaccctacaaacccttgttttgtcaaactgcaggggtgcaagaatgcaggttgcttctttgcccccccttttctccatcctggccttgctttttcttcatgttcacagaagcttagggaaaatcaacaaactctctttcagagcagaagtctaaactggggtaacagtctcttattgcatacactcaaatcactataaatggctcagattgagcttccttccccactggactttgaaaggataagtggacatcgtggactcactctattccagcctgggcaacacagcgagacaatttttc

SEQ ID NO: 266059 - DNA, 705 bp, Homo Sapiens
  misc_feature (198)..(257): n is a, c, g, or t
  misc_feature (266)..(300): n is a, c, g, or t
aaacttctgcacaaacatctttactaccctcttcatttcattctgttcgtcatattcttctaagtttcattcactttatcttcatgtgtctggtttacaactggactactctgagaaacttctgctgtatttaccatgtaacaaaaagatgttttccatagataagtatatattctatacattcattctttggtatannnnnnnnnnnnnnnnnnnnnnnnnnnnnnnnnnnnnnnnnnnnnnnnnnnnnnnnnnnngttaagttnnnnnnnnnnnnnnnnnnnnnnnnnnnnnnnnnnnatgagccaccgtgcccagccatggattcttaagagtttccattttaaaggaacaaaataaatattgcgtattcaagatttatgaataaaatatgatttaaattttccttacactgtaatttagggtatcaacatatattacaaatatttgcatattgttaaacatataataatttttatttatttattaatggtattaggcattttgtaaaattcctttgaacaagaagctccttgaaggcagaaactatgttctgtttcattttgactatctcatacctaccacagtgcctggtatataacaggtatgcattacatttttattcaacgaataaataaaaatttcctcactataagaccaagttcgaagtgttgagaaggccttaaaagacatgaggtatatact

SEQ ID NO: 266060 - DNA, 491 bp, Homo Sapiens
  misc_feature (102)..(102): n is a, c, g, or t
  misc_feature (106)..(106): n is a, c, g, or t
  misc_feature (129)..(138): n is a, c, g, or t
  misc_feature (352)..(352): n is a, c, g, or t
tggtagataactcttgctatattgcctaggctaagtctcaagctcctgggctcaagtaatcctcctgccttggctcccaatgtgcggggattacaggcgtgncacncatgttcagcccccctcaaccannnnnnnnnnaaacttctgcacaaacatctttactaccctcttcatttcattctgttcgtcatattcttctaagtttcattcactttatcttcatgtgtctggtttacaactggactactctgagaaacttctgctgtatttaccatgtaacaaaaagatgttttccataagataagtatatattccataacattcattctttgggatacagtcattctttggnaactgtggggggaatggggtcccagtacctcccattggatatgaaaatcggtaagttctggccttgggctcccaaaagtgctggggaatacaggcatgagccaccggtggccaagccatgggattcttaagaggttcca

SEQ ID NO: 266061 - DNA, 755 bp, Homo Sapiens
attcggcacagaagacctatttataatatttagcgaactcggtctccctcagatcccccgcgagagaggctgctggacccaccccgctgtcccccatgatagaagtctgtaaataccttggtgaccaatgcccacttcccctcctgggtcacctctgatggctgctgtccactgagaacgtgggcagtgtccaaattcctgtactgtaaagactaaaaggcgtttgctctgagactgacaaggcggaaacttccatgtgtctcctgccaggctctgtccccctacgccatcccgacacgtccccgttcccccgaaacctggctcagtgcaatactcccattgccatggggtccttcaccatggtactgtctccacagccctcagtccccaccccaggagaggcgcctgccacctcctcctcatctccggtggttcaaacgctccgcctgtccccaacccagtcccatttttatggccaaactgattctgaaacaaaatgaaactgcaaacctcgtgtgtcttaactccccccagggatgccactccattcctccgccccgtggtctggtgcgtgacaatccaaagcgccgagacgagggtgctgtgtccctcaaacccagagtggtgggcgcctctgaaaccatacagccactcctggccccaaacactcgtttgcatcccaggttcctcgcccacctacccccgccacaccccgtctttttagagatctctctaataaatcgggtaataagctt

SEQ ID NO: 266062 - DNA, 786 bp, Homo Sapiens
ttaccttctaaatattcctcaaatccatctacttttattcattcctatctctatcatcatctcttgcctggacttttgccatggcctcgctgtttgtctatctgagctcattctggcttcttgcttgttagttcctcaccctgcacccagagtgatcttttcaaaatatgtggttatgttataccctggcataaagcccttcatgggcccttaaggataagggcaaactccttaacatgcccaaaggcctggcatgatttggctcccatcaaacatatagcacactcatcattgctccagctccatcaatctttttatattgctctgttccttctgcctctaggtctttgcaagtgggcttcctggcctggaaggctcttccctcccattttggcataactacttaacatgcagtcttcaaattccagtttgagctcccactttttcatcactaactgtaacttggaatttttcaacagtctcaccacatccttccccctaactatgggttagagtgaaggctgtaggctaaagaaataaagtcctatttagtacctgggagcattaacttataaaaacaaaagtttccccacgaaggaggcagacattaatatatggcccatatttttaaaaatagattttagttattaatgcctttatatttttatcaagtaataatagtttatatttattctcataataagtactggtccttatttactattgaacacttacatggcaggcatattttaagcaatttacatgagtttacttatttagtcttca

SEQ ID NO: 266063 - DNA, 499 bp, Homo Sapiens
  misc_feature (24)..(24): n is a, c, g, or t
  misc_feature (35)..(35): n is a, c, g, or t
  misc_feature (65)..(65): n is a, c, g, or t
  misc_feature (125)..(125): n is a, c, g, or t
caccagcaaaatttccataatccncaaagagttancgatttgctcagatttcaagtaaattgttnttatttatttgggtgaacattatacagtgttcaagttccataactttttaagtggaaatncagtacaaagcgtagctaaagctaattccccttttttccagttccagacgccttggaaatgaagacaaagggatagacaattatcgctggctgtgagctgttgtgggcactcccattatcgacacattcctgaataggtgctgaattccagccagctgtagtccagaccggcatcactttttaaaaataaccactttctctcttcttcaacataggtgatggctgcacaacacggaatgtacccaatgccactcaattgcacttgaaatctgatgtgacgtatgtgacagttatgttacgcaacttttacctcgataaaaacacatcgttttctccactcttttcaataatttaaagcatcggtcttaataaat

SEQ ID NO: 266064 - DNA, 456 bp, Homo Sapiens
  misc_feature (393)..(393): n is a, c, g, or t
  misc_feature (399)..(399): n is a, c, g, or t
  misc_feature (404)..(404): n is a, c, g, or t
  misc_feature (424)..(424): n is a, c, g, or t
  misc_feature (431)..(431): n is a, c, g, or t
  misc_feature (440)..(440): n is a, c, g, or t
aaaaaagagaacaatatcacatttaaagtacgagtgtctaagaggaagtttatagtgcatgcctcacattttaaattcagcaagaaagaacagggacatcctttttctcactggcaagtttgtaatctgtgtaaaacactaggtatgtttccataagctatttaaatgcaagtgacattcagaaagaagatccagggtgaacacttgtcatatgagtttcattttattcacactttgagagttgtgtttcacactcatatttgaataagaaacctccttggcatcatggaatgaaatgttttcaacaacaaaaaagtcacatgttgggtaaattgttaacacatttttcccttaatttttcaccacaactttaggattgtactccccagggtnagttantgttnaattgggggaattacagccnttctgtnccgtttacncttggagtttcgggtc

SEQ ID NO: 266065 - DNA, 465 bp, Homo Sapiens
  misc_feature (445)..(445): n is a, c, g, or t
ggccgcttaattaatcaaacctttctctactcattctggaccagttaaggttttctccttctccgtatgagttttgattttcgtcctccttggttggagatcacactttggtctgctgctaagttggatgcctcccactgtctttccctaagtctagggcttcagaccccagtgtggggagagggactttcgtttcctgcccctcaccacatcagacacagggcaggcaagaataaggatgggccaaaaggcccatggaacttcttgacctagcctggggacattacctgttactagggtgggacttcactgcctgtggaatgggaaggctggaaggggctgttttttgggtttgtatttgggacagggccagggcttaggaggaggggagagaactgggggctaactctttcaggcagtgaatcttttaaaaaatggccagtcnttgggggccaggggcttggg

SEQ ID NO: 266066 - DNA, 811 bp, Homo Sapiens
tgagtttacaggcatgagccaacatgcccgcttataattttatttattttttaataaatagtaaattcacattgtagaatatctaaaaaataaaataatgacgacgtattaacttcatccccactgttgtccccagttcctctctgcagaggcacctgctgtcacttgctcctcgcgaatcctgctagagctacactatgcgtaggatacatgggcagcgtgctcctcagcctcttctgtgctggcttttccactgaaattatcttggtgattgttcctcaacattacatatacagctgcctcattatctacagtagctgggatgcacatttcacatgtttatgtacattgacttccacaaagttgcactcacagtatgtgactttctaaaaaggagagaccatgttggcagttcacacagaagacaaactgagaagggagagcaggcacgaattactcatctgtccagagatggtgagacagctcagtgtgggaagctgtataagggaagtatatacaattctacctgaattggaagtaaacagggacattgcatttctggtattcagctggagttgaacacgcttcacagaacagatgaggctcacaatggccaagccccagggctgaggtccagggaggggcagggtgagtcagctcatcaattcgtcaacagagggaacagcagaggacaggggcaggccagcctggcacctagagcctttggatttctatttttacagtgaggtggtttaaaaaagaggaggttaaactgaattatttctaagatttcatccagctgtaaaatcct

SEQ ID NO: 266067 - DNA, 776 bp, Homo Sapiens
  misc_feature (382)..(382): n is a, c, g, or t
  misc_feature (491)..(491): n is a, c, g, or t
  misc_feature (498)..(619): n is a, c, g, or t
  misc_feature (632)..(632): n is a, c, g, or t
cagcctcatttgaagtgcacaacagtcatatgttgctagaggctgctgtactgcacagcataaacacagaagaagatatagaacattcctaccctcacagaaagttgtcatggataagactgctctagaagttgtctgccagtatcagccaccatgccttgcctggattactgcaagagaccagtctccctgatcccagtgtcttcctcctcatgcaaagtggtgtgtgtttctcaagggtaaccttgctcccctgtcactcacatacacagcttcttggcctgacacacaagacactgtgtgatctgccctctgcccctccacttgccttattccctgccgtgagtcctcagagacactaacccagctgcatgaaactccncccagacccttgaccttgggagtcagtcaaccttttgaggttctttgaagctttcatgaaaacctaactttgtgaacatggaaatgataatgctcggccaggcgcgcgngctcatnnnnnnnnnnnnnnnnnnnnnnnnnnnnnnnnnnnnnnnnnnnnnnnnnnnnnnnnnnnnnnnnnnnnnnnnnnnnnnnnnnnnnnnnnnnnnnnnnnnnnnnnnnnnnnnnnnnnnnnnnncatgggggcaccnacctgcggttccagctactcgagaagctaaggtgggaggatggattgagcccaagaggtggaggctgcagtgagccgtgtactccagcagtgctgtactcgtgtacagtgtactccaccctgggcaacagaatgagaccctgtc

SEQ ID NO: 266068 - DNA, 402 bp, Homo Sapiens
  misc_feature (365)..(365): n is a, c, g, or t
aacagtcatatgttgctagaggctgctgtactgcacagcataaacacagaagaagatatagaacattcctaccctcacagaaagttgtcatggataagactgctctagaagttgtctgccagtatcagccaccatgccttgcctggattactgcaagagaccagtctccctgatcccagtgtcttcctcctcatgcaaagtggtgtgtgtttctcaagggtaaccttgctccctgtcactcacatacacagcttcttggcctgacacacaagacactgtgtgatctgccctctgcccctccacttggccttattccctgccgtgagtccttcaggggacacttaacccaggttgcatggaaattnccccaggacccttggaccttggggggttcaggttcaa

SEQ ID NO: 266069 - DNA, 970 bp, Homo Sapiens
  misc_feature (12)..(12): n is a, c, g, or t
  misc_feature (86)..(86): n is a, c, g, or t
  misc_feature (92)..(92): n is a, c, g, or t
  misc_feature (102)..(102): n is a, c, g, or t
  misc_feature (108)..(195): n is a, c, g, or t
  misc_feature (223)..(223): n is a, c, g, or t
  misc_feature (227)..(227): n is a, c, g, or t
  misc_feature (229)..(230): n is a, c, g, or t
  misc_feature (251)..(251): n is a, c, g, or t
  misc_feature (549)..(571): n is a, c, g, or t
  misc_feature (734)..(822): n is a, c, g, or t
tgaatcgccctnccctcaagcctccctgagtaacctgggaattacagacgtgtgcccacccacgcccggcctaaattttgtaattntagtanagaatggggncccccnnnnnnnnnnnnnnnnnnnnnnnnnnnnnnnnnnnnnnnnnnnnnnnnnnnnnnnnnnnnnnnnnnnnnnnnnnnnnnnnnnnnnnnnatgaaccagccgcacatggctggtagtntgtntnnaataacatcttccttagctcnctttcacatacccacagagttcgtctgtttaaggtgtacctaccattcagcggtttttaagggggcattagattttaaaggaggaaaagtttatgtttttgttagcatatgtcattaaagaaaatgattataatttatctatggtctttattaattattatggaatggctgtatatagataagagacagaagaaaggaaagaaaattacgcataatcatacatcatactacccctaaaacaataataggcaatacttttgtttgtttctttttttatctcaatgcattgggtgtgtcnnnnnnnnnnnnnnnnnnnnnnnagacagaacctcactcacctagcctggagtgcagtgtgtgatcataggtcactgcaaccttgaactccggagcttaggtgatcctcctccctcagtctcccaagcagctaggactacaggctccagccaccatgcccagctaattttttgaatttttatagannnnnnnnnnnnnnnnnnnnnnnnnnnnnnnnnnnnnnnnnnnnnnnnnnnnnnnnnnnnnnnnnnnnnnnnnnnnnnnnnnnnnnnnngtgtgagccactgcatctagcttgttaataatatcttgataacaaaaagacctcttaaagtgtttaaagtccataataaggccaggcatggtggcaggcacctgtggagctactcaggaggctgaagtgggacaattgctcgagccca

SEQ ID NO: 266070 - DNA, 487 bp, Homo Sapiens
ataagcatatgccaccacacctggcctggagtggtttttaatagtaattacagcagaaaatacttaggtagcacagactctgcccaaggcactgtcctaagcacttcatacacatcaactccttaatccttatacttaccctaggaggccaggccccattaattcaaccttcctatctaagaggaaacccaagcacagagaaatcagtgccttgccactggccacccagcctgctgtgttccagaaaccatgctcatgaccagattcagctactaggagcaggtgaccctgatgtgataacactgaggataggacaaaggcccccactcttggcctgcatgatcccgtgaccccagcaaacccagaaagggtgtgatccaaggggagacagccctgtggaacaatggattagatcaaattgcaaatcaacagagtcacctcttgattgcttaacacacaaaatttaaaaagaaagaaaaaggaagcc

SEQ ID NO: 266071 - DNA, 1355 bp, Homo Sapiens
  misc_feature (548)..(548): n is a, c, g, or t
  misc_feature (569)..(569): n is a, c, g, or t
  misc_feature (884)..(921): n is a, c, g, or t
  misc_feature (1255)..(1255): n is a, c, g, or t
ttttttttgcatcaatgctgttagtttaatgtggacagagacatcccacggcgtgactgttagttaggatgagtcagcttgggggagtttgtgcttcctgcttggtgtggccagccacatgccaaggtcccctgccttctagcccagaatgacgggactgggcagaacacccccaacttttagctgccacttggctcattacagcagtaccagtatgggggtgggaggggtgaggctgtggagtgaaggcggcgtatagggcagagactaagaggtcctgtgagattcttagaggagccatcctgctccaaggggcctgagctgagtgtggtctgtgagcatctgctgctcctctcagagagggagatctcactctctgccagtctgtctagccccaaagagcctggtttttctcagtatcagtgtagctcctggggacttcataggcataaagtcagtccatttccatgaagataaggggattaggaaagaaggttctactagttggcatagcaaacacgaggccaacaccatgagaacagtagggnagtggggggtgagggctcagncccaagcccctgactggcagtgatggcccatgctcaggaagtgggatcctctgacctccccttgaatccctcaccttcccaagtttcagagctgggccgagctgttgagtgaaatgaccgaaggcagagtttgtatgttctccccgtgtcgccccatccatggaggagttgaagtttggaggaggggagagtggtactccctgtcgtcaactcctcagcagaactgatagttgttgggctgcagcaagggctgggcgatatccccttgctcgcagcaggtcaggtgctcactagagctctcctcctccagctcannnnnnnnnnnnnnnnnnnnnnnnnnnnnnnnnnnnnncggcagattggtatagtcccgctctctcctgtcctcttgggcctgctcctgaaggaaggagcagatctgctggaaggtgggtctgtgggtgggctccaaagcccagcaggcctgcatgatgctgtatatattctttggggcaaatgcaggctgggccatttggtatccatccttcaccagtttatagaacttgctgttcaccaggatgccagggtagggattcagcccaagtgagaagatctcccagaggaggatgccataggaccagacgtcgctctgaaccgtgtagacacagtcaaagatgctctctggggccatccacttcacaggcagngcgggcattgcccttgacaatgtagttggagtcattcatgatgtccctagccagcccgaagtccccaatcttggccacatgaccattggtcaaacagcac

SEQ ID NO: 266072 - DNA, 481 bp, Homo Sapiens
aggaaaaattttaagaataaacaaatacataagtaaaggcagggatcttgaaaaactttaaaaagatttttattttaaaatgatcaagaatataacatataaaacaagaagactaaaaaacagaagagaataagaggaggaccttaaaatctattggatcttagatatggcctcgctaggcaaatcgacccagtggtcgatggctctggggggctgcgggttgactttccctgccaactccacattaaagatggactacattgctgtgcctgctaggtaacccatcagagctcccatgcttcataaatgatagcctaggaattgggactgtcatctctgattgtagtcacttcaagacagtagtgagggaggcaaggcttgctttcggctccctttcatcctcacgtggaacattggaaccacccaatgttcaagatctttctattcccatcatcttccacgccgagccctatgcagtctc

SEQ ID NO: 266073 - DNA, 635 bp, Homo Sapiens
ttactagaactttagtagcatctggtctcataggttatttgggcattcagatgaagaagatttgtcccagaaattagaaactcttttagtgctaagcctcttactttgatattgtctagctaagtttaatgagtactttgggacatgccaagccagagatacaaaccaaagtgaagcaattgggccttttctctgggatatattatcaggcagctttaaaagtaagattcaagtatatgaccagtgttatctgtaatatgttaatgtcagccacatacctgcatgaagatcatgcaactgatgtataattcagaattgaaccatataggttctttgagaacctgactttttattagctccagggtttacagactgacactgtcacagcagctcaagtctgaacttgccaaggtacaacagtgtgaatgattgactttaattccctgtcatgtgttttcttgagcctgttacaccactgcggtatggatgtgtgacccagtgacaatgttcactgccagttgttttgtccagttccacagagatcattggccctctactgcagttgtgttacaatttgcaaatgtttggatgataccatgttttttatccaaaattaaaaaccttcagtcttttgc

SEQ ID NO: 266074 - DNA, 524 bp, Homo Sapiens
gggtttttttcttcaaacattttgatctgagccaaagcaaagagtacattagaacagaccagaaagacgtgtacaagtagacctgtttccttctcaaacatttaacaatttacttattaaacattaagctgagtcagtttaaatcaaatgatataactgattattactccaaacaggaatctgttgtttcttagtgtctgtaggtagaagtttcacagatgcaaggacattatttacctgaaggatcattcctgttacaattagagggcattcatacaaacattgtttcctgttttatttgccttttaaaatcgtgaaacatgacatgaagacatttccttatgtaattacaaaacgattagtacacctaacacaattcacaatcattccttactgtcatcatagtcaaatgaatgtcattatattcagatgttcccaatttaactaaaaacatatttgaaaaattatttacaaataaaaaacatttttttaaaatgcagggtcttgttccagcctgggagaca

SEQ ID NO: 266075 - DNA, 560 bp, Homo Sapiens
  misc_feature (13)..(13): n is a, c, g, or t
  misc_feature (462)..(477): n is a, c, g, or t
  misc_feature (512)..(520): n is a, c, g, or t
gaatatataattntaaaaatttgaagtgagaggaatagtctaatatgtaatagaagaaaaagtacttgctcaggtagttgtaactcttaataaaaccaatgactagaatacaagtggaagtaaaaaggtggagatagattaatagcctaaataacgagagaaccttatgccttttttaaaacaaaacaaaaccaatgagacattttacttagtcctaaaatctagcctggatttatgctataatgatatctatttttcatgttaaattgtacattactcagaaattataaatattattactttataatttgaaattgtgtttgctagccaccttgatgtattttcttccaaactgccattaagatactattgaaaaaatagaaatagtcaaatatttgcaaggtataattgttaggcaacatattatagcatgtgttaagtttctgctaggcctatggaaannnnnnnnnnnnnnnncttccatttttattcactttgaggaagtgttgccnnnnnnnnngatgtacttaaatggctaaaataaaaaagacaatcacaag

SEQ ID NO: 266076 - DNA, 708 bp, Homo Sapiens
  misc_feature (20)..(20): n is a, c, g, or t
  misc_feature (130)..(139): n is a, c, g, or t
  misc_feature (582)..(644): n is a, c, g, or t
caggaaaggaggtgggactngagtcaacctggaatagctctacagtaacaatggcagcctttttgttgctgggacatccatacaggcaacttagctggtgaaaggactctggattggttggcagtctgcnnnnnnnnnnccaaggtgatcactttactgtagaagaaatgaggttaacagaaaagagtgagggagaacaacaactcaagcccaacaactctaatgcacccaatgaagatcaagaagaagaaatccaacagtcagaacagcatactccagcaaggcagcgaacacaaagagcagacacacagccatccagatgtcgattgccttcacgtaggacacctacaacatccagcgacagaacgatcaaccttcttgaagtccttccgtggcctactgagtggattttcaacccctatcgattgcctgctctttttgagctttatcctgaatttcttctggtgtttaaagaagccttccatgacatatcccattgtctgaaagcccagatggaaaagatcggactgcccatcatactccacctcttcgcgctctccaccctctacttctacaagtttnnnnnnnnnnnnnnnnnnnnnnnnnnnnnnnnnnnnnnnnnnnnnnnnnnnnnnnnnnnnnnnattattgtcttcattctgatcttcttctgattcttttgtttcaataaacagcaatgagcatgaa

SEQ ID NO: 266077 - DNA, 567 bp, Homo Sapiens
  misc_feature (448)..(448): n is a, c, g, or t
  misc_feature (455)..(455): n is a, c, g, or t
  misc_feature (463)..(463): n is a, c, g, or t
  misc_feature (483)..(483): n is a, c, g, or t
  misc_feature (492)..(492): n is a, c, g, or t
  misc_feature (503)..(503): n is a, c, g, or t
  misc_feature (510)..(510): n is a, c, g, or t
  misc_feature (542)..(542): n is a, c, g, or t
cggatgcaggctcagctcctggaactccggacaaacaactaccagctttcagatgaactacgcaagaatggtgttgaactcaccagtcttcgacagaaggtcgcctacttggataaggagttcagcaaagctcagaaggtacctccctccacccacccatccacctacccatccacccttgcttctacctatctgactcattcatccctccagtgagcacctacagtgaaccagacctaatgttgcatgctgttttcacgtagtcatttaaaggattctcaatggaattctctttagttgctaattttacctaatcctgcttaatttagtgattaattttaatttacttttaattcatttctaatttcagttactcattcttcattcactgacttttaattaagggggccgaaggttatttccctttaggtgaggggtaattttaggntgggcangggccgtngtttttacaaggtcgtgaangggggaaanctgggggttanccaactnaatcggcctggcaggcacatcccccttttggncagtggggtaaattggcgaggaggg

SEQ ID NO: 266078 - DNA, 559 bp, Homo Sapiens
  misc_feature (449)..(449): n is a, c, g, or t
  misc_feature (525)..(525): n is a, c, g, or t
  misc_feature (537)..(537): n is a, c, g, or t
  misc_feature (547)..(547): n is a, c, g, or t
ccttcctgcctcccccaaaggctcagctcctggaactccggacaaacaactaccaactttcaaatgaactacgcaaaaaaggtgttggtgagccaggagggccttattagaagggggtggctttggggaatggtgtccgaggttttcccctcagaggccctggcaggaaggcctttcagtttccttgccactggctgaggctgagtttccctgctttcccgacaccagaactcacccagtcttcgacagaaggttcgcctacttggataaggagttcagcaaagctcagaaggtacctccctccacccacccatccacctacccatccacccttgcttctacctatctgactcattcatccctccagtgagcaccttacagtgaaccagacctaatgttgcatgctgtttttcaagtagtcatttaaaggattctcaatggaattctcntttagttgctaattttaactaatcctgcttaatttagtgattaattttaatttaattttaatttcatttctaattntcagttactcantctcattcantgacttttaatt

SEQ ID NO: 266079 - DNA, 580 bp, Homo Sapiens
  misc_feature (399)..(399): n is a, c, g, or t
tgccttggctgtcacacggccaaggttctcccatgccttcctagctcatctgacatcttcctctcctactcccagcatgcccctaagtcaccttttttttgtaatcagatctcaggttcctttatcttagttcatagtgattatttcgcagaacatgacaactcgcttaaaagaacagtgattgatttcatggagcacttataaaacataggtactgagtacttttacatatgttatttcatttaacctttatggtaacttgattaaaactttgtaacttttcaggtagctttgtttttgtggtacactggaaggaaagaggactagggaagttaaaaacctttcccatgatcacatgggcaggaaactggggagagtgagaactgggaatccaagtcntacctgatttcaaaacttgttcttagtctggaacttttaccataataatagctgccatttattgaagacctactgttttctaggacctgtaaaaaaacaactctctgaggttactaacttaaacaatggatcaaagttagtgttaccagtaatggggcagatggatagcttctgttctttg

SEQ ID NO: 266080 - DNA, 720 bp, Homo Sapiens
  misc_feature (26)..(26): n is a, c, g, or t
  misc_feature (406)..(406): n is a, c, g, or t
  misc_feature (462)..(462): n is a, c, g, or t
  misc_feature (704)..(704): n is a, c, g, or t
agctggtgtggtattagcgcccactngaaaagccccagtgtaatcaggatattcagggagctctctccgccaagagccccacagggctcccaggtctttagcctgcttccttcccaaacctgactgaacaaccaaagatcaccacacgtctgagggaagcctacagcgagaaagagactaacaaagacagaaaaatggacattaacccccaaaagagacaaaatctgactggccataaaagagtgctttaaaatataatttagcaataaatcatctacaaccccccattaacatcccagagaagatcgcattttccaaagatggccatgaggatacttttctacagtgtgaccttggcacccctctgtcaggagcaggagtcgaaatttccttctggagtctgggncaggccctggctactttagcctaattggattgtggcagactaggccagctgtgtgnacttctgagcctgggtcataaaaggccatgcggctgctgtcttttcactgaagtggtggaaggatccaactagcccgaagctgccgtgatgtgagggagcccaggaagaggccaccccaagctgctcagatgggcagtcctagttgtgcagttgtctgtcccaagcatcagacttaggagtgaaggggccctcggatgtttccagacccaagatctagtcaccctgcagccttcgggttttnccagctgaagcccaga

SEQ ID NO: 266081 - DNA, 696 bp, Homo Sapiens
  misc_feature (403)..(403): n is a, c, g, or t
cggatcacccgcaggggactggcttctttgggcaagcagtcaacaagttcactgcactgtttgtcaaatcccaacaagcgaatcccatagccatgtggggaagaaatcattcgtccatcggggctgaagcaaagttctttgatgtaacccctgcctacattggcttcttcaatgtaatgagtcagtcgtagagaacagcgaggtgagacaggtcgcactggagctccttcttggaattcattagacacaagtacactcctcatcatcactgttgcttgagcaccgaagaagagtggcccagccttttgggtgcagctgtaaggacgtgatgcagtttccgtggtcactctcaccaagaacttcaggggttacgacttcaagactattccgtggtgaaactccnttctctttgagaggctcgtgacatgtgtttctcagaagaattagaatcactatgatgacaaggtgagccagaaactctaggaccagatgaacttgatgaagtggtcaaatctgaacttgaagtagttcttcttgctcttaaaatgggatagctgcctacttctaaagacttagttaagtcaaggtcatgcaaaattaagagatatccagaggacgttgaaatcaacattttggaacaatctggtgttaacctcattcgcatgagaaaacgtgtgtgaaagaatttcttatggg

SEQ ID NO: 266082 - DNA, 484 bp, Homo Sapiens
ggaaaatgaaactagaagagatttctaaaagtctgagatatatttgctagatttctaaagaatgtgttctaaaacagcagaagattttcaagaaccggtttccaaagacagtcttctaattcctcattagctaataagtaaaatgtttattgttgtagctctggtatataatccattcctcttaaaatataagacctctggcatgaatatttcatatctataaaatgacagatcccaccaggaaggaagctgttgctttctttgaggtgatttttttcctttgctccctgttgctgaaaccatacagcttcataaataattttgcttgctgaaggaagaaaaagtgtttttcataaacccattatccaggactgtttatagctgttggaaggactaggtcttccctagcccccctagtgtgcaagggcagtgaagacttgattgtacaaaatacgttttgtaaatgttgtgctgttaacactgc

SEQ ID NO: 266083 - DNA, 716 bp, Homo Sapiens
  misc_feature (73)..(82): n is a, c, g, or t
tttggtttaaagctacagaaaggagagagctagagaagaagaaaaaaggtattttgcctgaggacttgaagcnnnnnnnnnncccttttcctccgcatgactgactttctcacactcagattccctccagcctgccagagacgtggtagctgccctgccaagagctatcctgggagggctattgaacgagctttgagtaagtacacacacggtggattttctcctcccctcggtacctgctctgcacctgtacagggagcagtcccacacatatcacctgatcacagccctttcagggaccgtgagaaaaataaagcccaggatagaaaagacatgtttgtcatctctccagggctgcagccagcttccagcagtcccagtgcccagaaacagcacattccagcccgcctgtgcatgcatgtttgctggggcgcgtgccaggtgggggtgctgggaaggggggggcaactagaggtcacctttgtaatgaccaccttgctgcccccgttctctggcatgtgctgactggtagcttgagaaccctctactagaatcagtatcatagtctttctagatagcagtctgtatgtgctgatcgcagaattcataaccaggattttatatatttcacctataaagcccctcaaatggaatttcaacgtgtgtctgtatgtgcatatttaacaggagcttaataaatattttccaaatgcaaa

SEQ ID NO: 266084 - DNA, 428 bp, Homo Sapiens
  misc_feature (26)..(26): n is a, c, g, or t
  misc_feature (71)..(71): n is a, c, g, or t
  misc_feature (345)..(354): n is a, c, g, or t
cccgggaaagtgcctgtttcctgggnaactgggaactgcctggaaagcctggctgcaagcccctggaaaanatgaacaaaacatgtccttttcctaaccctgggctttatttttcctcacggtcccctgaaaagggctgtgaatcaggtgaatatgtgtgggactgctccctgtacaggtgcagagcaggtaccgaggggaggagaaaatcccaccgtgtgtgtacttactcaaagctcgttcaatagccctcccaggatagctcttggcagggcagctaccacgtctctggcaggctggagggaatctgagtgtgagaaagtcagtcatgcggaggaaaagggnnnnnnnnnngcttcaagtcctcaggcaaaataccttttttcttcttctctagctctctcctttctgtagctttaaaccaaacc

SEQ ID NO: 266085 - DNA, 703 bp, Homo Sapiens
atgtctgttagatggctggctggaacaaagatgtgggaataaggaagaaaagaattcctagtctgcttgggaaggcaagactcacacatgttgaaagtattagagactgtgaagagagggcatatcattaagtgctaaattgcaaggtatggactttaaatcctaaaggaattcggagaagacagacctaaaggaaactccttcatcaggggcttgaggtggggagtggggtggaaagggcaaagtcctgctcttatcggaagtaactgggattaaaaatagggagcatgctctacacctgtgtatctacaccagctgcagggcatgggatgggggtggggggtggtagaggataactacgcaactacatagtagcaggcagaacacaggaatcattttgccaccagttaagccgtgtcaaggtacaaacagcaaaatatgttttctgtcagtgtgattttttttgtacccttgagagggatttctgtatacagaaaagattcaagagttgttttgtcttattgattttaaaaattagtattcgatgtattgaagttaaaattcaaattcctgtttttctctgaagaatatagttcaacttacaaatctgattctatgtaagcaaattttaaacaattattttaagggaaacttacaaattacactcaatgttttaaactgcactcagaaattttgtatgttc

SEQ ID NO: 266086 - DNA, 710 bp, Homo Sapiens
  misc_feature (647)..(647): n is a, c, g, or t
ctagggactgggaatccaggaactgagttcagagcccttgggaaagaaggaattgtagaaaacaatcagatagcactacttgacttacagttccttatgatttgtagtcacttctgacattattgttgctaaaacttttctcatactttttgtttggcaaacctcctcaagggggctttaagctggaggaggttaccagctctgtctcagtctacacccacatccctgcccccagtaatcctcagatgcaggaccttcccagtgcctgtgacaactaccactgcaggggtgtccctgggctgcagactcgtgggcatgtgggttctggattccgcagcagcctagggccctccttgcctctggttactgactccccaggcacccattgttgtggcaccctttgaagcactgcttgtttatgttcttagggcatttgttgcagagcctattcctgctgcagacctataaaatttcatcctgtgtctgtagttctttattacataaagtaagaaacacataaagaagtttttttaatcagaactatatagtaagaaaaataaaattcttgactatatttcatggtgaaaacagctactaaaatagttgtcattcatatcataaaggaggtggacatttgggtgcgaggnataagaaattctggcctgttttctttattggggattatctttgctcagctgcttggtatcatt

SEQ ID NO: 266087 - DNA, 1357 bp, Homo Sapiens
  misc_feature (31)..(31): n is a, c, g, or t
  misc_feature (857)..(882): n is a, c, g, or t
  misc_feature (1298)..(1298): n is a, c, g, or t
  misc_feature (1313)..(1313): n is a, c, g, or t
agattgggttttactttgttgcccaggctangtctggaactcctgtgctcaactgattgtctccagcctcccaaagtgctgcgattataggtttgagccgctgtacttgtacttcgcctgatttatttttaaatatattttgaaagattagcttgaaatctttgggtgctaacatagctgcatcttaagtgtgggaggaataaatgccttttggaggatttcttgacccaaatcatccaattccagagtaataaggataccactttcttctgagtttgatggaacacggattttaaaatgacatgaattaaccccttgaataaggtgcttagcgtttcctttctctttaatatgtattttctcacctcacaggggagaagcctttcaactgcagctgggatggctgtgataaaaagtttgctcgttcggatgagctgtcacgccaccgcagaactcacacaggggagaagaagtttgtgtgcccggtgtgtgaccgacgtttcatgcgcagtgaccacctgacgaagcatgcccggcgccacatgacgaccaagaagatcccaggctggcaggcagaggttggcaagctgaacagaatcgcctctgcagagagcccggggagcccactggtgagcatgccagcctctgcctgaaaggtccattaggaaatcactcatgggatttttaaaaagcctctttccaggaatggaactgatggattcctctcccactgcctcacccaaaaaaaacggtcttggcggcctaggggaagatcggggagctggttttgatgaaagtatgttaacttttcttttccacttgggaccctgttcagtatcttttgtagtttcagaagnnnnnnnnnnnnnnnnnnnnnnnnnnaaagaaatggtagaaaatttgataatctgaatcaccagcattcaaacaaatatttcggcaataaagtttacaaaatctggatttttacaaccttttctattgatgttttgtagaaataagacagggtactaatttttatactggtttttagaaaaatatttatattgttggtgctcaaatcaccaatttctagctagatcattttgcagccttcttttcagtgtttaataacaaagtttttcctaatggcccttcttttagtaaactggacatgttattccactacaaaaaccacaagttatctggccttttagatctttttggaatccggacctggttgagtaaggacctcttaaaaggggaaaaataaattttggccggtcagcttcttccataacggtttccagggaaattcnaaggcaatcattccnggtcacccaaagaaccaaaattttgggttgactggaactagtga

SEQ ID NO: 266088 - DNA, 487 bp, Homo Sapiens
aaaaaatcttatttaaatttcacgttattgaattaactcaggttagaaatgcaattgtttgacataagccagtcttgaattactatcagctgttgtatttatatttttccacttcaacttctagaatcatttaaaactatctgatagtttggaacatcaatttgagattgaatcctcattttagcttggtggaaagaactgaatgagaaaactggatttttttccctacttgtcaggaggcttactctgaagtagtttgaatttcataaatccattaatgattagtaagcttcacccagaactaatctgtggccagctacaggcttttggaaagaggcatactttctacagcttaaacattacattcaacttaatcatcaatcctagaaacctaaaatttagagaaatttgcctctgcctgtctgaaaatttgtctctgagttagaagtcctgaacagaggaagacttcagattgatttcttttctt

SEQ ID NO: 266089 - DNA, 713 bp, Homo Sapiens
ctgagaacatctgcccagcctggatggctctcttttgtataacatcccagcattgtctggctttgctcactggtcacagccagggttctcatgctcatctagtccttccctcaccttcacccatgtcaatgacttgcttaattacttaatttctgcttaattttttgatagcctgaatgaaatgggtcctatcctcttcctgaatcatcctatgtagggtgctctccaaatcctgggccttgtcactgggtgactggcagaaagataggaccattgacagaacagtgaggtcaagggggagctgacaagagggaaaagataagttaatttacaacacaattagtataagcagaggtgatgtttaggtggttacagataaggaactagaactctagtttgaaaatctgtgtttttaaataacactggaagataaagttcattcctcaggtattcattccttaaatgtaaacatatgctgttaccaggcactgtgctaaacactgtgagtataaaagtgagttctcactttaatgcctttaaggcattcactctctggtgtgagacacaggtgtgatatagctgtataatatgtctacatatttacctttagcgtaatctttccatgtaatactcagatcattaaatctggaaagaaggaaggaagtctaaaagtgagtactcactttaatgcctttaaggcattcacaccctgg

SEQ ID NO: 266090 - DNA, 787 bp, Homo Sapiens
  misc_feature (118)..(158): n is a, c, g, or t
  misc_feature (186)..(400): n is a, c, g, or t
aaaagagcaagccccgaactcctgatcacgtcagcgggagtctcagctgggtgccgggctgtcttgaacacttgctaattttgggtgttgtttttcctcctctggctgggctataagnnnnnnnnnnnnnnnnnnnnnnnnnnnnnnnnnnnnnnnnngagacagggtctctctacagtggctcgnnnnnnnnnnnnnnnnnnnnnnnnnnnnnnnnnnnnnnnnnnnnnnnnnnnnnnnnnnnnnnnnnnnnnnnnnnnnnnnnnnnnnnnnnnnnnnnnnnnnnnnnnnnnnnnnnnnnnnnnnnnnnnnnnnnnnnnnnnnnnnnnnnnnnnnnnnnnnnnnnnnnnnnnnnnnnnnnnnnnnnnnnnnnnnnnnnnnnnnnnnnnnnnnnnnnnnnatacctgtgagccaccacatctggcctgaagtttccttttggaacttaaaagagtggatctttattgcagtagctcttctctaaataattcaatagcagatctctgggattccctttttattattatccataggcactggaagacaagatggatctttttaaatgctagaagttttaaccagttcttaacatgtctttgttgaggcaccttccagaatataagataaaacaactccagtttctgttatagtgacttgaatctcagagtcaagagcccagtgtcaaagaaaattggctttgactttttgtaatctaggagcacgagtctgtgaggtgtttattcaaagagttaaagagcctgttttgtaccaaacaataaaaatgtaa

SEQ ID NO: 266091 - DNA, 460 bp, Homo Sapiens
  misc_feature (346)..(346): n is a, c, g, or t
  misc_feature (388)..(388): n is a, c, g, or t
  misc_feature (401)..(417): n is a, c, g, or t
  misc_feature (430)..(430): n is a, c, g, or t
ataacttcaatcctaatgttattaagcatatcgattcagggtatagctataagatgaagtcctaaaagtataatttagactaaatacaaatacccatttcgctagctgttttgtttcagaggacttgttgagcagcttcactaataatgccatttttgaagacatggcaggttcagaatcaataaactggaagaattgttcagagcatcttttttcagacagtgatgacattgattctgtatatgataaagtgattctgcttctctttgacaacttgcatctctcctacatggaagtaagttttattcctgtcaatgctgtctttgtgtgtgacagattaggattnaaattatggtttgactttttcctaggcagcgtgatccagggncaagtgggcttannnnnnnnnnnnnnnnngaggacagagtcncactctgctgcccggggtgggagtgcagtt

SEQ ID NO: 266092 - DNA, 738 bp, Homo Sapiens
aacagcgacattaccacatcgaaatgtaagatgttattattccaatgaaaacaagccactgggggactctgcacacccacctagcccctctcttctccctgagtccgtgtgaggttttctaaagtttgaggccgtcctaagaactaggattttcgtctccattatcatgggatgagtttcatttcttcttcacataggcaccacagtcctctcgtggattattgccctcatgtgggttctttttttaaggaccagcagcgtgctgagctctgtacctcacacccagaagggtttcgtggagcctaagagaatcaaatttaaggataaagcattagggtggccagaactctgatgtcacttttcaaactaactttgcacacagtcagacccaggctttaaacctgactccactccagcaggctgcatgaccttgcaaccgagcacttagcctctctgagctccgagttaccttctcttcatggggttggcactggcctcagcgggacatttggtgactgaccaggatgccgtgggagcttcagacggcatgatgtatggggagcgcgggtcggtgggagctacttgttgcccccctcttgctacaaatgcagatttttcacagaaaagaacatcatcgtgttggtacctcttagacacctgattccatgacaaagacttccctctaagcacccacatacctgagaaccccatgtcgggctggaatcaacacagtgtatg

SEQ ID NO: 266093 - DNA, 1013 bp, Homo Sapiens
  misc_feature (26)..(26): n is a, c, g, or t
  misc_feature (356)..(356): n is a, c, g, or t
cgcggcccaagcaattcggcacgagnagcaccactcaattggttggtctattgccctggggaattatttgaaagataccagatcttgtgagatattgggtctgatggcttgtgctgaaatgccatgtctagcccatgaccacttagaatctactcttcatgggtgcctggttatagtaaattgcctcttttatctcattttaagtaaaaacatctagtctggttttcagatgggaaatttgggactttaaaatttttctgggattctatttgggtcttttttctcttcttgtttgagctaacttgtggatttaggtaagtctttgggccacaacaggacaaaccaacataggcttnccaataaatcttctgttttttgatttggtctgccacattttttattcagaaaagctctggtttaacattaggataatatttagacagccattcttatggataagacatactagaaaggaattccctgctgctggtttattcctaattaatagattgctttcttgaatttatacacaggttacattttctgatgctttatgcttgggtttattatagtaaaatttcacttttttccccaccccagaagaaaaaaatgtattatgtttctatttgaccttaggccaagattgatattttggaaatactttgttttcaaaatggaatttagctaatatagaaaagtagtagggaagggaaaggtagtattgatgatgagtttttcccgtctaatgatcaaagacgaactcccctgatagctttcccttccatacagctgctgtggctctggcagtttccttcaactgcctttttagaggaagggattccacaaagggccctccattcacaccagtgccctggagggtgggtttttattcctttcagaatttgcccattagtggatgtaaaaataaggttgaatcattgaaaacatggctcttaaagcagtccagttgggtagaaataatcttagttttgaagctgggcatggtgctgcat

SEQ ID NO: 266094 - DNA, 378 bp, Homo Sapiens
  misc_feature (32)..(32): n is a, c, g, or t
gtttgtagagtccagggcaattttcctaaagnaaaattcctaggaaagaaagtcatacgaccacactcttcaccttttcctcagcaacttcaagcagcttgctttgtgcccctttcatttcccaagcaactaggtctatcggggcccggtgggggcagtggctctgtttttgctactactgcgaaagcaaaggcatcttccgtcacctttgcctcctatagagaagagcctggttctcatgttttcccccatctcaatagctcagggctttgctaatcttgctgaacacttcagtttttagatggtatatcaatgaggcattcaaacagagcagtttatacacaaaaattctgtctgctttgtaaaagattatccttt

SEQ ID NO: 266095 - DNA, 680 bp, Homo Sapiens
  misc_feature (608)..(608): n is a, c, g, or t
aaatccattgccgtctccccccaactccctcatgtgcagtgattatgtcttattcaacatcgaatctctgtgcctggcttgtaggaggtgcacaacgtgttgattaatctgagaggaacgtggcacaaccaaagacagcttgcagagcagccagccccagcctctgatgttataaatgtagatgtgctggtggtgggccagttctgtcgtgggcttgggtcagacctcacttgaggactgtgattactcttgggctttaagctttgagaggggagaggagaaattagaaaaggaaatggcgggcctcgtatacaggattttatgagcaggttgtctggaaaatagggatgagttgcctcacatgaatagtattttttcctattcatcacacaagcttaagcagagtcttgggtgatactgtaggggggcagtcacatgcttcatagtggattgggctggattcacttactttcttttctttgtctcttgctgctttcttctgacttttgagcttataaaaatgtatgttagaagcagtgttgacagtgtttggcagctttatgggtgtgtgaagagtggataaggaggaggagatgaaaataacgtanaggttttaaaacggtgtttggggatggcactcttgacgattggaaaaataaaatggaaagccattctggagg

SEQ ID NO: 266096 - DNA, 720 bp, Homo Sapiens
  misc_feature (515)..(590): n is a, c, g, or t
ctcgtctgtataatggaagcaagacttccaacctcacggagactttgtaatttgttctctgagagcacaggggtgaccaatgagcagtgggccctactctgcacctctgaccacaccttggcaagtctttcccaagccattctttgtctgagcagcttgatggtttctccttgccccatttctgccccaccagatctttgctcctttccctttgaggactcccaccctttggggtgctccaggatcctcatggaaggggaaggtgagacatctgagtgagcagagtgtggcatcttggaaacagtccttagttctgtgggaggactagaaacagccgcggggcgaaggccccctgaggaccactactatactgatggtgggattgggacctgggggatacaggggccccaggaagaagctgccagaggggcagctcagtgctctgcagagaggggccctggggagaagcaggatgggattgatgggcaggagggatccccgcactgggagacagnnnnnnnnnnnnnnnnnnnnnnnnnnnnnnnnnnnnnnnnnnnnnnnnnnnnnnnnnnnnnnnnnnnnnnnnnnnnaaacagggagcgggtaagacaatccatgctctaagatccattttagatcaatgtctaaaatagctctatcgctctgcggagtcccagcagaggctatggaatgtttctgcaaccctaaggcacagagagc

SEQ ID NO: 266097 - DNA, 600 bp, Homo Sapiens
  misc_feature (36)..(36): n is a, c, g, or t
cctagaagttagtaagtcatattattgtcattatangcatttgaatagtgatactttttacattcctttttaaatatatgtatttaagattaaaatcagagtcaatttaaaagaaaagattgtttcagatggactatacctttgagattcaaagtgagatcagtgggccagagccatcagcatcacctgggcatttgttaaaaggtactggaacctttgtcccctctcactccctactgaaccagaatccgcatttgaacaacatatcccatgccacttgtatgcatattaaaatctgagaaactatggggtgacacaagagttggtccaaaaccatgcaggtggtttacaaatggctgaactttgggactcgctgctttagatcagctggcgacctaactcctgatcctcgctgaaatcagctagtggaggtcaggaggaccaggaagtaacatggttcgtgtttacgcaacagggagtcacaacccatctgaggaccatgaggttgattaatgaatctaaaccagcagttttaggggtgtttctggtaagctagagatgactttaaatacgcttctgttcctgttgtgctacatatat

SEQ ID NO: 266098 - DNA, 807 bp, Homo Sapiens
  misc_feature (789)..(789): n is a, c, g, or t
agcatctatactatggcttaaaagttttcctccttggtcaccatttgggaggtgatggcttcaaagctaagctttgctctcatgtgacccttcttttatcttaatacccaataagatataaacctctcagagtcaacccagtgtagactcaaagggtcttagcttcatctatcagataagatctatctgatttatacaaagaatggtgctgtttttatatacatactaaaaaaatctaattctcaaacaattttcttaatatttatgccagcaaggtcaggaaagactattttgtcctgtttaactttagtagtgaacaaactgctagagacatctgtcatccttaacaggccactgtggtccttatatactgaccctcctttccaattaacgtcctttaatcccatactagttccataagagacttgggcacataaaagcagtattttttttaatgcctagtaaactggccagaaaaaaatattgcccatggtggacctgtttctatcccacctctttctatggcctatataagtctatacatgcccagttccgtacatactccatttccaaagagcccccaaacccctggatagtagcactaccatgaattttagggtcacaaaacatttccttctgaaggaagcagctgcctcagcagtgtcactttagtgaccactgcccaggcttacttcactttgcctccccctacacatcactgccctctttctgccaccaaacctcactattccagcaatgatgcctcccctggtgtctggaaaacccatnctggtgcactaaaatgct

SEQ ID NO: 266099 - DNA, 921 bp, Homo Sapiens
  misc_feature (20)..(20): n is a, c, g, or t
acctcagtcagtgacacggnacgaggaggaggaacagaaacacgcccccaccagcactgtctccaagcaaagaaaaaacgtcatcagctgtgtcacagtccacgactccccctactccgactcctccagcaacaccagcccctactccgtgcagcagcgtgctgggcaaaacaatgccaatgcctttgacaccaaggggagcctggagaatcactgcacggggaacccccgaaccatcatcgtgccacccctgaaaacccaggccagcgaagtattggtgggagtgtgatagcctgggtgccaggtaatttggggccagggacagggcaggaacctcttccctgggagagtggtttttcctgcttttctgctgctagaaatgttgctgtatgggagctagtacaatagaaagtgcccagtgactgcaggcgacccttaccgaggattttattcaagtatccaggggaggcctctgctgaacagcacattgtataagcagcgttttccttctttaagcctgtaatcaatacctctctgcctttacaatgggctctgcttcccaactaggttgattaatagaaaataaaagcctcctggttctttatgcctgagcctggaagaatacctggtctggggagttcctggctgacatctagcaccactctctgccaggaagccctggtggtcagatgggcttcttgtgtaggaagaacctcctccgagtcttgctagggaagggtgaaattggcccctctcagcccctcctcggaatcagctgctgggcggcgagaccaagccatgtgtgtttctctgctcatgcactgctatcttcagaggactcctcctgtcccgcgaaggcttgtcttgaaaattgggccctggaataaaggctgagaacgtaaccttctgaataaactcagt

SEQ ID NO: 266100 - DNA, 562 bp, Homo Sapiens
taggcatgagccaccacgactggccagaggacaaaattttaataaaggtcttagcttaagcagtaatcctacttcattaagccttcctggggtgcggtacacaccgttaattcagcaaccctcagtacatactaagtatgctcagtgctgtgaaagtggattacaccaaattaagtcattcttatcacacccaatcaaaagtcaagaagccagggataaaagcacctcaggcacataacattaatctagtaatgtaattctctgcacatccagctggtgaaactgcgtgctgtaagctgggaccagctttgtccataactgctgagagaacttgctgaagctctaggaataattttgcctgcccggttgctcaccagttgtagttgccagctcccagcacccttcctggtgccaataaactttctcaaagagcaatactgacatttcttttgataaaacctccagccttctctgtgttgttccgacataccgaggaccaactggtctacatggatgccctgaacatgcaattctttcttccaaaataaaacattaaatagag

SEQ ID NO: 266101 - DNA, 696 bp, Homo Sapiens
  misc_feature (15)..(15): n is a, c, g, or t
  misc_feature (37)..(37): n is a, c, g, or t
tttttttggccctangaccccagttttcggcacgagncgaactcctgggctcaggtgatctgcccgcctcgtcctgtcaaagtgctggaatacaggcatgagccaccatacccagcctatgctgtgactttagacaagttaggaaagtacctagcagagtacctgggacataagtaggttttctgtaaatgtttgtgacctttggctccgttgtgaggagagactgaggcatacattactccacgctacaaataattaactatctatttgatttgactttcagtgtgggagtgcagagcttttttttctaaaagtgctaattaaagccagtcctcatttaaaaatatagtcagatgagtcagcaaagcaagttatttcaaaatttgaagaaatgagacaaaacaactttttgagtaatactataacctatgaaaatttggcagttagcaattgaaaaccttgtactttatcatctgtcccttaaccatggcctaccattgaggagaaaagattatagagcttgacataggccacaatgaagaggttctgaagagtcaaactattattgctttcatttcataaaccacactgttaaattcatttgtgtgtttggcatgggtgtgcacacatgtgtttcctaggttaagcatttaggaaaaacattatgaaatatgacatagacacaaaaaagtttat

SEQ ID NO: 266102 - DNA, 417 bp, Homo Sapiens
aaatgattacacggtatacactgtttgcaccttgctttttacactgaacagtgtatcttgatttatcgccgagtgttcacattagcacacataaaactgcctcgtccattttaatggttgcatgatattccattagatagctgtgtcatattctatttaaccagtgatttattaatacatatttaatttattttcaactgttatgtatgttttactgtacctataggataaattacaaaagtggagtttcctagatcctaaggctaggttactttttaatttgacagacatttcccaaattgctcttcataaagggttgaagtcagtgcatacgtgaggactctgtgagtgtgcaggcggccctgtacctctgcaggttcttcacctgagtcaagcaactgtgggttgaaagtattc

SEQ ID NO: 266103 - DNA, 689 bp, Homo Sapiens
cccaagtaattcggcacgagctgaaaggcaggggactaaggtgacagctgactctgccggggcggagtgcgtgtcctcccaccgtgctggcgctgaactgactgtccgctgccaagggaagtgacagccgcagccgggctctcagccagcggccgggcgccccgcggaccatgctctccagtacgcagaacgcgggcggctcctatcagcgggtccgcggggcgcttgatacacagaaatgcagtccagagaaaagtgcctcatttttcagtaaagtgacatattcctggtttagcagagtaattacttttaggctataagagacctttggaaagagaggatctttttgaactaaaggaaagtgattccttctgcactgcgtgtcccatctttgaaaaacaatggagaaaggaagttttaaggaatcaagagaggcaaaaagtaaaggtatcttgttataaagaggcacatatcaagaaaccatctctactctatgcattgtggaacacctttaaatccatcctgattcaagttgccttattcaaagtgtttgctgatattttgtccttcactagcccactcataatgaattataccagaaaagttaattatttgatgggcctgccatgtgaaaaccagaaaataacctcgtactcacaagccagtggaagggattcctgattttacta

SEQ ID NO: 266104 - DNA, 521 bp, Homo Sapiens
agatcttagagcccactttagtccttgaaatacatctgagaagccaatggcagcgaatgacggtgcccgcctgccccaggcaccttgggtgggccaggccctgcttcaggaggtggcgggccactccggagactgatgcagccccaccccaatggttgtcggactcagctgtgtctgaggtctgtgaactcccagcctctcagaaccccatggcaacacgacaaggacaaggcagggcatcaggaggaggagaaagtgaagcctgtggccaggaaggcttcagacctctcatctgtcaatgggccagagtgatgcctcaggcacggctagaaacccagggccggacaggaggcgaggagggtgagtgggaacatggcagcgctgagctgatgctcagctgactccatgagaagggaagtgaccttcacatgggggatactggacagcaccctctacctgccttcagcaaccactgagaacacccggggcacacacggggcaggggtggcacccagggtcac

SEQ ID NO: 266105 - DNA, 383 bp, Homo Sapiens
gcccattctcctggccctctgcaggtactacctgagtgactgtccggcatattttcagccccttgtcatgggtcccatcatcgccattacgctctgtctcatcctcagagatgcgagagtcatcagcatgaagatccacaacagcctcctgccccgccaggggtttgatgtcggggatgaggctctttagtgattcagtggtgatactgatggaaggtttcttctgtgtggtggctgtgctggctccccagcgtcgtttccgaccaggctggcccccctctgtgtcactgtttccagctggcacccccttggtagctgagacaacggagatcttcctcttgaatgatttgggcagcgagctctgtatgaagaagaaaaagggg

SEQ ID NO: 266106 - DNA, 717 bp, Homo Sapiens
gaatattacagtgcagtttaataacattcttaatgctttcaactgtgtcaccttctttggtttaatacttgctttttgcagttctaggcttcacagccttcagtcaggggcaaaggaattgggcaccagtggcattgggactcactaaagccctggtggctcctaggagttgttgggagctcagagcttcatttctcctgctcaccttcataccatggtgccacagcatgtcttgattgcaataaacaaatgtttattctactccttgtggggcctgtcctatgttaggagaggcaaaggggggatgcttctatctacagcaaagcacttgttggccttgcagatggacagagaatcaggccctgctcttaaggagttatggtctggacaggaggcagtgtgggcatcataaataagcccccatgggcttttggagttaggtggaccaaatcttactctgccatttagtcactgttactctggtcaatttgcttaaatctctgaactcagtttcctcctctgaaaagagggtgaagtgacttcctcagagtggctttgaggagaaacaagttcccctgtcctaagagagctcacatgccaagtgccttactctaggctctgcacctgggtgttccctgaggattggttcccttcctcctacgggagattgtgcatgcaaagagggtgtgacactttgtgtctggtctcaaagaaggc

SEQ ID NO: 266107 - DNA, 732 bp, Homo Sapiens
ttcctctccttggctgttgagtcttgggtttccacttgttaaggctgggcttggttaactcctctgattctcctcgcatcaagaagacagtttcttactgtagcaagctgcacccaccatgagccacatgggaagggctgagaaaggccacttttgacagcctcctattgaagcatgcagcaaagggagacagggaggaatagattcagacggaattgccttaaactcctccatgcatatttatatttgaaaaaaagtgcttgggaactaaaagtcaagaaacctattttctactattaaaattttatttattttctgtggactttagggtaagtcagcaatccctttaaatgaaaaatgtttaatagaattaaaaactaaaatttggcattactagaagttatttgataattcttactacatgcagaaatttgggggacataccagagacaaatacctatccagatatgaatgtttatgagaagtcagaaacttaatgagctccatgtcctctatttttaagacactcactcagttgctcaattccttctttggagttggttaagcagggagcctggtaatatttacaaagcatctagtattgctaggttctttgtatatatcactttacctcaccacaatctgttacaataaatatcatttgttgatgctgaagctgaagcagagattttaagtaacttgctcatgggagttcattaagtgtggggagag

SEQ ID NO: 266108 - DNA, 350 bp, Homo Sapiens
tggaaatatgcgtaaggtaagtggctgctgaagtgaagaaacatctaagtcagagtgaggggctcataataaggcacctaccttcattcttatcctcttattttcatgattgatctcccttggtggtcacctttcacttcgtggttcaaggtcctctattcttttctcactgctgtctcttcaagtatggatggaccagagatcattcaattatattaatcctcataatattcaatacattctttaggcacttggctcatgaaagtagatgtgttgttgtgaaaatattgtttcaacttgtattttattttagctgttgtttatttttgcttctgtgaaagcccttggtt

SEQ ID NO: 266109 - DNA, 639 bp, Homo Sapiens
  misc_feature (11)..(11): n is a, c, g, or t
  misc_feature (180)..(239): n is a, c, g, or t
atgcaaagccntgaagttaatagttaaatgatgttaacatgtaaactaacttcttgaaatttagactgtgcagtctacccctgccccgcccaagtgtgttcagtcctacttcaaacatcatgtgcctccactgctaaaatatttactccgggcattcagaggctccaagctttaccgttnnnnnnnnnnnnnnnnnnnnnnnnnnnnnnnnnnnnnnnnnnnnnnnnnnnnnnnnnnnnataacagtatttattttctttattaatctgtagattgggcagggctctctcagggatagcttgtctcttctctatttgcagtggtttgaaggctggggctgggatcatctgatcaccaggtctggagtctgggctgggaaatgtcaaacaattcagttgaagtcattggaaaggaattttcccctttgcattgaaaacagaaatggtcctggacccttcctagatataccaaggcaatgttacactcaaaccctgtagtcggattccataggtagcattctcaaacccctcaaggaagtcataattggttccagcactgccttttaagcataaatatttgccaaattaccaaatgtttcaggctgtttcccaggccacacttgcacagcccgagatagtt

SEQ ID NO: 266110 - DNA, 573 bp, Homo Sapiens
tttttcttctctccttcatttattcatttgttcaaaacactgtctagtaccaacattgtccaccgggcattgagaatacaatattgaagaagagtcactgcctgccctctggaaaaatcagagtatttgaaagaatacacacaagtaaacaggcagctatggcaaagtgggtaaaagctgcaaaacagggaagtttcgccaagtgtcagatgccaagaagtgtcagatgccaagaagaaagggtgcatgacatagacttgggggggtcagtagtggtttctggaacgagtgacatttagactgaaactggaaggatatgagtaagggctaatcggaccaagatgaagagatacagaagcagaaggaacagtaggaacaaatgctcagaggcaaaagaaagctttgaatatttgaggaactgaaaagcaaaacaacaaaaaatagccatcccttgactagacaagtgacctggggtcagatcctgaagggctttgcaaatcacttttccgcttgtagactttgtacttgactttaagggccatggagagccactgaagcattttcagcaaggga

SEQ ID NO: 266111 - DNA, 748 bp, Homo Sapiens
  misc_feature (392)..(392): n is a, c, g, or t
atcttctcacgaatttcctggaagtaatgagtgtggactgaagaagcagacatatagcacacagactgggtcccaagttacaagcacactgacgttatctagcttcaaaggcatactgcctttcagagtctaaaacagagcgatgtgcatcataagagatagcctatcagatccctaggccccaaatgtaccaaaggtcagttttctaaaggcaatgtctatttttaaacgaatataagttgggttctaaatctgacctccatttaaatgatcaactggggaggaatgtctggctggactcctaagcagtttaagttgcttgtggaatggtccaaacaaagttcattttatacacaacacacaaagattctcttagcagcaggcgtcttccnacagaggcaagagcagcagctgtgaaacaaggagcccatcctgcagctgaggagcctggaatttacttcttcacataactgataaaagcaggccattctccactaagatggtttgggaaaaccaatttccgagtgctcagtataaaagaatgagcatattttatgaaaaacagagcatattttcagtggcgtgcagagtacatgaataccatccagaagaagatgccaacaaaaacctacagtattttcaagcttcctcacagtactcttctcttcacaaagtacaagttcacagcctacactgaccaagagtctcagtgacaaggaagaaagagttttcttttgaattttgtgtt

SEQ ID NO: 266112 - DNA, 781 bp, Homo Sapiens
ttggcactagagtatttccttgaagaacagtagaatgggtggggggttgaactgcaggagcacttccaacagctgtatctcctgggatcagtataccctctagcttctcactggaaacagtttggctgcacatttctagcagcttcttgtgtttgtgtcttctatcatgcctgcacctaggagcccgtgtagcaaatgaagcataaacctcctcaagtgttaatgggagggatggcactccctacatcttccctgggattgctctagtgattaatccaggtctatagtttcccttgaaagagatttgaggcctcagtgagcaaaaatggaagggtcaaaacccaccatgccttttcccagctttctccagatatgtataaccttgtaaatctctcccgggaagggagactggggagacagacctctcttatgctatatgtgaggaactgtacttcacctgccttcctatgtaccagtcttgttccaacaacatattggcctggagattctgtgtgaagtgagtttgtgagacttcaggaagccttaaagggagatgaatgttcttcgcaatttcttcttcagattgctccagcaataagtccaggcttccaaatccttactggcaggaggttgtgtgacttactgtgccttattgtgagattgggtacttcccatgctttcctacttggcctgctctggtgatgaattcgtttctgcagactttccctgggagtaatttgtacacatactgactgccccatattttacatccctcattcaa

SEQ ID NO: 266113 - DNA, 468 bp, Homo Sapiens
gggagagctgcaccatgagcttcaaccctgcaatgagaaaattaatgtaaataccataacatcacccagactggctgctctgactttcaagtgcctgggagatcagtggccagtgtactgccgagtgatacgtgaaaagaacctatgtcaggacatgcggtggtatcagcgctgctgtgaaacatgcagggacttctatgcccaaaagctgcagcagaagagttgacctctagcaggctggctggatcacagctctttgcaattacattatttataaacacacacactagcatgtttttcagaccaaatattatcagattacatataatttaatcaaattaatttatttttttgcctgccaaacatccaatgtggtgcttgttttggttacacaaacattttgatttgtactatatggcttcataaataattttatatgaatgaattagttggatccagtaatataat

SEQ ID NO: 266114 - DNA, 739 bp, Homo Sapiens
  misc_feature (641)..(641): n is a, c, g, or t
ctgcttggaacctctgacctcccccttctgcggtgtctcctctgccttcctcctctgcagcatctgactccagccagagcagcttctctgcttttaatggcttgtgagatttgatcgggcccacacagatagtccaaaataatcttgcaattttaaggtccttaatcttcatcacatcagtattttcccttttgccatgtaatgcaacctactcgtgggtgcccaggattgagattggatgtctttgggaaccattactcggcccatcacatctgagtatgttgaagtcaccgaggatcaaggagacagcactgctggagagggcgatagttgaaccagggaacttacaagagtcagggactgagaggaacggtcctggggcccacagggaatggctgcaatgaggggagtggggcctgaatctgatgacagctttgggggcttaggaaggaaggaggcagaaaggtctgagaaccacagtgaggagtgaggatgccaccccacctctgggccaagggtacaaggtccctgtgcaaactcccccatgtgggaggactttggaagggaccacatcctctggcagacacagacatcgctggagcagtgaggtccaggaacatcctgagacaggatgtggaggntttgctgatcatgggctgagaattccaaggggcacagcggggaagacttctggatttgggaatggggtatggggagacaaaatagggggtgtgcagag

SEQ ID NO: 266115 - DNA, 547 bp, Homo Sapiens
  misc_feature (22)..(22): n is a, c, g, or t
  misc_feature (377)..(385): n is a, c, g, or t
  misc_feature (475)..(491): n is a, c, g, or t
  misc_feature (494)..(494): n is a, c, g, or t
tcggggagctgctctgccgaanaccttaaaatggccagaagtctggtccccaaggctctggagccatacgtgacagaaatggctcagggaactgttggaggcgtgttcatcacgacggcaggttccacgtctaacggcacaaggttctctgccaggtgacagtcgttgagggtgtgggagaggcgtcatctgggcctcccccggggttccaggggccaaggcagggcagccgtctcaggtgtggccatcaggtctgtggctgctctgacgtggcttgtctgtccaggcagtggggccccgctggctttccctgtgtggagagctgcttttcttagttggtttctgctcactaaaaactgaaagtaatacatggtggnnnnnnnnncatagtatcacctaataagtaaagtaggaatgaaaaccacccaaatcctcctgtccccggcagcccaagtaacagcaagtatttccaggnnnnnnnnnnnnnnnnncanaacgcgtctgcggtcacagcgcacgtatttttcagaacgcgtctgcggtctgg

SEQ ID NO: 266116 - DNA, 926 bp, Homo Sapiens
  misc_feature (916)..(916): n is a, c, g, or t
cctgctcagacgtccctcgggcacggaagacggtgcacgttaatcacccacacacacactatgagggtaccaggccaaggtcagagtcctgcaggatggggaaccgacccctaagaactcctgagctgggtcaggtcagggtaccactgtgcacaaacaggatggtgtgttcacatcgcggtcatcagtggggtttgtggagctggggttctctcctgcagcttcaagatcctcaaccaggacaccagaatttgcttgtctacttgtgccgtctcaggttaatttatgtctatgacatgaatctccgctctttacatggggcaccttgagcaggtgaaacctgcagagccccctcgtggtgatgatgagtgggagccctaagctgctcccccaggaactgcacctcttctctacctcctcagcccagatgaaccatcccaatacctctcctcagtcaccctactttgctctcccaggccagacattgggtgctcctattagaagagggagaggtgacctaggataccaagttgaatccccaaggaattgggggacaaagacaagcaactaaaagactgatgagatgaggagaatggccaactagtggcaaaccaagagtggcttatttgactgtggctccctaggtcagcatcctgggtactaatatgtcattccttttaaatctaagattacagtacaacccaagacatggcagaagcattatgaccaagccagaagcatagtcctaaggatgttttgacctcaataaactaaccacatacatgcttccagactgaaacaatggagggatatttgcatcagattgcacagaggttattaaaacagatcaatacataataatggggatctagaattaaatatatttattattaaactccctgatgacacacaaaanaaaatctctg

SEQ ID NO: 266117 - DNA, 414 bp, Homo Sapiens
cccagtaattcggcacgaggcccctgaaatggcatatgaccattaccaagaagctgctctaaataaccttcctgcacgttgacccttgggaaaagaaaatttgaaatattatctctcttgaatcctattcctgagactagaactttacaaatttgtattctacttaatgtcatatctatattttttaatattaagattattaacttagtttaacacagaaaaaacgttgatgttccagggaaggtgcaccctatttagcctacggtttctcgtatatcttgggaacactgaagtgtaacacctgagggctgtgtaaacagagggccagcctgaggaagctgaggaatcaaggatttggatggctccaacccataggattccctcttacttcaccacttctaggtttgtggcagg

SEQ ID NO: 266118 - DNA, 760 bp, Homo Sapiens
  misc_feature (21)..(21): n is a, c, g, or t
  misc_feature (203)..(221): n is a, c, g, or t
gaaaaccagagcagatgggancaatgggtaaatttgctcaagtaaggcccacagccaccaaaagcctgggtcatggacaaggaaagtttaataaatgctctagaagtctggtcttttattattttcacaaatcaattcaaacggaaagacactatactaaaaattaattagggaaacttagaaatgggaaaaagaagaaaatnnnnnnnnnnnnnnnnnnntaatagtgtatttaaattattcatttctttcattccctactagaagtctaagaaattcaagttataaaaaataaaaattaaggaaaatgattatgtttccttttttcatactcatttttccttaaagcaaaactaggcatgttccacaaaatcaggtaaaatcatgagagaggttaattccgctaaattcatcctgaaagaactggacttttaaaaactctcaaacttgaaaagcaggctttcaaacttcagctattcatactgtaattagaattcaactgtaataggtgagcaataaatcagaagagggttaagtctggcttgtagtggaagttctttgcttaataattatctaacaccgtcttttcacaggccattaaatagttaatcttcatttcacagtcctcttgtccattatccctagacaatcaagactgaagtagttctataagtgagtaaactctctcatactgcagtttgaaaactgttactactatgctacttatttaggctcatgggtaccatgcatagtaaaaatg

SEQ ID NO: 266119 - DNA, 757 bp, Homo Sapiens
aaactaaggcttggggaagtggaataatttgcctgacatcacacagctgaggagtgccagaaccacaatgtcagcccgatctgactgggctcagctcagtccctacctctgtcctgcttcccacaccaacacctgaaaactcagagaggccctgcagtaaggggcctgttccatactgtgactcagcatgcccaaacctcagaaccctttggtcaccagccacctaccttttcttaggggctctagtgttgatctccctgatctagtctgaccccaccattctaccagtgaagaagctgaaggatattcaaggctttccagggtgtgttcaccatatgggtcagacacccagccaaggccagacctgaaggctgctgatagctggtggtcggcctccctgggcagttagtgaaaagggcagaaagaagtccatcttggagcaagcattgtcctgagaggacctggcctcccatccagacacttgcttaatgcatagagatggttggtgttgacgtggaaccctatcactcaattcaacaaatatgcctgtatttgtacaagatgtacaagatgtatttgtagaagacgtatatttgtacaagatgtaagattttttctaagaggaagatcagtcattcttcaaaaagcaggaagatacaactctatagtcatctaaaaagttgaggaaacgttcactgtatttattttcctcatttcagaggtttattgataagaataaactatatcaatactataa

SEQ ID NO: 266120 - DNA, 748 bp, Homo Sapiens
  misc_feature (62)..(62): n is a, c, g, or t
tcaggcaagagtggagcacagaggaaaggggtgtctttctcaagagagaagcaaactgcggngtcaaagtgcaccaccagccaccaacagctagcttccggatcaagtaggatggaaatggtttattcctccaaagactcttaaaagagcagcccctgctgaagaatagaaagaggctccagaggcaacagtgagctcgaggaacccccctgaagatccccagtttctgtatgcagctgcattcaggcccagacaaattctttccatctggggcgtgtccccgaagatctttcccaagccgcggctgtggtccacggttatctcaggctgtcaggtctcagaaattagaaaccatctcatttcatcagggtcatccccacaccgtctgccaccatagatgggagaggatttcaagtgatgttttctgaagatggttctgttgtcccgggagagcccttggcggacatggtagtgccagtcagagcccttgacgctgtgcagccaggtggcttattgtcccagtgactttccaaccagatactctcagtcagagtgaagggctccacttagaaactccctttcccattaactcgtcagagttatgccattcctctttattctttttaaaatatttatactcaaagaaattgtatggggagtgagcacacaccaatcatataactgtcaaatgaaagcctttccttaaatgttcaagggcgccgggaggaataaatttggagtcacaacc

SEQ ID NO: 266121 - DNA, 658 bp, Homo Sapiens
  misc_feature (412)..(412): n is a, c, g, or t
caaatactgcgatttaccttagaaaaaattaatatataaaaggagaaggataaggaaggacttttaccctgtttcaaagactcaaaggataaataatgtgcccaagatcgcatagctagtaagtggtttagccaattctgtttctaaagtccattttgtttttaccccattcacatgaagattattttaaaagaattcataagtgaatcctgagggcaaagttagagataggacagaggcaagttgcttaaccaatatgggaattggattaaatgctctctaggccctccagttctaaagttctgtgagtctgatttttgacaccatgtaacaccatcacatatgtagtacaatacccaaagaacatcacaatgtatataaattgcactgtaggtaagatgatagaaacaanaaaattagatatttcaatttgatcagtgtgataagtttatgataaaattatatgtaggaaatagcaagttcctgtaaatttattacagtattcaaaagtatagccagagttttaacaaacaaggcaatttttatagcattggccattaaatatgaaattgatttatatagttgtagtgactgcccaaaaataaccctttagtgagtgcttttctattattgatttaggtaaaaatctgatattgct

SEQ ID NO: 266122 - DNA, 752 bp, Homo Sapiens
  misc_feature (345)..(345): n is a, c, g, or t
  misc_feature (382)..(382): n is a, c, g, or t
aaaaaacaaaagattaaagcataagtgacgtcccctacctccttttttatcttttactgtgattattcttcatcttccttccttttcatgtcattttatatgttcttatgtaaaattactttcatctagaataggaataatgtgaactgaaatcacctaacctattaggagttaggggagggagactgtgtgtaatatttgcgtgcttaaatattttcaatgaaaagttactttgatttagttttttatgttactacataattatgataggctacgttttcatttttttatcagatgtcttctcctaattgtgagattatattatcaaagtcctttattcacttntgtatggccaaaaggaagtctgtttccacacctgtcntcagcccagatgacttcaaagtcttgtaaaggggagaaagagattgatgaccaaaagaactgcaaaaagagaagagccttggatttcttgagtagactgcctttacctccacctgttagtcccatttgtacatttgtttctccggctgcacagaaggcatttcagccaccaaggagttgtggcaccaaatacgaaacacccataaagaaaaaagaactgaattctcctcagatgactccatttaaaaaattcaatgaaatttctcttttggaaagtaattcaatagctgacgaagaacttgcattgataaatacccaagctcttttgtctggttcaacaggagaaaaacaatttatatctgtcagtgaat

SEQ ID NO: 266123 - DNA, 925 bp, Homo Sapiens
aatgagatagtatacacaaaaaaacaacaaaaacatagaacataaaagtgatgctgttggtagcactgctgttatccatattggtgccttctaacattctcagtaatcatggaaaaacacaatgagtttcaatgtaatggctttgtagatatgtctaaagtttttatattgagcatatttaaattatgatgattatataaccttatacattaattttatatatttataaaatattgctcaattaaattcatgcttagaagtatcttatttttttcttttaatatttagctttgcatgtatatgtaattcatttaattatagaaagcattatcctgtggcatcatatagataaaaggaggattcagttatattggttagcacatggctgagaaaaatgtaggcagcaggcagaaaagaaatgcaagttaaagatgagccaaatgctaactgtgagggcactaagcagcggaatacacgcgcctgctggcctctgaagaatatcaaattatcccttctgtgtatgtttaaggtcaaatatctttattaaattgcagatgtctataagtagatatagattcttaaagctgtattgcaagagctattagtggtagtttattataattataataaatgtctcctgctgaagttcagagattaggactgtatctatcacttttgggtataatgatttaatcttgttcctacagtacttcgggatgacttcagacaaaaaccttcggatgtcatggttgcagtaggagagcctgcagtaatggaatgccaacctccacgaggccatcctgagcccaccatttcatggaagaaagatggctctccactggatgataaagatgaaagaataactgtgagtatttaattcaacagcagaggacatttgttggtctaactgtgtgtatctttacgc

SEQ ID NO: 266124 - DNA, 579 bp, Homo Sapiens
tgagccactgtgcccagtcaagtcttaagattttgaaagtcacatatgtaaaatatgaagcagtgtaaaaacaagatcataaacaaccatatattgtcctattatcttcctgtgaattaacttgaaattgggttgtctctacgctttatcataagagctcataactgttttcatttaatttcataatatttaataaataatatttcttgggaataagcaaggtcattggctgggaacaaaggtttatcagttaactatggattttatttttaactaacttcatgtgcaaagctcactgtgccaacacaaagtgtattgttaagcgttggacaggcaagagccctacctgttgttttgatctgcctggaatcccaggcttccctttaatggtaacatatactgttaccaagatttcctattagacctacccttcccactccctcagtaggcatctgacacaaggcagcccagtgaaaattaactctggaaatacttagggctgactgggaaaaagtacctccctttttccaagcttaatatgattctggtggccatttctgtcaccttataaagaaagac

SEQ ID NO: 266125 - DNA, 1090 bp, Homo Sapiens
ttctcaaggaatagtgccctctcaaagtccagttctaccaacacctaaagccgacgatgaaaatgaaatcatggtccaatctgtttggcttcaagaggctggcctctactaatacatgctcactagttcaatcagaaccccacttggcatgagccctcagacctgggagggagaaaggactgggaccaccattctggcaatgaatttttgcaactgcctccaaaagataagtcagctcaacttctccaatggtgggagccaggataagcaaaagctgttactcagaccttcctaccatcgatatgagatacccaactaaggagtttattctacatgtgtcataataaatccttcaagtagacacattaatcaaccaaacttcaaaacttaaggaattgtagtatctctgacagggaagtcagagtaatgatctcaaacaagtataagagatgaaggcaggcatgccccataaactacacaggaaaactagggttacagaagaagatttcatgatacataaaaacatcaatccgagattatccttttagttaagttcagatcaaacaactgttctgtttctctgctattggctctggaaatattcaatttacagtctcactactgctatgcaagagtgcttatatactgatgtttttaagtctgtcagttttggaaggggaaaacagttcttcttccttatgcatttaacttcctgaagaagttgctccagctgcttagcactccttctctctgaggaaagactgctctgccctctcccatgtggctatattgtgaccactatgcccaacccattccctagcaagcttgctatgtaattatgatctcagttacataaaatatgcatgcaggtaaattgaaattacaagatattaagcaaacaaacattattttaaaatattgataatatggataactatttttaaactcttctttaatactgttgttctatcatctttttaacaataaaaaaaataatccttctaaatatactttcaaatagctcgaaaataaatattgccaggaatattctttttaaatgccatttatattcacttactatgaggcagtt

SEQ ID NO: 266126 - DNA, 459 bp, Homo Sapiens
  misc_feature (335)..(335): n is a, c, g, or t
  misc_feature (351)..(351): n is a, c, g, or t
  misc_feature (356)..(356): n is a, c, g, or t
  misc_feature (379)..(379): n is a, c, g, or t
  misc_feature (387)..(387): n is a, c, g, or t
  misc_feature (400)..(400): n is a, c, g, or t
  misc_feature (407)..(407): n is a, c, g, or t
  misc_feature (413)..(413): n is a, c, g, or t
  misc_feature (419)..(419): n is a, c, g, or t
  misc_feature (441)..(441): n is a, c, g, or t
actgcctcatagtaagtgaatataaatggcatttaaaaagaatattcctggcaatatttattttcgagctatttgaaagtatatttagaaggattattttttttattgttaaaaagatgatagaacaacagtattaaagaagagtttaaaaatagttatccatattatcaatattttaaaataatgtttgtttgcttaatatcttgtaatttcaatttacctggcatgcatattttatgtaactgagatcataattacataggcaaggcttgctaggggaatggggttggggcatagtgggtcaccaatataggccccatgggggaggaggggcngagccggtcttttccnccagnggaggaagggagtgcctaaggcnggctgggngcccactttcttnccggggnggtttnaaatgnccttagggggagggagggaccntttttccccccttcccca

SEQ ID NO: 266127 - DNA, 869 bp, Homo Sapiens
  misc_feature (329)..(329): n is a, c, g, or t
  misc_feature (496)..(496): n is a, c, g, or t
gctgtgtgtcttaaactgcattggagtttgtcactgctaataccctagtccaagccaccatcatccctcaatctcatatttcctctctgctatcactctcccctctctacacccacgatccagtctattcatggaagctactatgaaaaagatatactgcatcatttcctaggccttctcccttgttccctggctctagcaacactggggaccctcattgctgtctgaggctctctgctcttgccattgcccctgtctggaaagctctttatccagatgttacttaagcagttcctttttgtcattcgcttctctgctcaaatgtcacnttcaaagagcctgcttctgaacagcctgctcttgagaataaggggaagaagcagatggagatttctgggtttttttggaataaatgctattaataaatacttatggtactatctgactaaactgcagagatttatcactttggtaaatgtttacatgttaaaccaanatttaagaagaaaaatgtttaaaaacactacacccacatccattgtcactttttgtctatcacctgggcttcaaggctttatcattatctgaaattatctcatttatttatttgtttattcatttattgtctatgtccactcctgtagaatgtaatctccatggcagcagggactttgtataacaatctagttcattgccatatgcctagggactataacatagaagctgttcaattaattgttaatcaatgaataactgtaataagatacttgagaatggttgtctttttgttaggaaaagactaagtactataatcgcaatctacataattttaaagatattcactcctgagtaataaattatttgtggtt

SEQ ID NO: 266128 - DNA, 548 bp, Homo Sapiens
tctgctcaacggccaggtacgagaagaatacaagaggtggatcactgggaagacgaagcccagctcccagtcccagacctcaaggatcttgctgtcctccatgccatccgcttccaagacgggttaaagtcctttcttgctttcaaatatgctatggagccacagttgaggacagtagtttcctgcaggagcctaccctgaaatctcttctcagcttaacatggaaatgaggatcccaccagccccagaaccctctggggaaggaatgttgggggccgtcttcctgtggttgtatgcactgatgagaaatcaggtgtttctgctccaaacgaccattttatcttcgtgctctgcaacttcttcaattccagagtttctgagaacagacccaaattcaatggcatgaccaagaacacctggctaccattttgttttctcctgcccttgttggtgcatggttctaagcgtgcccctccagcgcctatcatacgcctgacacagagaacctctcaataaatgatttgtcgcctgtctgactgatttaccct

SEQ ID NO: 266129 - DNA, 475 bp, Homo Sapiens
  misc_feature (23)..(23): n is a, c, g, or t
  misc_feature (75)..(75): n is a, c, g, or t
aatgccaatcgggcttcccaaanaaggggttaaaaagcccttcctggctttcaaaataaggcctatgggagcccnacagttgaagggacaagtagtttccctgcagggagccctacccctgaaatctcttcctcagcttaacatgggaaatgagggatccccacccagccccagaaccctctggggaagaatgttgggggccgtcttcctgtggttgtatgcactgatgagaaatcaggtgtttctgctccaaacgaccattttatcttcgtctctgcaacttcttcaattccagagtttctgagaacagacccaaattcaatggcatgaccaagaacacctggctaccattttgttttctcctgcccttgttggtgcatggttctaagcgtgcccctccagcgcctatcatacgcctgacacagagaacctctcaataaatgatttgtcgcctgtctgactgatttaccctaaa

SEQ ID NO: 266130 - DNA, 635 bp, Homo Sapiens
aaactttacagtgtgagtacagaatagtgatgtaagtgtttagaagaaaactatttgatcaagatattttcctaatcatgtagccaattggtcaaactgtacccaacttgattttgaaaagtgaatatcctgttgtgaattatatttgttatggtgacactagctactaaaacacagacacaaaaactgtatactcactctaacatgatagaagttcatttctcacgcatgtaaagttgaaagtagaagttcctgattagatgggggctttgctccaggggtgatttgagacccaagtttattccacactctggctctagactctgcagcctcagctcacgacttccatggttacctgctcatctgcatcaagctgtgcacagagaaagagcatagaggacagtgagaacgtgggagacccttatgagccagatctggaaatggttacacctcacttctgctcaccttcctgtggttagaactcaattatacacagtcacacgtgttggggaggcttggaaacatattctagctgtgtcctagggaaaggttaaacagtttgatcatcaactgcagttcctcccagccaaaaccacagaatttgatcttaagtttctaactactttaaaagaaaa

SEQ ID NO: 266131 - DNA, 812 bp, Homo Sapiens
  misc_feature (628)..(628): n is a, c, g, or t
ggtgcactgatggggccgctcctgcagctcagggggctgcagatggggagggacctccagggttacaagaatcggacaggctgaccttctagaagtgcagctgtagggagctgttccaagtctcttgctctgttccctaacatggagaccctgacctcaggaactagtgagggttggtcacacagcctttctggacagcactcagaccccaacactggccttaatttgcacccagaccagctcctccccatagtcccaacacggctgctcccactccacacaagcccagagggtctctacctgcagtagtcctggagaaaagcccaccagccagcaggtcatctacccccaaaagaatgatgtgcacaccccatcccccaacactgctgggacaaccttttgccactttcatctccacagggtgagagaaatcccaccttaaattattgacatagaatgaaaaagcaacattttgggtgggatgaatgcttttggtgggatgttagcaccctaattctttttgggggtctccctccagcaaagctcttttctctaggtcatggaaaggaaagaccacagaaagggggctcagcagtcttatctatgctaccctcattttgggttctgnaggctgctggctgcagctggtgggacaaagccttggacagacgggtggggatgcgtcccgggacacagactggtcagcacagaactggctctgccactcccttctccagatggctctattagactaccccctctcagattgtctgagtgttcacccccacccctcttttgggtgaagggtagct

SEQ ID NO: 266132 - DNA, 735 bp, Homo Sapiens
gaggtgacaataaacagggacatgagttggctggctgctctggtagagcctcacagggtcaccaagtgaagtggacttttgactattttgcctgccctgccctcctatttcaggaaataccaataaagaaagcccaagcccaaagggttagacatttccttccccggaagctcaggccactaggaacatctggctaggatttgattcttcactgagcaatgcaaatttccagtgaacctttagagattaaggttggtgcctctgatggagggtagagtcaggtgtggctggtgaaatcatagctagtggtcatggtgacaatgccaatggtagcctcttaaacagacttcacatgccatcttgggtctattttgcttcctgtgttttttcccatacaccaggcctcattcaccagcattcttagctctcttgtaaactatttgacctccctttccaataaatttgttttcctgcttacagcttgagttagtctgattgtggaaccaagaaccctgagcaacatatcaaaagagctgggttaatcccagctctgtaggaccagaagctccagcgcatccagttgcccacagggaatcagggtccagggactgccacacctcacaagaaagtgaagttagggtcattagtgatatttgtttaaactctttctcactccaaataacatttgagattagttatacaaaaagacctcgtgccgctcgtgccgaattctgg

SEQ ID NO: 266133 - DNA, 564 bp, Homo Sapiens
cccagtaattcggcacgaggaaacttatatctcaaatgataggattgtgatgctttttttgtaacaagtgattctgcttaatattttgttattccagttcataaaaagtagattacgttttcctctaaggataatttttgcagtgattatattgctaactctcattgcatgatacctttaataaaatgaacaatataagagttaagggcaatgggataaagctacttaatgtgtctcctccactgatcaaaaatattccatatagtcttggtgaggaattccccaggatataaatggctatttacactgtaatgaattataccatatatgatattcactcagtaatgttaataatgaactggctaataattgacaagatgcagtgcctgccagtttatgacattaacttggtttgaaactaacatatgacatagtaccagtgcagtcagagctgcccttaggcatgatgaacatgtggcccgtttttgcctggtgttttggcagcaaagcaggaagcaattttgtgtgggtcattgttctgtcaatttgtggaaaaaaaagaaa

SEQ ID NO: 266134 - DNA, 810 bp, Homo Sapiens
atcctgggaaggggagcccattggcctaccctgatttagcacgggacatttctctgagtctctagtgttgttttaaattggcctaggtaagtggtgttcccagcccttttagccccagagcccctttcacaaattcctgagatttaaggcaggcgtggggaacgattctgttggatctaggggccaggccaaaccccatggcagtctgaggcccctccaggcgcctctggagcaggtggttcctgggggcttggcagcagagtcccccctttttcagaagtaccagcctaccacatctgggtgctctccctactcagccatagccactccagctgctttctaaatgactccatttttccaaggtccttctttaataaagaaagctaattttgctgctgttcatgaggaaggcgggtgtgagggagcagatctgggagtcatgggacacctgggaatgggtggggacagagtgaagccagagcggcaacagcttgcaaagccacccaagggtcccctggagcgccccgtcccacactgccccccaggggaccgatggccctcccagtctgccgcctctcaccctgccagtccctacttctgagattttaaggagatgggtgggaccttcaggctccaaacacaccattgctgttatggaagccccccatttgctggggcttaaggctagagacagaccccaggctgagcgtgggagtcctgcggtttctagctgaggttgagggggctgcagggtgcttggcacggagcagcattacaatgcctgccccatcccggaagccttagtcaatt

SEQ ID NO: 266135 - DNA, 474 bp, Homo Sapiens
  misc_feature (350)..(398): n is a, c, g, or t
  misc_feature (438)..(438): n is a, c, g, or t
  misc_feature (444)..(444): n is a, c, g, or t
  misc_feature (447)..(447): n is a, c, g, or t
caaggtgactggctttcacccatatgttcctctgtatggatttcactgagcctcgattgctgccccttttcatggcattttgttctgggattttgctttgaaagttagggctctttcagccttgtggtgagcagtgaattgtcctcgtcctctgcttcactttccagattttgcccagaaatttccctgcagtgcttaggaagctgcctggtagagcaggtttctaagtttgaggcgaagcagctctggaagctgcctctgtccttgctgttggaggcagtgatttaagtagcagttgcctagagatacatcctttctgttttaatctcaaagagagaaaaacccagtcnnnnnnnnnnnnnnnnnnnnnnnnnnnnnnnnnnnnnnnnnnnnnnnnnagaatcacttgaacccaggaggctggaggttgcagtgacncttganatnaccactgtgcgatctctgtctaaaaaa

SEQ ID NO: 266136 - DNA, 906 bp, Homo Sapiens
gctgaaatggaactgatctgtttctccagacctgcttctcacttggtagccccaatcctggtcatcatcaccgaagtcagaaaccctggaggccccttggactccccagtatcccctccccaccacatccagcctattaccaagtctgtgcctcctctaccctcacagctgctgccgccctagttcagtcctcatcttctccaggctgccttgctgggactgaggaaaaagagctcgatcccctgagcccttaggcagggcctggaagtgagcagccctgggcttagacagttgtcattttctatttggcagtcccacggccaaagctgggaggtggaggcctctcggcacttgggctgatctctgtgcagttggagggttccctggatggacacctttctctgacattgtacttacaacaccatcgtgcagtctccatagtccgtcagttctaacatgtgcttcttcgctttcacatcttaattgaatatctacagtaggaaggctcttacaatcaatgatgtgtcactgtcgtaattctcttctgtgtgcctagatcataaaataagtggaagtctacaatcattagtggctaggatcctgcgatgcacatgatttcccgtgtccaagctgcttccgagcgttcgatgcggaacacgtgtggtgcctagagctgggtagcgcagaattgactgcttatgatgggaggtctgggttcggagaatccttagggtttcctgacagctgcgaattaagagaaaaacttttttgcgggcgtcccgttggtgtgtccggtcaaagttggaaaggccaaagttcgccctccggtgaaggcgcctccgcgttgtcgcctgcgggtgggagacagaatcttctggagcggtgaaagaggctctgtggaccgtt

SEQ ID NO: 266137 - DNA, 694 bp, Homo Sapiens
  misc_feature (33)..(33): n is a, c, g, or t
  misc_feature (43)..(43): n is a, c, g, or t
  misc_feature (51)..(107): n is a, c, g, or t
tttcggcacagaaaggtcagaatttcttttatngaaacggggncttactcnnnnnnnnnnnnnnnnnnnnnnnnnnnnnnnnnnnnnnnnnnnnnnnnnnnnnnnnntggggctcaagcggtcctcccacgtgagcctcccaagactacaggtgcacaccatcatacacgggacagggtctcgctatattgctcagactggaaagttcagcatttttaaatcaggtcttgggactcccgattctgtttttccacagagtcaccatctatcctgacaatgctccatttcatgctgtttttcctcaccttcaatactgctcccccatccccccacctctaggtgtgaaggttaccaggagagacctgagctcgctggctctgactccaaggtggcctcagtggaaaagttcaaaaaggcaaccggtttggtttcactggcagggcagcggcaggcgtttgggttctggaggccccaggaatgtagaagcctccagctaacagactccacgcgcctatcctcccaaacgctctcggagataagctcccagctccctccccttttccaccttcatgcacttcctgctgtattctgtccattccagcactggccctttctgtgggtgggtgggcagaggatacaatttcctgcatgactacttgctcatgattcatacttctaaatgaaagtacaactg

SEQ ID NO: 266138 - DNA, 800 bp, Homo Sapiens
taagagacagggtctcacactatgctgcccaggctggactcgaactactaggcccaaagcctagtacacccgagtagctgggagtacaggtgtgcaccaccatgcctgggctttgtagcatgtttaaaggaacctaggtgatttagtcaaaagagaacactgcatgaaccaaggcctcaggtgcttcttgctgccttcatttccacagaggagaacacagggatttagaggagatgggaaacattttctagggcagttatttgaataacggatctttggaggagttcgtggagtagtgtaaccagaaagtctttaaaattaaacccttctaatcgtttgtaagtgtagatggggggacttggaaatctccggggcctaatcatgctcgcaaaaggagtgacattaatagctttggagatggtgtcttcctctcctttcccaggttaagttcaagcagtaacagcagaggttctacctccttccatcgagtctttaagctggacccgggggaaaataactgttagggaaaagaggcaagcatcccaaccccactcgagctgtgggctgaacaagtccccactgggatcgtccccatggagacaattgcaagtcttttgcatgagctaaaccccgctccacatggaaccgaaggtgctcattgtcagctaccacgcaatgccattatcacctttcagcccaagtgccacagaccaacactggctatactccaatgaggtgtggcattcgggttcttctgccttcaggtcacaacctttctgactcagctgggctacattaaa

SEQ ID NO: 266139 - DNA, 425 bp, Homo Sapiens
taaaatctcacaaaagaagagatgcatagggaagagtctagaagagtcccaaatgtgaagtgtccattttcctataaaatcaggacatgttacccttccagtatggatatgaaatatcaacatgtgtcccactgttcagagttttattggggctccattacctagtcatgattgattgattgattgattgcccaggtggttgaactcagtctccaggttgaccgatactgtatgacgcagatgccctaccccagatcacatggttagtctttctggcatggccagcgttcacccggtgactctcagttatggtcgctaagctactagataaaaggattaggcccttattcaaactggttgaatgcttgtcaactgtcaccagagtccatccacagaataaatagaaatataagaggcaaacagac

SEQ ID NO: 266140 - DNA, 406 bp, Homo Sapiens
ggagtaatttcacgaggtaaaagattacataggctgcttttcctgcttttcttatccacaggcagttctttgcaatgactatttaaaaactaaaacaacatcacaagtcatgaagtttgtgctacccctgaacttgacaaattgtctgattcaagtgggcaaagccacaatgattggatgcatctgaacagaacctcctctggaatggggcctcactagagtgagctcttcatgagccttgccaccagggcagggattattctgttattttggcctgttgtagccaagtctgcacccctagcaccccaaaacaatacctgggagagttggtggtcaataaatatctggtgcatgaatgaatgcgtgaataaagaggcagattcagatttcacacttggcttagaaa

SEQ ID NO: 266141 - DNA, 344 bp, Homo Sapiens
tgagccactgcgcctggccttgcagcttaatttttaacagctctaagatgttttttcatacaaagataccatgatttatttaatgaaatgcatgtattttagtattatgggtgttgattggataaacgtaccaccaccccaacagcagcacatttctcttatttcgacattcactgccttaaaacatttaaaaattattctgggatttgtggtaagttcagaaaaacacttgaaacagattcagttgctcccaggctaagtgtttatgagaacttgaggagtgtgggcacaactctcagtctctctctgcactccagcctgggcaacaaagcgaggttttgtat

SEQ ID NO: 266142 - DNA, 681 bp, Homo Sapiens
gttgcccaggctagtctcaaactcctggcttcaagtgttcctactgtcatgacctgccaacatgctggggttacaggcatgagccaccatgccccaaacaggtttgaacacaaatctttcggatgaaaattagagaacctaattttagctttttgatagtttacctagtttgcaaaagatttgggtgacttgtgagctgtttttaaatgctggattgttgaacatcacaacccaaaatacttagcatgattttatagagttttgatagcctttattaaaaagagtgaaaataaaatgcatatgtaaataaagcagttcctaaatagctatttcagagaaatgttaatagaagtgctgaaagaagggccaactaaattaggatggccagggaattggcctcgggtttaggacctatgtatgaaggcccccaattttttaaaaatatctgtggtttattatgttattatcttcttgaggaaaacaatcaagaattgcttcatgaaaataaataaatagccatgaatatcataaagctgtttacataggattctttacaaatttcatagatctatgaatgctcaaaatgtttgagtttgccataaattatattgtagttatattgtagttatacttgagactgacacattgtaatataatctaagaataaaagttatacattat

SEQ ID NO: 266143 - DNA, 673 bp, Homo Sapiens
ggtgggtagagaggacattccaggctaaacaatgatgcaagttagagttctaaggcagaacagtgtgtgatttgtttagcatgatttggtcatggttttcttgggagagtcccaaagaactgattctccagggggtgttactaaaactcttattgaaaggagggactacagagatgaatctcatcactctcccagaatggcacagagcttttcatggacccccgggccacctatgtaggaacctcagggggtctgtggaccactaaaagcccaacatgcctgagactccacagatactggcttccaccatgataaaggcaaaaagtccctctttcccaaaatcaatacttttattcataggcctcctgctgtggtctagtccccatgttgaaagctgctgtcccagggtgttgcttcactacttctaggctcctgcagagtcctgcctcataggccgcactggtgagtgaggccagcaaacccatcagggagactacatgaatccaaacctaagtctgtctgacagcaaagcctgttctctccatctctccaggttcctaagccaggtgagcgttgaacctttcttgaatcaaggttccaattccaaggtaggaaagcacagtcagtcagggaaatatttacactgagaccacgccgagccctatgcagtctc

SEQ ID NO: 266144 - DNA, 678 bp, Homo Sapiens
acttagttcctttgaggatgtagagtgattctgcttttttaccttttaccaaatagttcagttgagcatgagtgattaaaaagtataccgaatcaaatatttgtgatgcttggactgtcaagcttctagagagcagagtttatatctggtcaggtccctgtggtatcccagtctctgacgcagcgtctgacacacagtccatgctcaaatccctgttaaaagcatgaatacttagaattaaagtatttattcaaaattatggcatgtgttaacattcgtcagaaagccaaaagacttttttaaatgtggaaaagattttttttctacttacattacatctatcaaagggctttcagatgggtctgtgcagttactagctggtagaaatgaaaacaaagattgtgattagctgttagtagtgtatatgccaatgtttatctaattctttcccttgtcttcttttccaaaaggaaattagatgttagcaggatggtctcagggccaagttcatgtttgttttctaactagtggcacaaccacaagcttccattcttctctatgttactgtaagaaagtggctaattaaaatgtgagggaagagtgtttccccaaaatttaggtgactcttaactgaggtttacacatagggttttggataaagcttttaattaagcggcc

SEQ ID NO: 266145 - DNA, 601 bp, Homo Sapiens
tgcaatgactgtggcaaactcctcatgagttcaagtattaatagacatccaagagtccataataatgagaaatcacataaatgtactgtgtgtgacagaggctttattcaggcctcacagctttgcaggcattaaaatctacgtatttgatggaaccacacaaatgtaatgtgtaagagcatcctgaagctcttactctaagactgtaactgtaggtgaggattcatacaaagagtgactcagtctctagttctttggattcacttttaaaatggataaactgcacaataattacacgttccaatatggtaaaacttaagacattatatatttcaaaggtcaaaggacatttggaaatggctacttaccttcaggttataaaatcttttattccattgtttgaggtttctcaaaaaggctactgtttgtgactttcaacctgaactatggatctgtggctattttgcatccttaagcacctttcgtggtgcctatctgggaaagaaccacagtatggaaaggcttacttcattacatgaggatcatttttatccatgtttattgaagaaggaggactctgccttgtaaaattaaatattct

SEQ ID NO: 266146 - DNA, 958 bp, Homo Sapiens
  misc_feature (305)..(305): n is a, c, g, or t
cagaagtacccacagcagaatagatcatggtaagtgttttttattaagaaattcataaaaattgaaaaaggtgaattcatataagtacttctcgagtgtttgggaggtatttcctatacttgaactgtatataatagatataagtgcatagataacacatggaaatgatgattaaaaagttcagtatttcagtaagattgtgcttttacatgtttgaatagatatttttgttgaagtgaaattgcagacagagcattagctgtaatctgtcctgggaaggggaatgccagttttactgtctgagnctcagccattggggtttaattcagatgtcgaagcttaaccaagccaatggtacccagtgtgatattggtgtggaccagtggcatctgaggaactaatcacctaaggaagtgtagacgcagcctaactactggcaagtgtgtccttggcccagctcaggattgtggcacattggcaaggagagatcagtattggattgtagtcgagaaagtgaagctgtctccattccccactctgcttatgtgtgaccatggaaatgttctgttctctctctctctgggaaactgtccaatgggtctgaatttaaacttaccagaatggagtaatttcacttcattaagaaatgggtcctgtatattcacgtatagaaagttaaaacattttggagaattagtacctttaaaggcagttattggtttgcttttagcattgctttttaaccaaaaaagaagtgttttagaaattagaatagcctggacattattgttttacctcagttacaagaggtttttcatacttttatagaacctttaaattattatatatacaacttgaaacagcctctcagtctattgtgtttatccatgattctggaaaaataattatctatttgagggaaatgtttatgatcttaaaaatgggaaatacccatggc

SEQ ID NO: 266147 - DNA, 717 bp, Homo Sapiens
  misc_feature (14)..(14): n is a, c, g, or t
atcctaaatcaaancaatttaagttgcaaggccaacttctcagttattggtgtcatctttgaatgtgaaagacaagatctaaatattatccttttgtagctgcagtttgctcatctgtaacaaagtggaaaaaaatcattgtcctcaaaggattgttaaggtaagtgacctatcaacatgcctgccaagtgcttctttaaacagaaattactctgtaaaagttccagtgacgatccagtggtctggaacaatccaagtttaataccctggcctatacacatccttttgttatcaggatacttctcacctctgaaagaagtcatttgtttttttagctacttggatggtagaaagagggaagggtaacttctgatagaccctttctctttcaaaccttatttagtagtcttaaatggagaattatgccagtctgaaatgggagaacagaatccaaatgtcagtatcaaatgataaataaaaaactaattggcaataactaataaaaattcacagtgctctcagtgaaaggggaggtagcaaacaattctcaacccacatctctgtgacaatgagaaaatctatttacccaattaattgggcagctcaaaatactcctaaggtgactttcagaaagtaagaatctctgggcctctgggtgggtggcctgggacactcttcctggccacaagcaaaagagtcacagcttcccaaggcgat

SEQ ID NO: 266148 - DNA, 470 bp, Homo Sapiens
  misc_feature (19)..(19): n is a, c, g, or t
  misc_feature (33)..(33): n is a, c, g, or t
  misc_feature (39)..(39): n is a, c, g, or t
  misc_feature (44)..(44): n is a, c, g, or t
  misc_feature (50)..(50): n is a, c, g, or t
  misc_feature (61)..(61): n is a, c, g, or t
  misc_feature (67)..(67): n is a, c, g, or t
  misc_feature (77)..(239): n is a, c, g, or t
cctaggatattggaaaccntgtaccgaatgtgnaatggnctgantgaggntaactgggatncccttnacctcgctannnnnnnnnnnnnnnnnnnnnnnnnnnnnnnnnnnnnnnnnnnnnnnnnnnnnnnnnnnnnnnnnnnnnnnnnnnnnnnnnnnnnnnnnnnnnnnnnnnnnnnnnnnnnnnnnnnnnnnnnnnnnnnnnnnnnnnnnnnnnnnnnnnnnnnnnnnnnnnnnnnaaccccaggcctgcgcatttctgactgtgcttgttagaaaagccccagctggagggggtgagcagtccctgttgctgtgaccacggaaggccgcaggggaaggcagattacatatgcgaaggaggtgtctgtggccatgtgtctttaagggagagcccacagaaaaatgagcctaagggaaataaagcgagaagtctgcttcaatcacagagacggtaaggtgtaaattct

SEQ ID NO: 266149 - DNA, 848 bp, Homo Sapiens
gactttatgtgcatgaacaatccctgactttatgatgatggagaaggtggttcagggaaggctgcctggcttgattctgtagctgccggcccagaactgagctccttctcttccccgtacacagctgcttttggccctcttgacggttgtaccaccttctttcacttgtccccagtcctcttcatacccactctcttactggtccttaacagatggtcaccaaattcattctgccccctgactctcacttcagtgggtctctcttttccaaccctgaggcagtaccccgattctaatgcctgtcccctttagcccactgcttgcagaggccccgccatagtgcccagctgatcctgggaacctatttttctctccctgatgtggctgttgctgtgtcttaggctgctgagagcatattgtcacatgatcaaaaagagaacatttagggatttcaaaaccctgaaattatagtaagcctgttaatttgggtcttgggctaaagactgcaatagtacccactctgcaacctgagtggaggactgcatatttactcacattagaagcaaacaaagttttggtaagatcattaggatagattcctaaaactaatgtatatatcaaaggccatgcaattttaactgtttgttaaaaatctcactccagaaagattgttttcaaattatattctcatgagtaatgagagggaattttttttgcctctatcattactaaaactttaatttcaataaagataatattcccaaaaataaatactttttcccacaataaaattcctttttttgggtcctggttcacctctatcaccaaaaaggtaggcttttacaaaa

SEQ ID NO: 266150 - DNA, 669 bp, Homo Sapiens
aatagatggatctcttgtgcaactcttcgtctatctatttttctcctcgtttttcatcaattattgtattgttgccttcctggttattttttaatcaagtgctgaacgttgtgcatggaaaattatagttaatttgatgatgggataatgccttcttcctccaaagaagatttatttttgcactggcagatggtttgtgtgcatgcagaggtagatcatctgatttcattcaggttttgggttgtatttaattttttggtgagggctgatccatttttagttcactcttacttgtaggttgtatcttttcagcagtaccaatggaaaccctggaatgtttatcaaagccagtatgctttggcaaattaatttttgccccatcagtccagtgaaactgcccaaagctctactcaggttttcagccttccaggtttctgcttttaaaatcagctaatactttaaggggatagtggtgtcaaataatgtatttatctcataaaattttctgctctatgaaatcttggcccctcaagtcttaattgtctttggcagctaatgtggataccttctaacaaatgtttaaattttgtccagcttttctaattattgtaggtaggcgtattggcctaaaaccacttcaaaatttttgcaagcacagcacataatata

SEQ ID NO: 266151 - DNA, 379 bp, Homo Sapiens
  misc_feature (17)..(17): n is a, c, g, or t
cccttcccccccatgcnctgatagcccttggtttgcaccctatataaaagcacctaaatacccagtgcaatggaggcagtagagtatgcctgggcaaccccacagccctctggagttgggagagcccggcctttgtatcctgccctcttttagccttcaaagacaagttatgagaacttaacccactctggacctcagttttctcatcataagatggcagtagtaatatctatctcataggggctgttgtaaaaattaagtaatgttatccaaggtacttagcaaagtacctaatagagtagttctgtgtctggcatatagtaaggattcaatttatcttggagattatttagagaattttggacatttaaccattcac

SEQ ID NO: 266152 - DNA, 380 bp, Homo Sapiens
acaagctctggcacttagattcctggtacctccgctgcttcatctgtaaaatggagtaacaataggaatactttatagagttgtaaggattgagtggctggatgaacgtcaagcacttcaaaggggaccctggcatgtagtgagtgatcaatataaaccacctggcttgtagcaggtgtgctgtgtgtggctgcaggtgttattagtaacatctgtgtgcccttcagagcgtgcaccacacttcacaccttgtggagtctggaatgccactattatagttcaggatagaaaacctccctgcaagcactcgctttagcttgtctccactgaacaaaacaacaaaagttctttattacttggaatgggaaaacttcaaaggc

SEQ ID NO: 266153 - DNA, 893 bp, Homo Sapiens
  misc_feature (88)..(135): n is a, c, g, or t
  misc_feature (809)..(809): n is a, c, g, or t
  misc_feature (825)..(825): n is a, c, g, or t
  misc_feature (834)..(834): n is a, c, g, or t
ctgccttaggattatagaaaagtagaaatgatttagtgaaggccacctgtgactttgcctcggctattaaggtaccataaaaatatgnnnnnnnnnnnnnnnnnnnnnnnnnnnnnnnnnnnnnnnnnnnnnnnntactattttggaaagtgctcataaaagcagcagtggaggagaatctgacacaaaaatagtactttgagaatggcggggagagttataatttgaacaagattatactctctcataaagccaatattattttcatgcaatcagtgcctcactaatgtacaaaatctaactttatgagatgcggcaaagcagaggagaaagttgcctttgaatgattactctgaaagtctaatcaaagacattctcccacattatcaaacacagatgtgcaaaccaaggagatggtttcttattgaaaagattggcaataagattgagtaccttgaatccaattcatctcctcataataccaaatcctacatatacctgagaggctcttcaaagtctccacacacagaataatgttcaacacatgtttgcctgtgatgtgcttttaacctaaaccccaatctttataagctgctccagaaacccaggtctttctgatataacagaggcatataaagactactgatcctaactaaagaaacattcatatgttgggatagagctgaaggggagccagatgaacccccacaaaccagaggccttatgtcagccaaaacccactggctgcttggtgttggcttgggtgcgccttggtgcctggttattgtgtgtttacactacaggttatngaactcagggaagtcngcactctancaagtgatatattcaaattaaatgccctgaaacacaatatcactctcctccttttgctt

SEQ ID NO: 266154 - DNA, 425 bp, Homo Sapiens
  misc_feature (169)..(169): n is a, c, g, or t
  misc_feature (289)..(289): n is a, c, g, or t
aagggctgggattacaggcatgagcaccatgccctgcggaatatgtactttttgagttttgattaaatatcagtgcataaagtgctactgttcattgaggaatatttagtagttatattcatatttgggtattctgaatatacttgaaaaatttcagaaggatcatttnggacaatatgggattttattagaaaagttcctatagtaggacatttgttcctaatccttttaagttagactgaagcagttttctaagttactatggaaaaaataggtttctgccgggagncaggtgtcacgcctataatcccaacactttgggaggcagaggtaggagcccaggagttccagaccggcctgggcaacagagcgagaccctgtctctaccaaaaattcaaaaattagccaggcatggcagtgtacat

SEQ ID NO: 266155 - DNA, 648 bp, Homo Sapiens
ggccgcttaattaaatgaacttggaagaaacatatcaggatgtgcttccaaatctgaaggtatttgtgctgaaagaatcatctgttgtgttccatgagttttatgggggactctgtctggtttggctcaaaagcatttgtcaggtttatactcctgagggtggggtatacacagtgtgaactgggcaggcagtgaataagggaatttctggagaacagacccttaaggaaaagaaagcctccgctttgcgggttagaatggccagtgtatgttgggggcaagtcttttcagggccttctgtggtttttgtcctggtgagcttactgctttctgatgtaatagcaaagctgaaatcttgcagtaatgtgcagagaggaatttttgtcctttggattagcttctaagatataaatatatagcaaaagacccagggctacttaatttgatacagaaatgaaatggtgagttatctagataagggcttgattgatttatgaaatgtatcagactcaattcaggagtgttccgggagtcacgaagttcggaactagattcttacccttaaaatcaaaaacaaacctcccctgcttccctcctcctggtcttaagtcactagtttttattctggaatccagcggcatttgtttc

SEQ ID NO: 266156 - DNA, 716 bp, Homo Sapiens
atgatcagtgctggtcttcctttcttgacattataccattaggcaagtcaaagcatttctctagaactgcctgagggcagtttttgaaaacgtttatttgtgaatgtgccactgaactgtatctagaggaaccaggatgtgcagagtcggcaatccagagttttgtggttttgagcattgctgcttctggttgtctccgaacacatgcccttctttaacttcaccagaatattgggtggtttcatgagaatgttttctgtgggaattcagtcttgagactttgttcattgtcctcaaatgatctagtagagttgatcttctggggtgattccgtgcagaggaggaagtggttacacatactgtgagagtctgagagacagcagtagctggagactttttcctgagtttgtcgctgtatagtttaggttctcattttacagttgtgagttttcatgttaagagaatgcctttttacctgcctttgcatttctctccagtggattctgttttagtaaataattggacattggctttccaattctttttttatttctctgccatggtgtgatgtacatcagacgacatgttccagtgtctggttcctgaaagcatatgacccatagcttgtcattgtgatgaattagctggcctggtagaaaattggtctcagcctgcctctcatatgttcttacctgaaaaatcagaccagttgcctt

SEQ ID NO: 266157 - DNA, 574 bp, Homo Sapiens
acagacagatcagctctgggacacttgcacacttttttggtaaactgcaacctattacgtgacctttaatcctggtggaaaacaatttaaaatgtattcctggctttaggaaacaaaagaaaaattttaaaccctggcagttaaattattactggtctctacagggttaatttaatgtaaataatctactctcctgagggaaaaggtggaggcctggcattctggaagggccagtcaggtggtgacaaaactgtgtgccttggggttttgaggggtgtgttgggtggctctgaacctggctttgggtttgttacatctctcgctctcttaaaacagtaactcaagatgtaagtaaaagtgttttcattttttattgatcctgctaacatctttcattatccagcatgtagccacagcaaattattgctcatttgatactgagaattctattgaccatcgctttcgttggagagagaattctaactactcggctgctctgtcatcagtcagagctaaggctgaggactttccaccactaaaaccaaaataaattgagccttctgcctccagaaaa

SEQ ID NO: 266158 - DNA, 491 bp, Homo Sapiens
  misc_feature (88)..(148): n is a, c, g, or t
  misc_feature (470)..(470): n is a, c, g, or t
caaaggcaatgctggagcctgccattgagaagattagattcccaagaaactcttcaagtggtggccagtatccacaaagtaaaaaatnnnnnnnnnnnnnnnnnnnnnnnnnnnnnnnnnnnnnnnnnnnnnnnnnnnnnnnnnnnnntgtaaatatacaggcacatattcaaagtttatttctccttgtgtgttcaggtagtactctacagccacttaagttacccagagcttaaatatctcaattatatacataaatacttattaaataataaatgcatgttaataagagaaacaggaagttgagaataactttaattcaagtttgggcttgcacattcaattgtcttatttgctaagtaggatgattcataacttctccataaggaagactgattagatcatgtttgggggtgggggtgtttttcttttaaattttcaattgttttcctttccttttggggcttttntctatttaagtctgctgtttt

SEQ ID NO: 266159 - DNA, 786 bp, Homo Sapiens
  misc_feature (128)..(216): n is a, c, g, or t
  misc_feature (221)..(234): n is a, c, g, or t
acgaattctttgtggtgagaaagcccctggcctgtgttcacgtacattatggatggtctgcaattgagaggacatgcgtcagcccttgaggagtctttctcccttttttggagacagggtctcactcnnnnnnnnnnnnnnnnnnnnnnnnnnnnnnnnnnnnnnnnnnnnnnnnnnnnnnnnnnnnnnnnnnnnnnnnnnnnnnnnnnnnnnnnngtttnnnnnnnnnnnnnnggaataaaagctgaatgtcaaaatataaagtggtcgtagcgcagttggggtgaggtggaatatttgaattctgtatcgttgggctggttcattttctaattatccctcaaatggccttactcatcccctccttacttcccagtcccacagctgccttcttccctccacagcgtcatattaattcccttttgtagcacgactagttggcaatacacctcctttgatgaccacagtggggtttctgtgacccaaatgttagcaccctagagatcaatatcagagcctgggttctaagcaggctcctctcagaaggacagtgtccacattcatcctgaccaccagctccatctacgagagagagcccaaagctgccccctgggcgatggagtcacaccgctgctggcctcttgggagtactcacttggacagaactgcaacgaagccatgcctgaattgaagggtgtgggtctcgttggccaaagaccgtctttcattggaactaggaataagagtgttagttcatagcacacctgctttgtacatagcaagtgc

SEQ ID NO: 266160 - DNA, 766 bp, Homo Sapiens
aatcacatttataagtgaaccgtattaaaacttttaaggaaccattcattgtgaggtaaactgatccagaataggggtcagcaaactatgactcatggccacagtctcactgactgtttttgtatggtccatgatctagaatttaaaaaaattttaaagggttgaaaaaagtgaaaagaatattttcaacatgaaaattatatgaaatttaagttttgggtgtctgtaaataaagttttgttgggcttcagccacaacagtgatttacaccttggattgtgctgcttccaggctgtagcagcagagttgagcagttgtgacaggagaccatgtggcctgcagagcccaaatatctactgtctgatcctacacagaaaatgtgtgtgatccctgctatggagcagaggttatcaaactaaagcccatggaccaaatcctatctgctgcttgtttttgtaaatagagttttatcaaaccacagccatgcttacttgtttagctattgactatggctgctttagacaactgtgacagactatatggctcgcaaaactgcaaatatttcctatcctttaacagaaagtttgccaacctctgctctagagtagagaaaaatgtataaaagattttaattttatgagggcaatacaactgtcacatcagaaacaagaaaacaaatgataaaggaactcatttatcaatagaggtgaaaggaaattattaaactatattgaaaaataaagatgtcaataaaaggagaaatgat

SEQ ID NO: 266161 - DNA, 737 bp, Homo Sapiens
cagggtggctaaagatccaatccagtgctctttccaggttattattcgttgctcgtagtgcctgaatagcctgatttcgctgaaatcccatggaggtgatgatagctacgatttcctctggaggttggttatccagtccagaagcaccaaaaacagaggctccagcagaagctgcccctccataaccaggcatggtcagcggctcagcaaaatctggctcttccatgtgaacaatgatccagttgaaggccacctcggcgcccatatttccagtgaagtacacagccttgcgacatgcttccagcgggaaacccatctcggccagctgcatcactgatgactcatcgatgtctgatgggtctatcaattggttcatcaggcgatcttttgagtcatcaggaatgactatgggggggctgatgtcctggaagttccttccctctccctggctgtaaccccctggctcggagatggttgatatcaagtaggtctggcatatcaatagaaacatcaaattttttgggaacccagtcaagaccaaaagtgaacttctttatctgcactaccaagtattcagggaatgaagcaaagcgagatgttttcacacccgcagactttgcttgtagggcactgctccagaaatcatcaacattttctggttcagagaaagcctgaaggcaggcactaaatggtatcttggcacgtaccaactcaggaaggggtcttctgtttgcttc

SEQ ID NO: 266162 - DNA, 775 bp, Homo Sapiens
aaagtctctgaaaaggcctattcagaataagcaagaaaggttctgtgattcacttttgcttctggggctggcaaaaaccttctctgaacccacacaccaagttcgtagttggtaggtgcccagccaagtcctgacatcttcatgccccctctgcagagggcggctgtacgatgttcacatgtctgcgtttggtcagacatcatctccttggctgccctttgaaaccaaatcacttgccttggggataaagtgctcaattggcattagtgagaagcccatcctatcccttgacatacttaatcatatatctctccagagaactcacctgacaaatgtctctgagcacaggctgacaccaaagtggcacaactgcacagttctcagatttctttgcacagattgatttttattgcgggttttgttggggtgtcttaatgttcatctcttttccactgcccatcctctgtgaacccatacctctctagatggagcaggtggccactggtgcctcatactcagtattgaaaaccactacatcccagctacctataatgctgtcagctcaaaatcatagccaggtagttcttgaactcagaacttaaatcctgcacgtgggcactccaccactggactgggaccgagctggcatatgttgtttctttgtgtttctacatcaaaatgttcgtctaaggatttggaactgttctgctggataaccttccccgttgttcataggctatttcattgccaaccaactccatcacaggggttggtg

SEQ ID NO: 266163 - DNA, 456 bp, Homo Sapiens
  misc_feature (441)..(441): n is a, c, g, or t
attcggcacagaaagtctctgaaaaggcctattcagaataagcaagaaaggttctgtgattcacttttgcttctggggctggcaaaaaccttctctgaacccacacaccaagttcgtagttggtaggtgcccagccaagtcctgacatcttcatgccccctctgcagagggcggctgtacgatgttcacatgtctgcgtttggtcagacatcatctccttgggctgccctttgaaaccaaatcacttgccttgggggataaagtgcttcaattgggcattagtgaggaagcccatcctatcccttggacatacttaatcatatatctcttccagaggaacttcacctggacaaatgtctcttgggggcacagggctggacaccaaagtggggcacaattggcacagttcttcaggttttcttttggcacggttggtttttntttgcggggtttgtt

SEQ ID NO: 266164 - DNA, 453 bp, Homo Sapiens
taaatgtttctttcttgtgaagagatgttctcgtttgcatactgcttttaaaagactttgatttctcccaagtgtgtatcatctgcacctaggaactttgtttttaagcaataggtctggatacacatttaacttaggaggctcctccaatttgcctcaaacctcttacggagcttctcctcagaagtggtaccatcgccttccaaagtcagcactctacactcttgaatgtaccaaggatctcttggcgacagtaccaagcacggttctctacacaggtgactgaagttgcctctgtgttggctggcatccctgaagtcccttcacgggcctatggagcctagaagaaaccttcacttgcagaaaacttgagtcagaaaattctggaacttgaaaaagtagtaagggcctccagaattgacttagccctagtaataaaagactgccaaaaca

SEQ ID NO: 266165 - DNA, 502 bp, Homo Sapiens
  misc_feature (358)..(358): n is a, c, g, or t
gctgcaggaaatggacattccagtggcccctggggttccagcctgtagcagcttcatctgtgctttgtgcacttggttctcagtcatctctgcaagggaccctgacgcctgggagatcagagccactgaccctttatggcactgctaacagaccccttccctcaggtaattctggatccagaactcattatgggatgtaatccaggtcaacactaataccacttggaaggttccgctctgtctcactctgcttgagtatcccactgatcagtctctcagtgcctgcctactgggcagctcatctgtccacttattcgtattaaatttgctttttatttaggtctctgggagatggttngcgtggggggaagagcccatgaatttcctatatgatcccttgaacatactctccaagtcagtagattacctctcaggcagccttcataaaagtgtttcactgtactggggtttgtgttcatctcactcacatagacagtctctg

SEQ ID NO: 266166 - DNA, 475 bp, Homo Sapiens
  misc_feature (85)..(156): n is a, c, g, or t
tgctgtgcgggaactgaggcagttcctgcaatgtactgtatatttcatgacattccatgtaaaagatgacaagaccgagaccgtnnnnnnnnnnnnnnnnnnnnnnnnnnnnnnnnnnnnnnnnnnnnnnnnnnnnnnnnnnnnnnnnnnnnnnnnaattatcttttctcctgcactgtgcggggtaatacagctcgtttaaaacaagctggagtctccattccgttttccgcgttgcttctcacaactcactgttagaatcccagaagtaaagagaaccccggggaaccgtaaggaagatgaataggacaaagattctaagaaggtgggaaggaagaaggctgcagtctatttcaagtactggtgaatttcagatcagctgtagcctttagttgttattttagagccacctagaccaaaagagaaggagctcaaattgctggtaagtgcttagatagaaattcccttgactgac

SEQ ID NO: 266167 - DNA, 577 bp, Homo Sapiens
  misc_feature (149)..(183): n is a, c, g, or t
tgtgaggtgatagcagagaaggaaagaccctgggcttttgagcacctcatggtttttaccccatctggctgaatctacaggcccatctcaagtagagaggccagactataaaagatagttggtttccacagtttttcttgatcttgagnnnnnnnnnnnnnnnnnnnnnnnnnnnnnnnnnnngacagccagggaagtgactctcagaaacccaggaaccttataagctaagctgcttctcattcttctccttcactggggatggaattgtctccctcatacctgccttcggatccgagcctatagcttgggagggcctgtcacgcacacagtcgaaaaggctggaagttacttccaatggataggggcccaaattgtaggtaacagcccaattttattttaggttggcagagaatggagacatagttgagagatcacatttgacatcagagggcttttatgtccattgtgactcctctggactccccgtatgacagtcagcatgccatttgtatccctacttctggggctgtggcagtacagagttgtgcccagtaggccaacagcatcacctaga

SEQ ID NO: 266168 - DNA, 743 bp, Homo Sapiens
agctaccacaaggcctactaagcagtcatttccctctcttcctgaagacacaagaatcaaagcctttgacaagctccgtacctgttcctcggccaccgtggcttggctaggcactcaggaaaggaacaagttttgcatctacaaaaaagaagtggatgataactacaatgaagaccagaagaaaagagagcaaaaccaatgtctaggaccagatataaggaagaagtcagaaaaggtcctctgtaaatatttccacagtcaaaacctgcagaaagcagtgaccacagaaacaattaaaggtcttcagcctggcaaatcttacctgctggatgtttatgtcataggacatggggggcactctgtaaagtatcagagtaaggttgtgaaaactagaaagttctgttagttaccttcttatagagatatattatgtagaactccaggagggacattaaatcactttaagtataaactgactactcccacagttgagagaagttgtgacctgtacttgtactatggaaggaaggatatcaacgtgtgtatattgatgtttatataagtaactcttgaaggagacttgttctagcgtgccccatggtacctagtgtgtgtctgatgccggttggtgtcaaagatagagggcttcttgaaggaacttgccattccttgctttgaccactgcatgaactgcttctaaattattttattacctaaaaatttaaaatatgccattcattgca

SEQ ID NO: 266169 - DNA, 594 bp, Homo Sapiens
aataagcaaggcttactaataaccctgcatattcctgttgctcccttcttcttgggtttctagattgcgttttggaaagttttacctcattgacttacaaatacagaaataagtgattcttcagaatagggatttggatcaggagcagcagggagtgctcattaaaagggcagattccagactctcacccctgcagattctcattcagtaggtctgaggtgggttgtgagcatctgtagtttaaaggcatccctgggtgattttgaggacttctggttgagaactgctttaatgcatcattcagcctgctagccagtcagtcagcaaatgccaggcatcatctctgtaccactaccccgccctgagagggcagacagggcaagacccacccccgccctccgctggctacactttgttactggtgactattactcaccccttttgaaataggcgtcatttctcccttagcctttcaaaatgaatccttctatactgggaaggttatagacttgccagatctctgagcaggaaaagatccaagaaatcaaatccagccacactgccagtccagcccctcctacagctggggcaatg

SEQ ID NO: 266170 - DNA, 448 bp, Homo Sapiens
gaaatttctagaagcaaatctcgcattcatgaccgccagacctacgggatgtgtaaggcacattctcaatctcatcacttgtgagagttgcattgcctagtccagcagccgtgaaggactctctgctgtttttcctctgcttcatttgacacatgagagagaagagatgaagatggagtgcgggccctgccccggggacatgtatatctctctgaatgtccttgacagacagcagcagcccagcaatgcccagcccccatcctgtctgtatgcaccctggtgagcattttctacagtctcctaaacgctcccattattctgttttgcaggtgtgatgtgtggcacctcagtgttgtcatagcttctgcctcctccgtgtggagagagggcataaagacagagctgagatattatggctattccagaaaataaaatattttttgaaacc

SEQ ID NO: 266171 - DNA, 655 bp, Homo Sapiens
  misc_feature (47)..(96): n is a, c, g, or t
  misc_feature (121)..(197): n is a, c, g, or t
atgtattcttcctcatcttctgtggcagaagagtcacttaagcccannnnnnnnnnnnnnnnnnnnnnnnnnnnnnnnnnnnnnnnnnnnnnnnnntgtgacagagtgagatcgtatctcnnnnnnnnnnnnnnnnnnnnnnnnnnnnnnnnnnnnnnnnnnnnnnnnnnnnnnnnnnnnnnnnnnnnnnnnnnnnntacagaaaaattgttaaataacacaaatgtaagtttcaagtagactctgatctctggtgcctgtgtttgaaatagaaaaacggccaatatgtggactaaagtttgtttattgtaataataattcctatctttagaattaatgattactcgctattactataaagacatttactatattagaaaacagagcttgctattggatttgaataaaacaattgccaaaaacttcaccttcagaatttccatcagtaatctctagcaagtacttgaggatttctgaaccaccattgtccttagggggatctggaaaataaccaaatgtcttattagcaataaaaggatattgatttttattggtaaacatcatcaggactcataaaataacacaccattatactatctgaattctagacatgaccaaaaggcaaaataatttatttcaccaactcctctgttga

SEQ ID NO: 266172 - DNA, 287 bp, Homo Sapiens
ataaaatgattaataaaacaattggtaattctgaataaggatctgaataaatccagatcacagactgttcctttaccaatatgtaaaagaatgtgcaaaattagtaaaaatatacccaaaaatttaccagcaacagagaagcaaagaatggagttcaaccttacactataaacatctaatagatatgtatgaaaatttaaaaactagaaaaggttgggcatggtggctcatgccttgtgatcccaaggactttaggaggcccaaggtgggaggattgtttgagcccc

SEQ ID NO: 266173 - DNA, 879 bp, Homo Sapiens
tttaaatcactaaaaaaatctactttctataaagcatttggagcaatcttgcatataatactcatttgcttagctaactctttttttctgtagataagtaaggtaaatgttaggccactagacaaaattatcatacatcttcaatcatcaatgtccagagtaatgagtcaatatatgtatgtacgtatgtatatgcatttaaaaaaatcactcttttgacacatttcacttttctttgtaagtaatataggtgggctagatcaggggttgtcaagtcagattaggaatcatctgaggagatgtggggcatctggacgatgccaataccaattaaaagagtttctaggggtgtggatggaaagtgggaactggtagttttacaaggtccctgtcaccagggttgagacaccatagcttagagtcctgtaacttgtccttaccaccagttcattctcttctctccttctgtgaggagcgcttctatactaagaccctgaaggtaactagaaagagacaaactccaccaagtcatcccagtggtgcaccctttgaggacttcccactactcgccctaggttcctatgaggcccagtatggagacagagaggtgggggcctgtggggaactggaggctacaggccccacttctaggagatctcccagctccagcccactgtgccatcaggaatgtgggcccatggctgcctggctttcaagagaagctagaaatctgctttctatgtgaaaacctcttgatttttaaatgcttgcaatgaattaaaaatttatcaaaactgtgttgtccaaacaatcatgtatgtgaccaaacatggcctacaaaatgctaatttactacctctgaactagcacaatatcctg

SEQ ID NO: 266174 - DNA, 460 bp, Homo Sapiens
  misc_feature (398)..(398): n is a, c, g, or t
  misc_feature (407)..(407): n is a, c, g, or t
  misc_feature (447)..(447): n is a, c, g, or t
attcggcacagagaaaggtttaaagacaaaaaacatctggataaattctcttcttatcatgtgaaaactgccttctttcacgtatgtacccagaaccctcaagacagtcagtgggaccgcaaagacctgggcctctgctttgataactgcgtgacatactttcttcagtgcctcaggacagaaaaacttgagaattattttattcctgaattcaatctattctctagcaacttaattgacaaaagaagtaaggaatttctgacaaagcaaattgaatatgaaagaaacaatgagtttccagtttttgatgaattttgagattgtatttttaagaaagatctaagaactagagtcaccctaaatcctgggagaatacaaggaaaaatttggaaaagggngccagacgnctgtgggcttcacacctgtagttcccagcttcttttgggngggccgaggcagg

SEQ ID NO: 266175 - DNA, 751 bp, Homo Sapiens
  misc_feature (50)..(50): n is a, c, g, or t
  misc_feature (156)..(186): n is a, c, g, or t
ggccgcttaattaaataaataaaataaaatagcaacacacctcctccaanctccttatttaatttttctcaattgatttatcaacatctggcatatcatatattctacttgcttttagcattttatttgacttccccactggaaaataagtttctnnnnnnnnnnnnnnnnnnnnnnnnnnnnnnnggaacaggtgtgtgtgcatgtatatacatgtaaatatgtttaaaataacagtgacctgagcatatttaaatgatgagaaaaggcactcagaagtgcacaatggttataaatctaggactgggaacagataatgataggaattaagatttctgagaatacaggcagagaaaggatagagaaccccggtggagggacacataacaatcccctcctatcctaacaagaatacggtaacaggagagaaggaggagagaacagtaacagacacaagtaggtctagcaggttcagttatggaaaggtgagggtgctcctgtctagtgacttctaaatactctgtaaaactggaggaataaagtcaactttgaagagtagaaaagggtagatttgtatgatgcaagggggctagaagaagagtagtgatcagaggtttaaatggaataaagaaaatgtgaatacctatcagatatcatacatgcatacaggcacagatggatgggtatgtgcacatacatttgtacatatgtctttaaaaagtatacatacaaacacactatatattatatt

SEQ ID NO: 266176 - DNA, 589 bp, Homo Sapiens
ggccgcttaattaatataagcttctgtttcctcatttataaaacagagatgatagtaataagacctacctcttagagttgagtgggttgaatgtcatgcatgtgtgatatagtgcatgcccatagtcgaggttagctatcagtccccttttttgtaattttcccatagaaaatttagcaaaagttagaagagtaaagcatgccactgcaattgttgagttttgaaacctcatcagtatgggtactctttacatctattctgatgtgtcttctgggatgaaggctgggttatatccttaggatcttcagggaaagcatctatccaactgaggactgtggagaaaataagaggcgggctgccttctgatggccctgggaagctctaggcaactaaaatccatttgaaaaggcactgtgtttatatgtggtttccttcactgtggctgcttgtgagctgtgtggccacttgaatctggcagagacttgacttcatcttactcttatcaggaagtattgtctgactcgatatatagcttctgcctttctgattaatggggctttaccttttgggcttataaactcttccagtt

SEQ ID NO: 266177 - DNA, 709 bp, Homo Sapiens
  misc_feature (183)..(213): n is a, c, g, or t
  misc_feature (647)..(647): n is a, c, g, or t
  misc_feature (684)..(684): n is a, c, g, or t
  misc_feature (696)..(696): n is a, c, g, or t
cgaaaatgtaagattatctgagtaatggacaatttctaatattcattttttaaagtagctaactctgccttattatccccttccacttttcccctggatgggtgatttatataatggaatgcagtgtcattgattgtgtttgaaggaggcacactaaatagcacactattgttatcttgaaannnnnnnnnnnnnnnnnnnnnnnnnnnnnnnaaatcatttcattctatttttgcccatgtctcttgtaatgagctacacatggaattaagtacacagagttctggtgatgtattcattcatgagtttaaggaagtgagattttcagcttcatttccttctaagcatctcaactaggagcacaggggagacaaaaaagattgcaacctctttatacagttgtgtttgacccttggcactctattcttacttcaattatcgtccattgtaatgatcccttttcatgtctagcttaaccctaaactgtgagttccttgagaataagaactttgtcacagtgatgttttaatatattctcaccacacaataaaggatctaagcgcgtgctcaataaatggggtatttgttggggaaatttaaacaaggaaatagtggaattattttctattcactatttgggatacccntttctcccaaaggatattttttatttgaggagtatcnttatttacagtnaaaaatcaccaat

SEQ ID NO: 266178 - DNA, 535 bp, Homo Sapiens
tgagccattgcacccggcaagccactgcctttttcactgccaagaggcagatgacacaaaaggagacgaaagaaaaaccctgatgagggagatgccctgtgggagtctgttgttctagtgaatcatagagcagctttggccaaaagggattggtttcttctccacttttaagtaggttcaggatgaagggaggccataaaacaaagtccacatcttcaaggtaaaaacctacttttaaaggaagcaggccaattagaaactccaaacacagcagttagagatgagagaggaagaatgaactcctcaaagcattgaaggtcaagactaaccttaggaattcaggtcacagccctcccagccccaatacatgaaggtcgttttgcagaaagactggccaatttcattaattgcctttgtgaggctttagaattttggagattatctgaaagagctttttaatctcaagtttggctgtggagcatacagatacaagctgattttcctatcttttaaattttattttaattaagcggcc

SEQ ID NO: 266179 - DNA, 409 bp, Homo Sapiens
  misc_feature (121)..(121): n is a, c, g, or t
  misc_feature (125)..(125): n is a, c, g, or t
  misc_feature (138)..(138): n is a, c, g, or t
  misc_feature (154)..(155): n is a, c, g, or t
tccccacctactctggaggctgaaaataggaggatgacttgagccccagaagatcaaggcctacagtgagctgtgatcatgccaccgcactcccagagtggtaaaaggagaaaggaaaaangtgnggagaaggggaanagaaaaagaaaggggnncaggcaggcaggcaggaaggagaaaaacgggaggagacgggagaagaataagcaaagaataagcatgcccttgatctagcaaactcacatctaggaattaaagctaagaagaaaaatgacacaagtagataaggttagcacagcacttttttattatagtattttaaaaaaagaaataagtaaaatatctaccagtagggatttggtcatgtggactgtggaacatatcataatgtataactattaaaaattat

SEQ ID NO: 266180 - DNA, 651 bp, Homo Sapiens
  misc_feature (159)..(159): n is a, c, g, or t
  misc_feature (171)..(171): n is a, c, g, or t
  misc_feature (225)..(266): n is a, c, g, or t
agccacagacccttagcaatgttccctggctttcatttgcagttggccttgtctctggacagagtttgatgtgctgggacgcagcgagcccagatgacgatgttggccttgtcctcaaactctcctaagaagttcctcattaaggccaaggtcacagtnagagtcacactntgagtggtgctgtttggcaaggttgccacacattccccatgaaaaggtttgggnnnnnnnnnnnnnnnnnnnnnnnnnnnnnnnnnnnnnnnnnnatggtggggaagatgcaccaattcaccctacaatgtgttcaggaatgatgtctcctgaagccagttccaaattccatttcccaggtgggtcttggtcacactgaacaggaaaattcaacgatgctccctcagagtcctgaggatcaaccccttcccctttccacccccaaccacaccacctacacatgtcatcattctctgcccagtgactcagcgggcagaaggaagggaatccggaggataccaggcatgcacactgtggcttggtggagaacactgggctgctggtgagtgctgggggaccgggctgccgtcaggccctggagtttttggtggtaaagtgggtggacgttgcattggagaaacaggattgggtaaacatcgc

SEQ ID NO: 266181 - DNA, 674 bp, Homo Sapiens
gcaacctcccaggctcagtcagtcattctgcctcagccatcctaagtagatgggaccacaggcacatgccaccatacccggttaattttttgaatttttgtagagacagagtcttgccctgtttcccaagctaatatcctacattatatgatacatgcagaaaaaaactttcttcccctttaccccgagtgccctttttagctactttttaacccttaacccatacttggaggtagttaatataatatacaagtgctttttacaaattagtgaaataaggctctttattataagtgaaaaatgttagccttagttctaggtcattcagttagtttccccctcctttccctagagactcaattaacattgtagactttaacagtttacaaaatgcatgataaacatttaaccaagcatttgcagtccagatggtcttcattcctttctcaccatagctgtgaggtagaaagggctggtaaacgagctgcatctcctcacttgtgattgaatacttgttctagcagaccatctgccactctaggacaattaactgggatattacttagatatagcaatagtagtggtcttgctgttgcttctatgataaatactcactgaattctagatatttgcatcattcatcgttgtttctgaaaaccaggctacctgccagt

SEQ ID NO: 266182 - DNA, 491 bp, Homo Sapiens
acccaaccccttcccacccacacagccaaggtgagaaaggaaatgaaagacccatccggaaccgccaaaggcctgggttaaaatgtttaatcatgccattttgtaaaactgttaaaagtcctacaatgttaaattgagtcctcctaggaaaggaggggaaactaactgaatgaccctagaactaaggcctaacatttttcacttataataaagagccttatttcactaatttgtaaaaagcacttgtatataatataaactactccaagtatgggtaaaggataaaaagtagctaaaaagggcactcggggtaaaggggaagaaagtttttttctgcatgtatcatataatgtaggatattagcttgggaaacagggcaagactctgtctctacaaaaattcaaaaaattaaccgggtatggtggcatgtgcctgtggtcccatctacttaggatggctgaggcagaatgactgactgagcctgggaggtt

SEQ ID NO: 266183 - DNA, 474 bp, Homo Sapiens
  misc_feature (439)..(439): n is a, c, g, or t
  misc_feature (446)..(446): n is a, c, g, or t
attaaaataattaaggaaaatatgtctatacctgtaattgctaatggagacatcagaagcttaaaggaagcagaaaatgtgtggcggattactgggacagatggtgtgatggttgcaagaggactcttagcaaacccggccatgtttgctggatatgaggaaaccccactgaaatgcatctgggactgggttgacattgctcttgaactcgggactccttacatgtgtttccatcaacatttaatgtacatgatggaaaagataacttcaaggcaggaaaaaagggtatttaatgctctgtcaagcacatcagcaatcatagattaccttacagaccattatggcatttgactagacttcccaaataattttaatatatacttttaggacccacagtgaaaccacagaaggtcatattttgtaccttaaaccagtaggntctcaantttagtattaaaaacattccgggggagc

SEQ ID NO: 266184 - DNA, 877 bp, Homo Sapiens
  misc_feature (107)..(212): n is a, c, g, or t
  misc_feature (350)..(361): n is a, c, g, or t
  misc_feature (510)..(622): n is a, c, g, or t
gtgaacatggctcactttaccctccaactcctgggcttaagcagtcctcctacctcagcctcctgagtaggtaggactacagatgagcagcaccatgcccagccaannnnnnnnnnnnnnnnnnnnnnnnnnnnnnnnnnnnnnnnnnnnnnnnnnnnnnnnnnnnnnnnnnnnnnnnnnnnnnnnnnnnnnnnnnnnnnnnnnnnnnnnnnttattggtgtgagctgctgtgcccagccaatgcttcttttatatatttatttagatttggtgtttgatttttttgttaataagggaccttctcaaagatacttttaaatgaaaagacaaagggtcagaaaatactggnnnnnnnnnnnnggaaacagtctcattctgtgacccagactggagtgcaatggcgttgatcttggctcacagtgacctccgcttcctgggtccaagtgatgcccctgcctcaggctcctgagtagctgggacaggctcatgccaccatgcttggctaattnnnnnnnnnnnnnnnnnnnnnnnnnnnnnnnnnnnnnnnnnnnnnnnnnnnnnnnnnnnnnnnnnnnnnnnnnnnnnnnnnnnnnnnnnnnnnnnnnnnnnnnnnnnnnnnnntgagccactgcccctggccggttggctgctattttaacttaaggggtagaagactggaaaggaggacacatgcaatacagtgtgtatgagtatgtgtgtatttatatatgcttgttgtgtgtgcttagagtgactctagaaagctgtggaagagactgataacaatgctgttggggtaggtagattatgtagtcagatgtcagagagacttattttcatgtgtaaccttttgaactgttgatgttcttattacca

SEQ ID NO: 266185 - DNA, 855 bp, Homo Sapiens
ctaaatcaagtagtgctactgaaatccagtgcctaatggagcagatggtggaggtcttagactctggaacatttatagtgatgcttctgaatgcaaaacaccaagagtggatttcacaggctgtgaatctgatttgattttgatgggagtaaagcttccattttcactgtacttgaaccacattgaaaaaaagcatgtgtgactgacacaagctagttaagaaaaaggaacatgttaaatattagtcccataaagggaaggcagtttaaacaagtgattatttgtttgtatcatttaacatgattatggtttgtatacaataccaccgtttgaaccttatgtaagatttcatcagaatagttcaaagttaaaacaaatgattacagaaaacaaatagaaatttgtccaaaggcaacgagtcttggttttctaaggtggcaactataccgaggcaaattaccaaaatgtggacctaggtactatcaaggtccagaatatctcctcccctcagctttgtaggtctaatccatgaacggccagcctgtgaagctagagctggtcatgtgcagctcaaggtgtccagacactatgtcagatctgcactttctgaggcctctttcttctctaaacaagggctaagttttatcacagaccactgcaaatatggtgaaaaggagagatggatgatacagtttgtgagtcccaggggcaaagaaccactcaccttctgttaacatgtgaattccagtgaaggagagaatttagtgggacccgtcaaagtatactatatgcataaaggagagagacatttgagatgaaataaaatagaattggagagagacatcagattctctt

SEQ ID NO: 266186 - DNA, 608 bp, Homo Sapiens
  misc_feature (56)..(56): n is a, c, g, or t
  misc_feature (390)..(390): n is a, c, g, or t
  misc_feature (504)..(514): n is a, c, g, or t
gaccaataaatttaaataagaaaaaatataaatgtaaaacctatgggaatatttancttatctgcagtttaaagccactggcaaaagagattactaaaaatgttagtccactatgtaaccaaataatatattgctatcatcttttacctacaccattgagtaaggtgaggtaggttagtttgtggcataataacgcttcactgaatgcacaagtcttaacatgttaaaacatgtttaaaaatctaagttcatacataatctaaaaattttgaaatgtactgcattatgaaaagcacaattcataaaatgatataattgaattttaatattaaaaaattttcactataaggcagaatattactctgaaacacctaccctcaggcatcactncaatattatcagttaaccacaagagcctctctacttagattttcatccatgcatctttcattttaatgttcttactcttccacagaaaaggtcataaataatgcccacctaatnnnnnnnnnnntctcatatctttgatgcagcaagttgatcacatgctttcacatgtgaatacaataggaatgaagaaaaaacatgcgccgggtgcagtggctcat

SEQ ID NO: 266187 - DNA, 685 bp, Homo Sapiens
actaatgtggagcacagggaggtaaattatactgcccacattcacaaagctgattgatggcaaagctgagatttgaaaccaatcagttttgtttcagaatggcctgcctaaccattttgcgtactgcttccctaattttgacacgtaacattggctgggacttagataggaggacaatatgtctgcaacatctgtcacttcagtgatccctgtgatcacctggttagtcagaacatgatgtcttcttgatccatcacagctccatgtctgtctctctaaccttgggcttaaaaaacaaatgccctttccagacaaagaggcatcattctgagatcaaggatacagtgtctgtagtagattaaagatgaccacaaattacttgctacttctcccattgagaggtggaatctaattctcctccctttaatatgggctacccttagagacttacttgactaatagaatacagcagaagagatgtctgactggccaggctaagtaagtaagaagccttgtagcttccatgtgagactcttgggacatctcttctaaggcctaagctctggataagtcaaactaccatgctagataaaccacgtgcagaggccatgagaccacatgacaagggggaggggcctagctgagcacaacgaccagcagttcccatcagggtgccaggcattat

SEQ ID NO: 266188 - DNA, 774 bp, Homo Sapiens
  misc_feature (414)..(444): n is a, c, g, or t
cctgtctgaaccaattggtccagaatccccaagctctacggaatgtcctagggcttggcaatgttcagatgtaccagaacctgcagtctgtgggataagtagaatctgggttttcagactgaagagaagaaagcgcattgcaagacgactggttgataccctcaggaattgcttcatgtttggctgttttctcagcactgatgaaatagcattttctgacccaacaccagatggcaagttatttgcaaccaagtactgcaacacccctaatttcctcgtatataattttaatagttaaagctgatttcagttataaaggagttactatctggataagttcaaagagctccttattataaaatacaaactatttaataaatatcaaaataaaaaataccgagactcacactcatnnnnnnnnnnnnnnnnnnnnnnnnnnnnnnntatcacagttttgttccttatgagttgaaaagtcaggaataaatttgttgaaaattatctggggattcaaaggaaaaatctttgggtgattccctgattagcactctgaatgtttaattatgaaactttgtagctataactggaaaattacctgactctttgtaagagtattaaatacaaagtgatttttctctagaaatgtgacctggtcttttataaagcacactcttagaccaggattatctaatgccacatcagaagcaaacaggcaaatttaaacttggacaagtaatttctgtgcccaatttgtaaggggaattcctgaattta

SEQ ID NO: 266189 - DNA, 641 bp, Homo Sapiens
  misc_feature (156)..(210): n is a, c, g, or t
  misc_feature (351)..(393): n is a, c, g, or t
acagtttataattaatttggctgtccatactaatattgataatagatataattgtctaagtaataggcttttaaaatgtttggcatgaaataatttgagaagcatttcccctttaaatttattttatttttttggagacagagcaaactctgtcannnnnnnnnnnnnnnnnnnnnnnnnnnnnnnnnnnnnnnnnnnnnnnnnnnnnnngctcaggggatcctcccaccttatcctccccagtagctgggaccagaggtgtgcatcactatgcctggctagttttactgttttttgtagagatggagtctgactatgttagtcagatcggtctcacactcctgggctcannnnnnnnnnnnnnnnnnnnnnnnnnnnnnnnnnnnnnnnnnngtgtgagctgctgctcccagcctgaattttttgacgtcagtgttaatttgtgtgtgctatgttctgtctggatatattggactggtagcttgcaaacagcctaacccttggagataagttgattttaaattaagagtaattgtagtggataattgcagaggctcttaaaagagtaaatttcattttaaaaagaaggaaccaggagtaagaatgtaaaaataatacctacctttttatttgttttcttt

SEQ ID NO: 266190 - DNA, 462 bp, Homo Sapiens
  misc_feature (20)..(20): n is a, c, g, or t
  misc_feature (34)..(34): n is a, c, g, or t
ggccacacacaaattaaacntgacgtcaaaaaantcaaggctgggaaacagcagctcaaacctgtaacccccaaatactttgggaaggctgaggcagaagaactgcttgaagccccaggagtgtgagaccgatctgactaacatagtcagactcccatctcctacaaaaaacagtaaaactagcccaggcatagtgatgcacacctctggtcccagctactggggaggataaggtgggaggatcccctgagcctcggaggagccagctacagtgagcagtaattggctactgcactctagcctgggtgacagagtttgctctgtctccaaaaaaataaaataaatttaaaggggaaatgcttctcaaattatttcatgccaaacattttaaaagcctattacttagacaattatatctattatcaatattagtatggacagccaaattaattataaactgca

SEQ ID NO: 266191 - DNA, 755 bp, Homo Sapiens
tgtgtacgcatccagttagattacagttcactatgtatggagaaacctttaggctgaccttaaaatatgtaagaaaccagctttaggctaaacctaatttaacacaggtaaatctcaatttaaatactattggtaaccttttctcattattggctgacaaatgatgtcccttttcctttagaaacattttcaaagaatccaatctttttagtcgtcaaatcaagtgtttcttagttttcaactgagtaagaaaactttttcatttattatttactagggtcaggagcatttagtagcaatgataaaagtgcagatcagagactacttatattgaacataaggtctctattcaactgacattctgttaagtatttctagtcaatggattccctacgcggactgttgaaaactttaagctcaggataagtggtctggatgtgcagtgcagtttagtaaatgaactagagctcgggttctatttgcaacccagttttttggagctgaaaggggcccttggaactctttaatccccaggtagaaaaatggagactcaggaaagcagcacagagcatttgttgtctgagataagagagatggggccatttgagagctctgacccaggcccatggcaggcaaagggctgcagagcgtttcaaattggcaaaattgacctgtacttctccatgttgtgcttctcctcagaacttttgggaagccgtgtgactgtcatcattccagctagaacactttcttcc

SEQ ID NO: 266192 - DNA, 475 bp, Homo Sapiens
  misc_feature (130)..(146): n is a, c, g, or t
  misc_feature (150)..(184): n is a, c, g, or t
aaattcttcaaaattccttaaaataaatgtgtgtgcatgtgtgtctgtgtatatatatagcctatgtaatgtctaatatagatctataatatatattagataaatatacacatacttatcatatatatannnnnnnnnnnnnnnnnttcnnnnnnnnnnnnnnnnnnnnnnnnnnnnnnnnnnngaaacaaatctgtttattcttctagcctctgtatcatcaggcctctttgttagagcaggtgagctttaccctaactaattcagaggttgattcgttttcatgcatgtagatacttgtcatttagcttctattatctgcctgtattttaaggttctttgtcttaaaatgttatgactccaggaatgttatatattaagtatattaaccttttgactattatatatcctggcaaacatcttgtaatcagtcacttgtctctttattttatttggagcggctttcaacctagag

SEQ ID NO: 266193 - DNA, 817 bp, Homo Sapiens
  misc_feature (748)..(756): n is a, c, g, or t
aaggaagcatctgcgctacattgtgcttcaggcccccccagcaactttcccggaggtaactatttgcctggaaaactaggaaactgggttttaaaaacagaattttaagcagactttttagagggacaaggccatttgatggtagtgattttggttttgttttatgaaaatggtacaggtggtaatccctgatgacagaatgcactgagagtggggccaagggccctgaaggatcctgtctgttcagtctggttaaggcgacagctgggcgggcatgtggccggggagcagtggcacagcggaccctggcagtttgctcacacctggccctcgtcccagagccagcccacctgcctcttggccctggtagtgactccacagaacttccccgagcagaagcctcacagtgggccagcacccatcttgcatgcaagggagaacctgcatgcagtgcacacaccccggccagggtggcacatggctgctctttcaatgtgaagccaacaccaactggagagatttaactataaaggaatattttttaaataattcagttttggttgtcattactcacttcctttccttcccatttcgatctcagaaactgttcttttacagtgttgacaaaaaagaaatgtatgggccaggtctacaaagtaacaccttgtcataaaacaggctcaaaagcataggaatcatgctttaattgccatttagcatccactaattcccatgagatctgtgattnnnnnnnnngcctctggcctgcttgtcctgtcttaaaagtcatgagtctgttttatgaacagaaagaatg

SEQ ID NO: 266194 - DNA, 715 bp, Homo Sapiens
tttagtatttccaaactgtcgcttctaaaggaataagggacccaaattccctgactagcatgtcaaacaaaatttcctggtttttttcttctaaattcaccaacttttctatttgggctttcaggaatgcctcctccatctagcaatactgactctgagtcaagttcattttcagtgcacccagcccttctgctaattctcatttcgacttcaagctcttctgagcttccatcttttcagatgaagcgcacttgtttatggctgcacagatcccttccaagcccttctgatctctgtatctttgcagttactttctctggttcatttccatcttggtatttgccgaggccgtctgccttgagaaagtgatctcggctgtatttatgaggtgtcctttctaaccaggaagtgtatctggttgtcacaatcgctgtaacaaaagcccttgtcttaacctgccactaccagcgatatcctaccacagttttgagcatcagtgcgggatgggtcccacaccctacacgttctcccttatccttggacaaaagcatgaacacacccagaattttataaggctgtgctcaccgttgtcttcaggagacacaatccaaaaatataagtccataagatacttgaaacatttcaaacatattattcagatgaaccacgaggattacgaaaccattgaagcccattggaaatgagaaaagtgagt

SEQ ID NO: 266195 - DNA, 743 bp, Homo Sapiens
  misc_feature (564)..(671): n is a, c, g, or t
agcagggggaaaatgcctgatctggaagttgtgtctgttatttccagtcacttcccattgttcagaatttagtcacctggtcatatcctagctataaatttgggttggaaatgtgtttcttctgggcagttgtatgcccagctaaaaatctattatatagcaggagggagaaattaatattgggggaacaaccagacatctctgccacaatcaagactttgttttgtatttctttgagtgctacacagtacttaacactgtggcttatccctgaagtctgaataaattcttctcattagttctttgtatgaaagactgaaggtctttggatcttggatttacctgctgctggggcaataagaaccctaagagattattcacagaagtgtttcctttttaatccaggcaataacaggaaagaaaagtattagtatacattgattacaatgatagcatgacatttaacctatatttataacttgttttccaatagtctgcaaaaacttaaaaagtaggaagaagccagccacagtggctatcatccacattcacagtggcctatcnnnnnnnnnnnnnnnnnnnnnnnnnnnnnnnnnnnnnnnnnnnnnnnnnnnnnnnnnnnnnnnnnnnnnnnnnnnnnnnnnnnnnnnnnnnnnnnnnnnnnnnnnnnnttagccaggcatggtggcacacacctgtactgccagctactctggtggctgaggtgggaggattgcttgaac

SEQ ID NO: 266196 - DNA, 573 bp, Homo Sapiens
  misc_feature (208)..(208): n is a, c, g, or t
  misc_feature (267)..(267): n is a, c, g, or t
atttaaagttgaagagagttgaagtaggtgatagtttagggtggtctttgaatgtggcagaacccacaaagggtggtgcatgaaagtttgggaaaaagctgagccggaggaaaactggaaggctttctcctttaaggacccagtgtgattctaggctgttggaatgatatcttccagatacccgtttgtcctgttgctctgcctcccntccgtgagctgtgctcacgggtggcccaggtgtttgacactagtatccagagacaaacntcagacatgcgccctgggctctactcctggaacctgggagaaagggctgccgtagggaaaggtgtgaacgcacaggtttgcatgcctaaaattataacacttttttattgcaaaggttcttttcagcttttttcttttcaagtaaatggagatgtgtctttcttctgtttctggtgtcctttttctttccgtaaaataaccacctctttactgagattggggagggaagtctgtctccattgaattgtctgctgtcgacatcagataagacattcccttctgttctgttttcaaaagaagatgatg

SEQ ID NO: 266197 - DNA, 542 bp, Homo Sapiens
  misc_feature (43)..(43): n is a, c, g, or t
aaacagataagtggtttgtcaccagttattaggcaacgctggnttataataaaaactgacccaattggtaaactgtgtctggactgagagaaacaatgaaaaatctgtaaatacctgatgacgatgccaatacttcgtgcttcccagagtgcagtgataactgttatagcctatattaatcccctagagctaccataacaaattaccagaaatctagtaacttaaaacaacatatttattatctctcagttctggaggccagaaattaaaaatcaagggtgttataatagcaggatgggtcctgagggaggaagccatgccataccctcttcgggcctctagggggaggccaacaattctccattttccttggcttgtggccacatcactccaatctctgcctgtcttcacatagccttcttctctgtgtgtctttgtctcaaatctccttctcctttctcttataagggcaccaatcataggatttagagcccagtctaaatccagggtgatctcatcttgagatccatagttaacatctg

SEQ ID NO: 266198 - DNA, 878 bp, Homo Sapiens
ggcgaaaagagcgggaaggggagtggaaggcaggggctgaagacacaggccaggcggaatgaagatgatggtggtcttgctcatgctgtcctcgctcagccggctcctgggcctcatgaggcactcatctctcaggcaatacctggactctgtgcccttgccaccctgccaggagcaacagccaaaggtagtgccgagctagaccacaaggcctgctacctgtgccacagcttgctgatgctggccggggtagttgttagctgccaggacatcactccagaccagtggggcgagctgcagctgctgtgcatgcagttggaccgccacatcagcacgcagatccgggagagcccccaggccatgcaccgcaccattgctcaaggacctggctacccagacctacatcccgttggcaggagctgctgacccacttgccagccccaggcccagtatttcagcccctggaaagacatctaaagggacagggtcagggcagcccagggctcctggcttcagcaggaagtgaacaggctcagggaactggaggaagcgaagcatcaaggccagaggaggccacatgctgaccagcctgatgaggcaagagcctgcccctgccaccgccccgacccctctcctctctgcaagagcctgcctctgccaccgccccgaccccctctcctctcagcaagggatgggcctctctgcctcgcccacccctcagcccctcctcccagccatctcctcttccctaaggcctctgtctccatagctctggtttccctgggcctcagtcctccccaccctccttcctctgtctccctgtcactaatgtgaggtttctttgtgcacattaaagtcttctttcagcatcaaaaaaa

SEQ ID NO: 266199 - DNA, 411 bp, Homo Sapiens
  misc_feature (371)..(371): n is a, c, g, or t
actactaatactttacaaataatgatcaaaccaactacttacctaaatatttaggaaatgaatttaacaatgcaaggttaatcaccaatgcaagctatcctgtcaggtggataaagtaagaaatcatgtctttttaatctcctgctctcatttaatagctcttccaatgtgcttaagttatttacgtttattaaacgacgagacaacctttcaaaaatgcagagatcaccgtgctgaataacctcaggcttaagtcgaataaaaggtatctttcaatttttctaggaatttaggctaaacaaaatcccacaatgtgccatttcataatttttaactggcatacaaatgccaaaatggggatgttaaaaaanaaaatgggtgttaaaccccttttaatggatttaaaaaccc

SEQ ID NO: 266200 - DNA, 616 bp, Homo Sapiens
ggcagcctttgaggaaaccgtaccttggggatcgccaggcaggattagtggcaggaattgagagaacagagccccacagagctcctcggggaccgtcccccagtcacaagagtatctcaaggaagtagtcttctcccacatcccccaaagataactaccagagggtcagttctctgagcccttctcagtgtagaaaagacaagtgtcaaagcttccccactcaccctgagtttgccttctatgacaatacgtcgtttggcctcactgaggctgagcagaggatgctggacctcccaggatattttgggtcaaatgaagaggatgaaaccacaagtacacttagccgtggagaagctggtgatctagactgagaatcagcctgagcttaacacagctggggtctgctactcgcgttttgtagacttttgtgtaactatttgtaccgtaggacagaatgtgaggaggaagtaacacacacagaggaggatgtgtgtgtgtgcatgtgtttgaattcacaaggaagaaattatttatcttgagctttttcctttgttattcagtttttattggtttattactaataatgataataaaatgtaaacaagtccctatgcta

SEQ ID NO: 266201 - DNA, 665 bp, Homo Sapiens
  misc_feature (391)..(399): n is a, c, g, or t
tggaaagttgcagttaaaggaagttatctattgtcagcagaggagggggtcacaaggtgcatggtagggagatcataagactcattgtccagaagaagaatgtcacgaggtcgatcaatcgatcagttggggcagggcagtaacaagtcataatggaacgttgtaaggttggtcaatcagttaagacaggagctggctgtttcacctatttgtagtttttggttgcctcaggccatctggatgtacccatgcaggcttgggctaagaggcctgaaacccaccactttcccatgtccaaatctttagtagatgtacccccaagatacacattcctcgggaccttcttttccatagttaaaacttcacccctgaaatgtagaaacaggaaggnnnnnnnnnaagtttcagtgcaaactcggagcaagtgtcataattttctgtctccgatgtgtagaggtgacattttctcagaactttcatgttaagctggaaaactggaaagcgagtccactttgtcattctgtcactcactcattttctcactcaacaaacatgcctcacacttatctaaatctgctaggctaaaagaggtccctggtgtctgtaactttctaattctgctagaattctagagtgagctcatgaaataaatgaaaaggatgaag

SEQ ID NO: 266202 - DNA, 606 bp, Homo Sapiens
  misc_feature (435)..(435): n is a, c, g, or t
  misc_feature (472)..(472): n is a, c, g, or t
  misc_feature (479)..(479): n is a, c, g, or t
  misc_feature (508)..(508): n is a, c, g, or t
  misc_feature (540)..(540): n is a, c, g, or t
  misc_feature (555)..(555): n is a, c, g, or t
  misc_feature (566)..(566): n is a, c, g, or t
  misc_feature (571)..(571): n is a, c, g, or t
  misc_feature (579)..(579): n is a, c, g, or t
tacagtgatcacagaaggctttcagagaggcatttgcagccttaaaagagcaagacaatactttgttttgactttcagcgttaatatttggggtttgaaacctttctttgtagtttttgctagttgctgatacatttttttgtctgagaaaggcagggaaatgtgttgtacttcatcattctttctcaattcttcacttgcccttctcattccagtcgttgagctttcttcatggatccattcccacctagaatgccctttctcagtcttttccaaattctaccattcctcttgttcagatcacatcttcttttagaaactttctgagttctcagctctagagactatttcccaagaagttttccctaaaaagtagagaatttgttgttatgaaagaaaaacctggctgagcgcagtgcctcacgcttataccancacagcctttgggaggcgaggagcagatcactgaagnaggagtngagacagctggcaacatgggaaactcaantctactaaaacacaaaattagcgggtgtgtgnaagtctgtaatccantacttgagagntgagnaggagaanccttgaaccaggagtggaggtacagaa

SEQ ID NO: 266203 - DNA, 864 bp, Homo Sapiens
  misc_feature (54)..(54): n is a, c, g, or t
  misc_feature (370)..(382): n is a, c, g, or t
  misc_feature (405)..(405): n is a, c, g, or t
  misc_feature (487)..(487): n is a, c, g, or t
ctaatttaacctgcaaaatgccctaagcccacttcactggattaatttgttatncgcccgtgaactgaaatctgtgattccatctgaaggcagtgagaagtggtgttaccatctgaagtgggtcagggctcttacctgactaagctggtactttagcccataagtgaaacaaaatggcactttttaggactacctcagattcggttgaatttctaacttcctgaaatactttctctcacagattctctgctggtctctaagacttaaaaggagagaaaataaaaatatcaaattaaagtgacaagttaactaagggagctgactactgggagaaaaataggaaagttgcgtgatcccaaaactggatttnnnnnnnnnnnnngttatttcagggacactcatgangtggccacagcacaaaatcctgcagtaggacttacctgggctcgacagtgtggtagcagcatcggcacaacctcaagtgganacccagaggggacaaattcccttgaaatttcattcaaaattttcccagggccagtttttaagagtacctggaccttcgtcagccagaatttgttaaggaagcaagagggtttggtttaaattctgggaggtccaggcaacatcagagccacttcctgttcctgagagcagaagccagtgggtctctggtcctccttggagctctgctaattcttgctggtttgaggttaatatgctagagcacatgccccccagcagactcctcaacctcctcttgaagccaagaaaaagacctataacaatgccaaggtatcttttaagtgctcctaagacagcttcaatgcagctttggacaagggacacaaagcctcagagaaa

SEQ ID NO: 266204 - DNA, 689 bp, Homo Sapiens
  misc_feature (496)..(504): n is a, c, g, or t
  misc_feature (527)..(627): n is a, c, g, or t
aacgcacacagtatctagtcaggggaaaagactgcatttaggagatagaaaatagtttggattacttaaaggaataaggtgttgcctggaatttctggtttgtaaggtggtcactgttcttttttaaaatatttgtaatatggaatgggctcagtaagaagagcttggaaaatgcagaaagttatgaaaaataagtcacttataattatgctacctactgataaccactcctaatattttgattcattttctgcctatcttctttcacatgtgtttttttacataccgtacttttcccccttacgtttgtttccttttattttatagagcagaaccctagtcttttaaacagtttagagtgaaatatatgctatatcagtttttactttctctagggagaaaaattaatttactagaaaggcatgaaatgatcatgggaagagtggttaagactactgaagagaaatatttggaaaataagatttcgatatcttcnnnnnnnnngagatggagtctggctctgtctnnnnnnnnnnnnnnnnnnnnnnnnnnnnnnnnnnnnnnnnnnnnnnnnnnnnnnnnnnnnnnnnnnnnnnnnnnnnnnnnnnnnnnnnnnnnnnnnnnnnncagtagatgggactacaggcacctgccaacacgcccggctaatttttttgtatttttagtag

SEQ ID NO: 266205 - DNA, 814 bp, Homo Sapiens
  misc_feature (144)..(173): n is a, c, g, or t
  misc_feature (796)..(796): n is a, c, g, or t
acttaattaggaccaggcagtcagtcatctgttctgggagacaaaccagtccaggacaagtagcgtttggacaatatgccaaatcctgtcacatcacattgttgctctaaaatgggtggatggattgggttgatggcatacgcnnnnnnnnnnnnnnnnnnnnnnnnnnnnnngactaagtctagtggcaattaaatagagctcaaattaaatagagcttttgctttgaggtctgaatccatctccatgatttgtcactagactagtgacaaacagtggctgggatagcatatgttgtttagacagcttttgcttgttctaaaagtttgaatgtgaattggggtttgcaactcaaaatttgtgtttaatatttgcaccttatgtttaatgaacattaaagtttgtgtaggccatgtgaaaatcagagactgtatatttggctgaattgctctgtaatacatataattttatttgggagctctctgtattaccgaggacccaggatagagactcttactgtttctgacctgatcatttaagggcaggtttttgcccaggttatgagactgatgcatcatgccttgaccagttaagattagtgacaatttaaattttctgcttttgatttaagtaaaaattcaaattaaatagagcttttgctttgagggctgaatccatctccataatttctttctacatgcacatgtgtagacaatttccctttatctgttcttacagataaacttctccataattgcacacttatctggggatctgagataagcaaaatgatggntttcttaattaagcggcc

SEQ ID NO: 266206 - DNA, 540 bp, Homo Sapiens
  misc_feature (425)..(500): n is a, c, g, or t
ttttgagatagggtctgcctctgtctcaaacaaacaaacaaaagatgacccatgttgcttatgatcctatgttggatcacctggcaggatggcagcagctgaagcagagaccccagtgaacactggcatgcctctactgctgttcacagtgactggcactgagagccacctttccctccacagcctttggaaagtctcacatttccccatgggtcctacttcactccctgctcactggctagctttctccttccccacaggtacttttgactttggcttaccctatcaatcatgagaaaataaacattaggaatatgtgacccaaaagatacctttatatagaaaagatacctttatatttacatatgtgatacattgtttttaaggtaaaattccaaaatctcagtatagtaacaatgataatnnnnnnnnnnnnnnnnnnnnnnnnnnnnnnnnnnnnnnnnnnnnnnnnnnnnnnnnnnnnnnnnnnnnnnnnnnnngttctaccaatgttactctattataagctaaataatgata

SEQ ID NO: 266207 - DNA, 801 bp, Homo Sapiens
  misc_feature (12)..(12): n is a, c, g, or t
tatttacaaagnagaaggggccactcgtgtgtgagcagcaccgagggacagaggtaccttgcctgcttgtgtcccctccaagtccttctgatattttcctttccagctgttgcctagtttcctggtattaaggagaatcaactctctggataaacgtggtaaatatggcccatagtcccatctttttacaggcattttttacacctggagcagccagaggacgcatgcatggctcttcggaaggtaatttagggatcacccatgtaagtttcctaaggatttctttaacatggttcttctgattcagtccggccaattaaatctaaatccacccctgaaagccatctggtgtggataacaagcccacaaatgagcagtcagctttttgtgccctttagggcctgggacaaccacgggatctaaaaggggctggaactagaggtcttgagctcctgttcctaaaatcatcttcatccctatatctgcagccttctccctgccacggcatgcaccccacacatgcgagcctcccgggtactgtcatcctgaattctgagaccatccagcacttcctttagttttgccctggtgctgttgacttttgtttactgaagagtgtgctggaggcaggacaagggacatggaaggctgcaatttaagagtctaaaaggttttagaatcctgaaggaggtttaacaagctgaattgaagaataatacctttctcaactggagagaatttacatgattgcattattgttaaaattaacatctcatctattaaaagcatttgtagattaaa

SEQ ID NO: 266208 - DNA, 500 bp, Homo Sapiens
  misc_feature (326)..(326): n is a, c, g, or t
  misc_feature (405)..(405): n is a, c, g, or t
  misc_feature (422)..(422): n is a, c, g, or t
  misc_feature (448)..(448): n is a, c, g, or t
  misc_feature (475)..(475): n is a, c, g, or t
gtatttacaaagagaaggggccactcgtgtgtgagcagcaccgagggacagaggtaccttgcctgcttgtgtcccctccaagtccttctgatattttcctttccagctgttgcctagtttcctggtattaaggagaatcaactctctggataaacgtggtaaatatggcccatagtcccatctttttacaggcattttttacacctggagcagccagaggacgcatgcatggctcttcggaaggtaatttagggatcacccatgtaagtttcctaaggatttctttaacatggttcttcttgattcagtccggccaattaaatctnaaatccaccccttgaaaagccatctggtgtgggattaacaaggcccacaaattgaggcagttcagcttttttgttgccntttaggctttgggggancaaccacggggatcttaaaggggggnggggaactaggaggtttttgagttccngtttcccaaaattcatctttgatcc

SEQ ID NO: 266209 - DNA, 329 bp, Homo Sapiens
  misc_feature (22)..(22): n is a, c, g, or t
gtaccccaccgcggggtggtgnctctgactgcgggaaccgttgaagagctgcccccggggagtcagcgaggcgccactggtctcttagacatcttctcaagattatgctaagagaaatgactgcacccttttcctgagctatggcagtcagacctggcagtggtaactactctacagaactcccaaacctgggcaaggatggtgcagattttggcagattatgggctttgtccccacccagcacttgatgatattataaaatatgacaccttcaagtataagcaaccaaagaaaactagataaattggacctcataaagtaaaacaaac

SEQ ID NO: 266210 - DNA, 1073 bp, Homo Sapiens
  misc_feature (606)..(606): n is a, c, g, or t
  misc_feature (944)..(944): n is a, c, g, or t
  misc_feature (955)..(955): n is a, c, g, or t
  misc_feature (1025)..(1025): n is a, c, g, or t
ccttagatcagggtgcaaaggaagaataatgagcagcttttcagagggaactgggcgtttaggtgttcaggggagggggtggtgcttttaaaatctcaggcttggcaccaaatgcgtggcaattttacggtcaattggcgggacgatcctgggaaccagacattctggccttgagttgatggtagggaaaccagcttacaggcaacagcaagcccataatgagtccctgtcatgtactagtgggaaaccacgttgacggtcttgcccaaatatccatggcgcctttttctcagcgacaggattctccttagagccattatctagtatctgaaatctgtccacttacagatcttcacctgttttcgctattaaagacaatgcaaaaacaaaagctaaaaattagaacgtgtatgtgtttaattccttgtgtgctgacatggctctatatcataagattgtgtttactttcatttggggcatatatttcaaacgcagcggccatcttgttactgcatggggagtgtcggatgcgcaggtcataaatcatagcactgcgcacggcacactcagacgaaaggaggtgaaacgcagccccttggctaattncaaatgtaggacaggtgattaatttttaaaaaaggtgggaagggggcagggtccttttttaaatgtcccagcagaaaacccaagggtggaaataacttccttaggagtaaatgatgtttactttaagctgctgctccgtaattcacccacgctgacgttggtagattacatccacgaataagtcatgtaataataggacagccatgaaaaatgtagagatgtgtcaacagggtggaaactggttccttggtgaagaacaagccatgcagaaagctggatttctaacattctcaaatctctttttatccaaacaatctaattaatggggattgtattcnatgttataacntcacttcaaaaattcctaggcttatgatgttaaactaaattcaacatgtttgctcttagttgatctactncttggggggaatccctgcctgttttcctcgtgccgctcgtgccgaatt

SEQ ID NO: 266211 - DNA, 601 bp, Homo Sapiens
  misc_feature (303)..(303): n is a, c, g, or t
ctgagacatgagactacaaaaagaggttgggatctggaaggctgtccacaaaatcagtcttggatctctgtaaccacacccttctggaatgggacagataatgctgctcttctgtcaataggctgcctctcttcccacaactctgaatacttggctagtctcctgaacagtcttaaccaatgaatactctgaaagtaatgtgtgacttccaaatctaggccctgagaagccctgcaggttccaccctcaccctcttggaatcctgaggccgtcacttgatgcagcctggggtagctcccttgnagaatgaaagatcttgcggacaaggaggcctagccaacagctggcaccaatactagccatgaggtcacttgagaccatccagttccaatcaagccactagacgactgaagcctcatgaatagtcctaagtgagattagaagaaaaatcaccccagctcagcccaggccaggctgagcaaacaaaatggttcttttgttaaaccactaagttttgaggtggtctcttatgcagcaataagtaactaatacagatcatatattactggggagggttttaaaagataaaatggaaaggttt

SEQ ID NO: 266212 - DNA, 712 bp, Homo Sapiens
  misc_feature (400)..(400): n is a, c, g, or t
gaaggatacaaatcatttctgtcatagtcatggaaaagaaaagaccactgagatgaaaggagactaagaagacatgacagcaaaatgcaacatacgggcctagactggatcctgcactacatacagcacaccagcagaacaactggcaaaatgtgaatgaggtctgtagattaggtaataatattaatgtgctgatttttgctgattgtagtgttacacatttggaatacgtgggtgaagaaaatacaggaattatctttactatttttccagctattttgtaagtgaaattatttcaagttgaaaagacataaaagctaacagacaattaaaatacattaacataataggaagtgtggggaaaaagagatcagattgttcctgtgtctacgtagaaaanggaagacataagaaactccattttgatctgtactaagaaaaattgttctgctttgagatgctgttaatctgtaaatttagccccaactctgtgcccccagaaacatgtgctatattgaatcaaggtttaatggatttagggctgtgcaggatgtgccttgttaacaatatgtttgcaggcagtatgcttggtaaaagccatcgccattctccattctcgattaaccagagacacaatgccactgcggaaggccgcagggacccctgcccagaaaagcctgggtagttgtccctcgtgccgaattaactgggg

SEQ ID NO: 266213 - DNA, 930 bp, Homo Sapiens
  misc_feature (496)..(496): n is a, c, g, or t
gagctatctccactgcccctgcctcttcagaacccgcatcgtggttttccggggtcactccagcagcttcccacaggtctcccggtgtctgcacttgctccctgcagtctgttgtaacacaaaggcagaaaaatcttattaaaagacaagccaagtcaagccatgtctctcctcttgtcacagaggagtgacaagccatgtcactcctctgctcaaaacccctcattcactccctgctcttctcagaataaaagcctacgtccttcaatggcagctaaggtcttccatgacctgctctcatttcctccttggtctcatttcctattactttcacctgtggactcatctctagctgcatttgtctcccttgtgtcctcaaacacataggcatgtccccagcctcagtagcctctaactgcctggaaagatcttcctccaggtatctgaggcactgtctccttcacctctttcaagcttttgctcaggtatcttctcnaatgagctgatgacctctacctaaaacttcgttagtgccctgcaaacctccctcctcacagcactcttgatgcccttacccggcttcacttgtgctctttctccacaccattctcctttgtatataccttgtaattgacacatttgttgtgtttattgtctttttctcccttactagaatgggagttccacaagggcagggagctgtctgttgttcactgatgaaagcaaagtgccttgaatagtggctacttcaagaaatatttattgaatgaaaatttaaaaacagcctagaagtgtttccactatttctcatatgagaatgccaatgtcatgaggaccagttccatgagtattttgttaattactttatatccaatgcccagcaaagtatctgccattagtaggcacttaataaatgtttgtgaaatgaaa

SEQ ID NO: 266214 - DNA, 754 bp, Homo Sapiens
aaacaatgcaagtaagtaagggagatttgataagcatatcttttaaaagtattttcacacaatttgctttataaagtgtgcttcagtagttttaaacttttaaatactcagagagactgggacttgtgagctttggctgcacttcaaggctctagacgtgatttgagtagaggcacagtctgtatcccatctctaacttcagtaccgtcctctagactatttttcttgaataccttgggtaactggatatgagttcttcatcatatgttcccaaggtcatccatatgttttaaacattttccaaggtgttagagactgtgatgatgtcgctaagtcctgcaagaagacaaaaggactgagtagaattaaattagactctatacattccagtgcctagccagtttgttagaaaagatgatggacttggggaattcatagcttctggccttaaggcttccaccttttcattgcttgctgacctttttcaaaacgaactgactcagttcagcagaccaccagtaccagactcagaattgtgatagaggagcattttgaacagtgccgtattgtgacatgctgtattggctactccagaaagtaggagtaaagatggaaaggagaaagaagcaacctctgagattccagtggtgtgtgggggcaagatctgatggaaactgaaaaagagaacgaagactaaacaaagagaaagggaaagagaagaaaccctaaatgggcaaaggaaagcacatccctg

SEQ ID NO: 266215 - DNA, 727 bp, Homo Sapiens
  misc_feature (679)..(679): n is a, c, g, or t
agggaagcagcttgaagggctttctgccagtcatggaaagtcaaagggcctcccccagcccaggggccctgcatctacattcaaccacgtggggcacctggatgaatactagctcccatctgctgatccacctgcctgcgcccttggagcaggaaataagggcctgagctgaggacaggtggggccacctgaagtcggggagaacgctgccctggacagaagaagtggagagagaacccactgggatttaggtaccacagagaaaagcagtcaggagctgcgggccagacatgaggccaggcttaagaacctgggaaggttcttccacctccccatgtttccgtcagtttcccagccctgccttgccacggggcctccttcaggctggcagcaaaactcttgagaggaaaagggctatgtactcgtttgatgttgtaaagacaggaaagccgggagaaactcttttccattctcccaacaaacccttcagggagcccaaggttgaaggtgggtgagatagatttaaaagcaaagacagacacaatcttcagagtggggaggaagagaagatgggtcctactttgggtcttatttggacatgtattatgtcagatggccatttctagacgacacagctccagccacagctagggctgagctttgctagaggtggccacangttgggggggcggggcacagcaggtcacctgaccccagggaagccgct

SEQ ID NO: 266216 - DNA, 196 bp, Homo Sapiens
gaattgttatttaaagttaaaactcactatctgtcgagttcctaattctttttccaccttacaactattctccaaaacaatgcatttgtagtcacccagaattgcttgaatttctgggttataaaatgtgtgaatactccccatcccaatttcttgaatttaagaatgccacttctggccaagcgcggtggctcat

SEQ ID NO: 266217 - DNA, 561 bp, Homo Sapiens
ggcacgagatcaatgattccataattgtaaagcgggctgttcttatcactgattaaattttaatcctatatataacacaggtgttttctgtgccaatctggtgttatttattagttcttacatattataggccccaaatttatttttttcaatttactgataaatgtaattcagtatatttggatgtgtttatccaagttactaggtaccattatgtagtttacaaaaatgccttaaatgttatttttctaaaatttgttttgaaataattctagattcacaagagattacaaaatatacaaaagtttcctgagtattctttgcttagcatcatcaatgttatcttacataaccataataataaaaaccacggagttctgctcttgttgcccgggttgggagtgtaatgggcgcgatcttgggctcactgcaaccccgcctcccgggctcaaggaggattttcctgccttcagcctcctaagtaggctggggattacagggcacccacggaccacggttcgacttaatttttttgtatttttaagtaggagaccgggggtt

SEQ ID NO: 266218 - DNA, 148 bp, Homo Sapiens
caccccaggccggcttccgtttatctgtaattcccacatgtacaatgtagtgaggaaaacaaataattagttatgctgtaaggctcaatgagatgagttttagtgatagaaggaccaaagaggaaaaaacagcagtgtgaaaagatcc

SEQ ID NO: 266219 - DNA, 452 bp, Homo Sapiens
  misc_feature (130)..(130): n is a, c, g, or t
  misc_feature (421)..(421): n is a, c, g, or t
  misc_feature (441)..(441): n is a, c, g, or t
aaaccctagaaaaggcgtaattcctaccaaagctcccgtggtcccctttgaagggtgccctatcccaagaaatccacactctgtgtagccactgaccttgccctgtttcccctacaccacacctctcccnaagtccccgtactcccaaggttagtgcccaggaatagaaacccaaatcttacagctcttatcactataccacaaaatctttgtgatttcagctcaatactggaaaagggggtcagaatattctttgcgttcccagaacacaggtctttgcagtagatgggttcagtcttggtatcagactattcaagatgaaaaatcttgttccaggatgacaaggctaaacacagtgtggcagcctttctactaagtgtgctcaatgctcataaagacaacatgataactaaaaatagtnatttaataaaaacagttgtngtatatttaca

SEQ ID NO: 266220 - DNA, 612 bp, Homo Sapiens
cacctcgtatctttagtaactttattgtggtagctgacttgttgaacctccctgtttctgcggacagagtgcagtgtggctttcagggatgtgtgtgtacaaaggctagcatgcttttatgagttctgcaaatactgtttgattgaaggaattggtgtggaccttgtctggcagccctgaaaaagttttttgtaaggaaggctgatgatgttttagggccgctgagagggaatataacattttcttttggtgagaaatgagaaagcagaaggaataaattgctgtccagctttggattaatcatgttttctaagtaacctgaacttttcaaaacctccttttatttactgtctttaaataaacccccttttgtttacctatcttgaaaaacctttataagctttagagatgatgcctatgcctgaagattccccaaacattttatcccacagtcttcaagaatagtttgaatcttaactcttgcctcattgtaacttcttgtctttctttgaggctttcactgtgcccctggtgacacagtctcattgaacttttcaaaacttccttttatttactatcttaaaagaaaatagtagccaggcatgtgtgtga

SEQ ID NO: 266221 - DNA, 246 bp, Homo Sapiens
gataaagttagcctataatttcagtaaatctaagaatatgactaatggaagttgccagacctaaactttgaaaattattgttccactgaagagcgtcttatgactgagtgttccagtctccttctcaagctgaaccttgcttttcaaaccagattaagaacactatcataagttatactgcattttatttccctacccatgtccactgcatcattctctatagtacaaagagcttgtctcgccagg

SEQ ID NO: 266222 - DNA, 503 bp, Homo Sapiens
  misc_feature (20)..(20): n is a, c, g, or t
  misc_feature (161)..(274): n is a, c, g, or t
attggccctcgcggccaganttcggcacgagcggcacgaggtcactgatgcaaatggaataattgattcataacattctttcttattaagttgggctatgacttcagaattatttttttaaaatgtgctcaaagaggaaatagcctaagaaaattttattnnnnnnnnnnnnnnnnnnnnnnnnnnnnnnnnnnnnnnnnnnnnnnnnnnnnnnnnnnnnnnnnnnnnnnnnnnnnnnnnnnnnnnnnnnnnnnnnnnnnnnnnnnnnnnnnnnaaccatatgtttactttttattgaatttattaatattgcaaagttcttgcactgccaaaccatgcctaagaattcaaagaaagaaatggtacagtagacggcctcattcacccatcatacagtatcttaaaacttgattcatgtacattttgatattttcatagtcttttaagaagttataacgagttggaatttaaatctgctgcaggggctgagcacagtggctcat

SEQ ID NO: 266223 - DNA, 431 bp, Homo Sapiens
  misc_feature (268)..(280): n is a, c, g, or t
caggttgaaagcacatcaaccatgccacggcaacaaaaagacaattgaaaaatactggtgaattcattccagatctcaatcaccattcacaattgtgaaccatcactctgacattgggagaaactgaataagataaagcacatggcttgttttataaattgatatgctacattagctttaaaatattttattacatggcttacctcacagtaaataaggattgcctccaatcaacttgtttataagttggttggtagccacagtttcnnnnnnnnnnnnnatatagaaacaacactaagcagagactttagagatcgagcaggctacactatcactgaaacacagcactctaataccacagaacctacccaccacacagaagaggaccactttggaaagttatagagataagacacttcactccctcgaaa

SEQ ID NO: 266224 - DNA, 427 bp, Homo Sapiens
  misc_feature (47)..(47): n is a, c, g, or t
  misc_feature (91)..(91): n is a, c, g, or t
gtagtgtggaggggccagggtgtcctggggggctctgatgcttgtgncaggggtgtcaattgagaagcagtctgtaaggcctggatttaancttgatccccaagtaatggagagccaaaggaatgacattccctgctagaaacatcattccatccacagtcgtggaaggtggccggtggcagggaacactgttaggaggaactccctgagccgtgaaggccagtggtgggcaggacggggtgggaggagtgtgcaaacctgctggactctggcttggctgtttgcgggcactcatgccatgccctgaagccaggggactttgctgcaaatccaggttctctctgcctgggattccctggccttcctggtgtggttttgcttttgttcttagaattgtcactttgtggccgggtgcagtggctcacac

SEQ ID NO: 266225 - DNA, 675 bp, Homo Sapiens
  misc_feature (170)..(170): n is a, c, g, or t
agaaaaacttacagaagtgtaattgctgtctagggggataattttgatagctgtagctcagctgttctacagcccactgcccttgccatctccagcagctcccgtgggaagtggccttccccaaaccctcagcagtgcaactcaggtgtttggatctctgtcagtttcancagcagaaaaatagaatctccttgttttaatttgcgtttcccttatgagaagggtttagcgttatttccagtacctaagctattggaatttcctttcctgtgagctgtatgtttataagcctttgcctgttttcctaatggctgttggtttttcttactgatttaaggacttctttagatattgaaggagggtatcctttatatgtgatatgagttattaacagtccagtacatacattttaacattaagttcagtacacttaatgaagaatcacagaatttgttttttcttgcactgaacacctacagtgtgtagcactgataaatgcttcatcccccccaagagtagccactgtgtaaggctgcacttgttatgtactgcagaagccaggggtgccatcagtagacctcattgtgagcaggcccgtgtcccaaattgcatgggagccccttgtccactaattaaagattgacaagtgaaaggcagcttgcttacccgatgtag

SEQ ID NO: 266226 - DNA, 927 bp, Homo Sapiens
  misc_feature (44)..(109): n is a, c, g, or t
  misc_feature (370)..(535): n is a, c, g, or t
  misc_feature (570)..(570): n is a, c, g, or t
ggcaaaaacgaatcagtaaaattatagaagatccaaacattatnnnnnnnnnnnnnnnnnnnnnnnnnnnnnnnnnnnnnnnnnnnnnnnnnnnnnnnnnnnnnnnnnntgcatatagaacattgaccaaatagaccatgtgccagtccataagtctctaagacagtaagtctcagtacatttcaaaagactgaaatatcagagatcatattctgatcacaatagaattaaagtagaagtcaataccaataaaattatctagaaaatttccctgatggctcagaaaatcaataacagcttttaaataatacatgtgtcaaagaagaaattacaagggaaataagaaaatatttttaactgaatgatttannnnnnnnnnnnnnnnnnnnnnnnnnnnnnnnnnnnnnnnnnnnnnnnnnnnnnnnnnnnnnnnnnnnnnnnnnnnnnnnnnnnnnnnnnnnnnnnnnnnnnnnnnnnnnnnnnnnnnnnnnnnnnnnnnnnnnnnnnnnnnnnnnnnnnnnnnnnnnnnnnnnnntttgtgatgaatgaaaattaaaacacacacattcnaaatatttgttgaatgtagccaaatgtttgtagccaaatgaaggtagtgttcagagggaaatgtatagcttttcaagtgcccatatagtaaaggaaggcttaaaatcaattatctaagtttctaccttaagaggctaggaaaagaacaaactaaattaatactaagtagaagaaaaacataataaagataagagcagaaaccaatacattttttaaaacaagtaaataatagagaaaattagcaaagccaaaagcttgttctttggaaagagtaataaaattgataaacttctagtaagaataattaaaaagagaaaaaacacaagtaagtaagatcagaaatgaaaataggcattt

SEQ ID NO: 266227 - DNA, 640 bp, Homo Sapiens
  misc_feature (39)..(39): n is a, c, g, or t
  misc_feature (46)..(46): n is a, c, g, or t
  misc_feature (188)..(317): n is a, c, g, or t
  misc_feature (466)..(478): n is a, c, g, or t
gaaaagagaaataacctgaggtcttagttccttgcaacncaggggncaaaactattatataccataatccacttttaaaaactaaaaacttctgcagatataaaagcatgttttccccttttttgcctgaatcatttctaaactaaaaaatcatttgggaattgtctttaaaagcaagaaagttggtnnnnnnnnnnnnnnnnnnnnnnnnnnnnnnnnnnnnnnnnnnnnnnnnnnnnnnnnnnnnnnnnnnnnnnnnnnnnnnnnnnnnnnnnnnnnnnnnnnnnnnnnnnnnnnnnnnnnnnnnnnnnnnnnnnggcaagacccttgctgagggacccaacaaacaaacaaaaacaggacataaatcgttttttaaaaatagcaagaaagttggtagtttttcttataattatctcacatctggctgactctaattctccaacaggtcaatggagcaaaaggnnnnnnnnnnnnnctcctttcaggagggagggggttagttgtctctttcctgtatataaatcaagaacagaagaaaacctatttctccgttcttcatctatgatacagactctgaagcttgtatggatagggcatttgacctgggtttcagaaagtagaccctgcggtaagcatc

SEQ ID NO: 266228 - DNA, 780 bp, Homo Sapiens
  misc_feature (403)..(677): n is a, c, g, or t
cacacaacttagcaattatgctatgtaatcaatcacatattgtaacagtccaatatttcttagtctattcatacttactagaatattcctcaagctttattttgataattcaaaatttcctgacttattctgaatttctacatctatgaaagacatacccatgtgggtgcttaccattcatgtttaaatatttaacttggatggataagataattaatacttaatatttggctatggattaacttactctgacaattaaatgatttataaaaggttcttttaacaacatatcatttgtcataggcttggaaatcctttcactcaaacttaaccctttttttactccaattaacagtggaaaagattgtaaacatctattcaaacaactcgttcttatccttcnnnnnnnnnnnnnnnnnnnnnnnnnnnnnnnnnnnnnnnnnnnnnnnnnnnnnnnnnnnnnnnnnnnnnnnnnnnnnnnnnnnnnnnnnnnnnnnnnnnnnnnnnnnnnnnnnnnnnnnnnnnnnnnnnnnnnnnnnnnnnnnnnnnnnnnnnnnnnnnnnnnnnnnnnnnnnnnnnnnnnnnnnnnnnnnnnnnnnnnnnnnnnnnnnnnnnnnnnnnnnnnnnnnnnnnnnnnnnnnnnnnnnnnnnnnnnnnnnnnnnnnnnnnnnnnnnnncaaacaaaaaatctcagttcacacatgaccacttctacctctactttaaggaatttttttcctccccaggtagattttggattttaattatctaagtaatata

SEQ ID NO: 266229 - DNA, 233 bp, Homo Sapiens
  misc_feature (157)..(157): n is a, c, g, or t
  misc_feature (170)..(170): n is a, c, g, or t
  misc_feature (195)..(195): n is a, c, g, or t
  misc_feature (204)..(204): n is a, c, g, or t
  misc_feature (221)..(221): n is a, c, g, or t
ctgccaataacaaagttttgatgagcgtttttctctctctccttctagtgaatccagttctggaggttcagggtcataatgttgggatcctgcccagctctctccataatcctctgtgtgtattattgggaaatgcctctttttaattaagggggcncaaggttattccnttagtgaggggttaattttaggttnggaattggncttcggttttaaaagtngtgaattgggga

SEQ ID NO: 266230 - DNA, 883 bp, Homo Sapiens
  misc_feature (92)..(113): n is a, c, g, or t
  misc_feature (136)..(187): n is a, c, g, or t
  misc_feature (327)..(450): n is a, c, g, or t
cataaacagcctagaaagatagaaatctcaataatgagaagtttctgtaatgtgtggctcctgcccaccttctctctgcttatttgctgtcnnnnnnnnnnnnnnnnnnnnnnagagatagggccttctctgtcannnnnnnnnnnnnnnnnnnnnnnnnnnnnnnnnnnnnnnnnnnnnnnnnnnntggagtcaagcaatgcttctacctccacctcccgagtagctgtgactacaggcaggtgccaccacagaaggacagaccatctaaggaaaacttaaaaagacagcacaaggacaggctggacagccaccagacctggctannnnnnnnnnnnnnnnnnnnnnnnnnnnnnnnnnnnnnnnnnnnnnnnnnnnnnnnnnnnnnnnnnnnnnnnnnnnnnnnnnnnnnnnnnnnnnnnnnnnnnnnnnnnnnnnnnnnnnnnnnnnatgagccatcaccccaggcctatttgctgtcttgattctcttttctgctccctccagccccacagatggcccaagaccccaaatgggcagtcaagcttccccactaagttgagtttctttactggacaactcaagatgtcttggtgagatcctgtcttgaaacaatgccaggaaagtacatgaggtctccttcctcctaaaaacaccccctagaaggaggccctgggaggggcaagcctggcggttcaaactggtgattcaaccacccacataagaccctctaagcctaatggctgggtgaggggctcagagaatttctccaatcttggccagaaaggcttccttaccactttcacatttctctcgtgtccttcagaaggggcctgcatccaaaagtggccatggaaagcttcacagaattagcttttattgt

SEQ ID NO: 266231 - DNA, 412 bp, Homo Sapiens
ttaccaatcacctatagtatacctattacctgattcggggtaagaatcaggtgaatacctaaaacaacctatggtgaaagactgtcggggaaaaagggattgtcacagtgtcaaaatatcattcccacagattgccttattaattacaaaaagaacaaagtacctttacaactgggaaatctggaagcactgccttaaccaagtgatcaaacttactaccaccaatgataagcacaaattcacaccatgtgccttctaatgcaatatactaatatgcattcgaatgcatattctaatgcaataatccatgtactatgcttgacaaacacggttaacctgaatttaatcatgaggaaacaatcaaacaaatccaaactaaggtggcataaaacaactagcctggattcttaaa

SEQ ID NO: 266232 - DNA, 696 bp, Homo Sapiens
  misc_feature (325)..(325): n is a, c, g, or t
acaggagggacgtttatgggtcacatctgcgaaacattttttcccaaaaagctgaatttttaggcttgcgtgtaatttactagaactgcactgcaggaatcagatgttctgaagctgtgaatgcttactcatgtaggttcctgcctaaccaaaataagtaccagtatgttatatttgtcaccaaaatctaggcagggaagacaaattcagaacactgagagttgccaaatctttaacttttagcttgaagacccataaagctgtgcccaactttccatctcatcatctcactaaaacagagtccactggaaataaagaggcaaanccacaggttccccaattgacactagaactagttaaaagatttagggaactgtctaccctttgaacacaaattaaagagtaacaaagactactaacttagggatagagtaactactgattaacagcaaaataccaaagttaagtcaaagacaaatggctacatattttaatattttagttttgaaatttttttaaacaggtgtacagatccccatatacatcctagcacacaaaattcattttaacctttctattccttgaaaagtccactctaagtaaatacaagttactcaaaaaggcactacacacagcaatgacctaacacagcctgtcctttccgactaaaaaaagttttaactaattgcataagca

SEQ ID NO: 266233 - DNA, 175 bp, Homo Sapiens
atgagccaccgcgcccggcctgattcttaaaatacccatttacacagcactaatttgagaatcataaaggggctgtccgaaataggattggggctgtctgaaataggattggggttcacgagatcaagccattgcattccagtctggacaacaagagcaaaaactctgtccaaac

SEQ ID NO: 266234 - DNA, 402 bp, Homo Sapiens
  misc_feature (251)..(331): n is a, c, g, or t
ctactttgaggtttctctgccaacgataccaacacagtatttagggtgtctcttgggtcctgaaggagcaatctgcttccttcagagggtctgtggattctcttggctttcctggtatattcctgcagtagttctggagccaaagttcatgatgcgagtctctgtgagctgctgtctgtccgggtgagggctgcaatctagtcctgcctcctgtctatcattttccccccaaatctccaagaagaaactannnnnnnnnnnnnnnnnnnnnnnnnnnnnnnnnnnnnnnnnnnnnnnnnnnnnnnnnnnnnnnnnnnnnnnnnnnnnnnnnatgtaagtacatatattgaagaagagaaagatattaaatcaataacctatctgtacatgttaaggtactag

SEQ ID NO: 266235 - DNA, 588 bp, Homo Sapiens
  misc_feature (208)..(208): n is a, c, g, or t
  misc_feature (216)..(216): n is a, c, g, or t
  misc_feature (227)..(227): n is a, c, g, or t
tggaaagggaagttttatttcagatattttaggtccttattaccaagagcttcaagaagcaggctttgaaaaactcaaaaatccaaatatgagtcttattaaacatttgttataaaagctgaacccttaataaaagggttaatttcccaaaggtatattcctaggtggaatataaaatatcccaaaccccaaatctccaacttactgnaccagtgnagaagtgctgnaaccctgggtgtgtaatgtatttgtgcagactctctgggtgtgtgcctcctgagaattcactcctggagctcactcactgaagtcaaaagcaggtctgccctagatgatgtcacatgggtttgtttctcggatttagtgctcattttaatcccaagactggccacaaagcttaacgcttaactgcaggttctttatcctcactgacatttattttttattgaacaaaactaccctgctttagaaaatgtgtcccccatcattctacgaatgaatcaggcttcccaaatatttcactaaattaaaataggtgaaacctataaatagctaaggaaaatgtagagcagaatattactggcaaca

SEQ ID NO: 266236 - DNA, 766 bp, Homo Sapiens
caaaaatatagaaaacatgagaatgagaacggttgtgtcacatattggtctatttttgaaagggagaagagtaaaagaaggagaaagagaaaaggttatcttaagccagtcaggctgggttagttatagttgagtccagaagaagggagagcatgcattatttccacaggttaggtagatgtctgggattaaaattattttaatctcaagtgttaataaaaaacccaaatttcaaaatacatatgggaataccctacacaaacatcagccccatgggtttcccttggcaaatgacaaatatccaaggggcataagcagccatgatttaattagaaactttaaaagatgctggggcgggtcaggggtgcagaagaacatgcttcaccctctgctgccataacaaagaggcaagaaacaggctgatgaagatgtcagcagactgctatacttgttggggtgtgtctaatatagaaggacaaaaatagccctgattgcttgaaggatttaatgcatttctccaaagaaagctttttgcaaagcaacccccttctcacgagagtgattaggtaaatatagagcttcaaaaagattgaaagataaaactggatgatgcttgtctctctttctctgctctacttttgaagcggtattttgacaatttaaattcgaataataagaggcctttttaacagaattgaaaggaggaatttaggaaaatgatatttagtatgatgaattctacttctcactgcagatttattggttt

SEQ ID NO: 266237 - DNA, 380 bp, Homo Sapiens
aaaaagacagtgtcatttgatggagttgctttcttgatcgttggctgcaaagaaaagacctagcctcaactgtcttttgtgttgccttggaccggctcttaggttcctaatgccctaacaggcagtggaggctggcctcgaagtggtagtcatccatcttgccctcttttcctaccctctacccccaacccccgagctgctctcctgtctccttccaacactgttctctttgggaatatgcatgtccaacttcccaagcagtctgggatctggagtaagatgactcttggtttaatggagtttttccacagtgcttgcatgtgccccaagggtttggaaggttggagaactaacaaaaagcaaagcgccatcctgtgtcg

SEQ ID NO: 266238 - DNA, 537 bp, Homo Sapiens
ctaggtaggaggctgtttgagccggcagaagactgtgggagcagatttgggatgtgtttggggagtcgggtcgacaggacttgtttatggattggatgtggagagtgacgaggagaggagagttaacttcatgtctgtctggagccacgtacctgtttttttatggtgtctcaacaccccatgcacttgccacctacttgagaaaactactagaccttaaaagtgagagttttaaacaaatgaatgtttgttttgttttacatttaccgtgggaaattttaaatatatacagaaatagagtatcatagcaagcctgcattcatctgtcacccagctccaaaaattataaactcatagctaatcttgtttcacttttactcccacttctttccctccccactccactggatcattttgaagcaaattccaaatgtcacgtcgtttcattagcttctatttctaaataaggtgtctcttaaacataaccagaatacccccttttgaaaaggaaggctgggtgaggtgactcattcctct

SEQ ID NO: 266239 - DNA, 407 bp, Homo Sapiens
cgaactcctgaccttgtgatccacccgccttggctcccaaagtgttgggattacaggcgttgagccatggcgcctggcccacagctttttctagttgtgtttaggtgcttaggctcaggatatggggtttagtaaataagccttccatatgcatattgtcagacccaaatcagtccacagctatcttactggaagtggggtcacaaggcaatttctagaaagcaagttctgataaaggtaaattgattcactggaagatcttaagatatataaaatatctccaataccatgtgtttaattttagtgaataagaataatatagtttctttttaaagctagcacaaatcaagtaataaaacccagcaaagcacacacaaaaatataggctagccaggtgtggtgcacat

SEQ ID NO: 266240 - DNA, 779 bp, Homo Sapiens
  misc_feature (142)..(157): n is a, c, g, or t
  misc_feature (190)..(190): n is a, c, g, or t
  misc_feature (196)..(196): n is a, c, g, or t
  misc_feature (229)..(229): n is a, c, g, or t
  misc_feature (245)..(245): n is a, c, g, or t
  misc_feature (454)..(470): n is a, c, g, or t
tttccattgatggggctgcagattttgagagatgggagctgaagggatgcttgatggcagaataatggagtggtgaaacttcagctgtgcctcatttcaactctctccctttcacagaatgcagagttaggtattttcactnnnnnnnnnnnnnnnntacttagtccacagtctgtaaatccaggagggnggttgngacaacttgcttcaccccagacccatctcacgnggtttaggtatgaaangttggggtttctcattctctagggcctccccttgccctctctctctcccaaaaccccctccaggctaggaaccctcacagtcccagcaacaggactgggagaacagatgtgtataacacaaacaacaagagcagcttctcagaacggattattgaaagtcctaccccaccatcgaaagaaaggatcccaagtccaagaacagcaatttnnnnnnnnnnnnnnnnngtagaaaaatgtcttcttttcttcagagcaacacatgctagcactttccagactctgggcatgtgtccagcatttcctaaagtaaactcctattttcctttagatgaaagagatttaaaaaatagactcagaatttagcccagtgaaaattgctttggctattcacatgcaataagctgtagaagcaagcagaaaaaaatcaattgcttctgatttatttattcattcatttgtccatctcctttccctctaatgtaaaaaaggatgtcttctataattttgcaagtcatttatcttttcaaagaaaga

SEQ ID NO: 266241 - DNA, 383 bp, Homo Sapiens
ctggcgaaaacccaatcccttctgatgaaacattgcttcttgggaagacaagctgaggaaagcaatgaagatcccagtgtcggcctttattgagctatgtatgagggtcagggtccctcaactcctagtgactatgaagcagcagtgtgatggcttcgccctctttgcccctctgtcatcaatcctttgcatgtggctattttaagcttctcagctttcttttgggaggcttcatgtgtaacttattatagaaatgttactgaaaagctgcctaaacaaaaaattgtataaagtaggaatttgtataaagtaatactgttgtaaatccatcttcaagatgtaaagaatcaatttgtaaagtgtatattttcacttctcccttc

SEQ ID NO: 266242 - DNA, 694 bp, Homo Sapiens
aatgcgagttatgtgtaaaccaagggttatttatgtatgtcaaatgtttatttctataaggcatactttttgaaacaatctaagtgactttgcctatactgtgcacaagtcttagcattttaactagatttttaagccacagtgatcacgaaccaattaacctgttgacattttattacacccatttcagaagggttgttacagaattttagaatgccaagataggtctacatcttcaacttataactactttaaagaataaggcatcagtttcttcatttttctcaacatgggtcctgtgtgtgcacgtgagatggccaattctgccagttggggaaagtggccctgataattaccagggtgtttaaccatgtctgctctatagttaattaggtatcaggagtactgccctgtcttctctccccgcaaaaggaaaagcttaccaccacataatctggaatgccacctacccgcaaagggaaatggggaagtcagtgctgtctccagttgagaactcagttaacccaatacagaacttcttcctactgtgtgagttttcacatacaaataagacaaagtgcactcaaccatggaacataactttgattgtcatcatttgtaactaaaactactgagtgcagtaacaggaatagtctgaatggtttatctattagatggtttagtgttcacttca

SEQ ID NO: 266243 - DNA, 734 bp, Homo Sapiens
  misc_feature (334)..(334): n is a, c, g, or t
  misc_feature (347)..(347): n is a, c, g, or t
agctgaggattggttaaattcattacttttgactaagttgcaaactatgcaaccagcgaaacagtgctactaaattaatgcctctaaagagatgctggggcctctaataagcatccaataactccctgaatggcagtgagttcataatggcccttccccctggcctctcggcccggaataaacaggctgcaggtcttacggagggagccccaacgggagacagacactgaaacaggaagcccttggcacgggcctggctctgcccagaagtaatcactttcactcactggacctccgtttcctcacatagaagatcagaggggtttaaaaaaanggccaaactcccncaaggttccccccaagtgccgtttttaaaacagtaaaaaccctgccttgccttaacacaccccagcacaatcatttgagatgttttccatggggcattcaaacgttttgtactttaagaaaaatttttaatggagggtttgggctggaaggagtaaacaaagtttattcttttccttctctgtgtccagttcccaaagaagataaaaatgctaattccagctcaaagttgaaagcatatctgtgcagttcaagatacttaactatgtttcagttgaaatggacttccttaaagatacacttgagataaagttatcaccaacagatgttgaggtgatcttatcttaaccaactcaaacaatcagctcattcttaaaacagagttaatg

SEQ ID NO: 266244 - DNA, 801 bp, Homo Sapiens
ggtccctgtatcctatcccagcacggttcccggcaccacgagcagttcagtaaaccttggttggctgaattaagtgtcgctgttgagtcactgcagaatataatgcaatagttactgatttgctttttatataacaaaatcaaaaattgaggaggcaaagaacagaagtaaaatccagaagactcagctgcttgaggcatgttcccaccctggacttgccaactttcactgtgaaactgcaacatattaagtattcgtcagctacggacttcgtgcccatgggaatttaatctgctacttcctcccaggcccaacaccttgagggccagaggcaacagaaagaggattgagtgaagcagggaagccttgcaaagccctggggattccaatccagctctagctgcgaggcgctgggcacgggtcacctgctctgcggctctgcttgcttgtctgcaaggtgagtcaatgcggctgcctcgaacgctctttgatttttatttacctgaaacaaaaaaacttgtgaagccagcaatacaggcttaggcagtcaccctaagagctggctaggattaggcagcaaacaatcttttggctacaatgtctagcaggtacgaatacattaaaccaaacatgtaaaatagcgtaatttgtgctggatgcatggctaagtctgcatgggtcagtgtgtgggcacaagactaaatcaaggcaaggagccaccccaatagctcacggagctggttaagcacctgtgtcatcattatggtaaaacagaatcagaaaaagtgtatatgtgtgggg

SEQ ID NO: 266245 - DNA, 366 bp, Homo Sapiens
  misc_feature (12)..(12): n is a, c, g, or t
attgccgctttnaaaacaatcccaccagattgcagattcctaaggagccattttgtaagtaattactaatgtttattttagagagatcacacaacttcaaataaaaactgacatagattgaacaccttgagaataaactttagtgccaaatggaaaataattttttacaagtaaatttgaagaacaatgtgaactttctataattatatacagaaaatatactgatttgccaaaatgagtaattttgatatattaatatttcacttataagaatgcataccacctgatccaggatgggatccaggaacagaaaaagaaaattagttaaaaatgacagaaatctgaatatagtatagagtagctaaa

SEQ ID NO: 266246 - DNA, 877 bp, Homo Sapiens
ccccttgaagtagaagagatgggctttatggttgttatttcatgatgttgttaaaagaggcttttgttttaagtttgtcagctatttcccgtgtagtcgaggtagtcaaaagtctgctgatagccaaaatgtaatcctaacatgaatacagttactattgctcaacacctactgtttaataggcagaattaacaggagtggtccttgggcttagctcctcatctgacacgcccttgtttcttttgctctgcctttgaagctacttgtatgtgcttcactaccaacacccctggcaggctgatgtgcacacacttgtgtcgaaagctgtaaagcctgcaggtgccaaggagcacagtgtcccatcttaccttgtactgtacagaaatgaggggcattatcttcccccgtgttctgtcacactgttacctgactacaaaaatagttctgtttatgtttccaacggcctcagagtcccttgagaaaactggtctttcaacttttccttgtaaaccctctttctacagataaagtccttcagaagtctgcaaggtcatattagggaccagtttctccaacttacactttgctcctcctcgctttccccaagacacagttttctgttcttcaccagaaacccttacacaaattaacttatacatcccagagttaggctcaagttattgatgcacttgctcaatgtgtacacatacacagatatacacatatttatcttaaccacttgtatgcatatgtgtttgtgtctatttctttaaacaaggtagggttatgtagtgatgactagaatatgagaaaaatatgtgtaatgaaaaaacattctaatatgtaatgctgtcaaaagcttacagataattccatc

SEQ ID NO: 266247 - DNA, 833 bp, Homo Sapiens
  misc_feature (297)..(306): n is a, c, g, or t
aattcggcacgagcggcacgaggataaacaaaaggaagaaaataacaatcacatgtaacctaccaattgttgttattttgagagagatatttcttcagacttttctgatgcacatatgtgatataatatttttacaagaatgggactgtaccgcaatactgttttacattttttcactccgtacactcatatgtctgtatcatcttcttaatggctccatagtagtccatagtatagatgtctgccccatagtttatttaacaagtttctattgttggacattttgtttgtttccannnnnnnnnnattgttctgaagttgtggtctccaaagtgaggtagacagggatgattctttgggaatataagaagaccgtatttgaatttctgttgatctttgtttttatcttaaggcagtgagagaggaattaaactttctcatctttgatattccgacttatgccagcaccctcactgtgccccattagcagagccttatgtgttacgtacatagggcacccaacgttccccaagggaaaaatgggatttcccacagcactcacaggctgatggtggcctcgtcacttggcatcatcccatgttctttcactctcaagatattgcaacaagatacccagttgagtgaatgtatagataaccccagagtttcagtgacatctttttataaggtggaaggcaaccatgggaatatttcctattacacagaggcttcctagtattttgacaaagtacttttaaaagtttttgaatttaaagatcctcaattttatacttttcttttaccaaataaataaataaattcttggcgtaggg

SEQ ID NO: 266248 - DNA, 746 bp, Homo Sapiens
  misc_feature (54)..(54): n is a, c, g, or t
  misc_feature (161)..(169): n is a, c, g, or t
  misc_feature (450)..(450): n is a, c, g, or t
ggtgggtcaaggcagaaggagaagctgttgaaatgagggccgtgaaatcagttntctgttggtttgcggttgtgtttggttttgtttgtttctttataaaaaattcaatcgggcagctcccttttccacaagcctctttgtgactgtagaactattgtagnnnnnnnnngttcttttctatattataaaagaaattatccaacacagtaatattggtacctgtcattttttcacttctgtttaaaaaaaatgtatttttagcaagataacttgggtaatcttctaaaaaagaaatttaaaaactcactgttagtgactttgatgccttttaaaataagagctttttcatttcattccatctttaaaattttttatctttgttgtagaatattaaaaactattttaagaaagataaattctctttaaagagatctctagcgtgtgtgaaanagagctcccagatgcctctaaaagccgcatgtacaaaggaagcccacgtctatcctgtctgtttatatttgcttttcctgttttgtaacctctttgtactttgttcatggtgacttgtaagctaaggggaaggggtgcctagatgcctttgtatctctccatgtcacgcgctcactgggccagccggcctcccttcctccccttgtatgtaatacctttttttcccctttctagcaagtactttcaaaagaactctgtacattttaacataaaaaataaattatgttgagccatta

SEQ ID NO: 266249 - DNA, 942 bp, Homo Sapiens
tttctttaaaaggtttattgatcatatacaaaataaagaaaaccttatatatcacaaacatacactatgtacagcaataaatacccggggggccaggccaagtgctgcccctcctggacaataatttagcaataaatactgcgcagggcaggggtagggcaccaaggccactgccctgcaagaggtcaggcccctgcccgccctacacgaagtgtgagcgctcgggcctcaccccgcatccaaaccccagcccctcctcacttagatctttaataacctccatcccaccccagcagatcccggggtcttctcccacacacacaacctcccctggctagacctaggcagggcaggcagggactgatcaactctgcttggacccacctctcagcgccaggagagcaacagggctggacacgcgggcagcccttgtcctgttgccaggagaaggctttctgtgcccactcccgtttggttaaaggcttcagggactagcagattgagggggtgggaagaagggcagggctgggacacaaggttgctggaggggccaaagcccaactggggtcaccaagaacagggaggtctcacagtttatcggggacacactctagctcagactcaagggacacccatggtatcaaagctgctgctccaggggcagggtggaaatgtgtgggactggcccagcaggtatggtacacacccaggacacaggccagaggcaggacaggcattagtctctcagacacgccctgcctctgtgtggcactgattatgtactctactctcccgacctgctccaaggccagacagccaacaggaaggcaaaaatacaccaaaaagaattattcagtggcttctgggggaaaaatcgttaatgtgttggttcctttcaccaaaccacagcctaaaaaagtaactcacaagatcccagagcgg

SEQ ID NO: 266250 - DNA, 479 bp, Homo Sapiens
ttgctggctggaaaggcagagtaaaatgtcttgtgatttcatggtgttcaaatctctgaaggacagatgactctccattggtatttcaggctttccctacagtaggcaagtactttggacctaccagtctttcaacaaaaagctcagaagggtcacctctaaggaacaggtataaatcagaggtgaactaagtttcattaaaactatacctcagctccaacctagctcaattccagattggatgtggtgattttcaccttaccacatctagttaacaaggaaaagtttgcaccatctctgggggaaaatagtatcacctgtactttctactatacacaatatatgcatatagttaaaattataacgcatataggaggaagaaaaaggatatcaataatcaagataaaaaacaaacagagccaaatccacccatgatctatatggtggaattagcagacaaatattttaatttaatttaa

SEQ ID NO: 266251 - DNA, 393 bp, Homo Sapiens
  misc_feature (78)..(92): n is a, c, g, or t
  misc_feature (98)..(228): n is a, c, g, or t
aaagattgagaggatcgcttgagttcaagactagcctgggcaatatagtgagaacatggccatcaccctcaatctttnnnnnnnnnnnnnnnttaacnnnnnnnnnnnnnnnnnnnnnnnnnnnnnnnnnnnnnnnnnnnnnnnnnnnnnnnnnnnnnnnnnnnnnnnnnnnnnnnnnnnnnnnnnnnnnnnnnnnnnnnnnnnnnnnnnnnnnnnnnnnnnnnnnnnagaccttgtctctctcaccaaacaaagattttaataaatgatttgattttttaatttcttttagcaagggtacaattttacgcaagctataccagtaactaaaagcacaggcaatgcaaatataaaagaacatttcaggactgtaagccaaaaataaaatttttg

SEQ ID NO: 266252 - DNA, 638 bp, Homo Sapiens
ataaagatgtaagaaggataaggagagaccagatgcagtcgagggcttttgtggcatgaggaaaggatatttaacttggcaccaagaaatggggtggcattctaatgctgctcctgacctcctgtgtgaccttgagctccagtttccctctttgtaaaatggtggccctgatgactacctacaaggttggaggtgggaataagggacctaatgcatgtccagtcatctgtcatcaacactcaataagccttttcctttcgtggccatccatcttcaggtttgacggaagtgaggatctgccctcagggttgaaaaggtcaagatggtttgctcaaatattttatttctctcatgaaatctcttgcaggtttggttcatcccagactgattctttttcagggcagtatttatattgtcactgcgttcaggctgccttccccatttgatggggcccagcagtgttcagttatactgataataccaaaattatcttcattttaaaaaatgtaaacctttttatttctgatcattaatgtaaggtaagtatattgttgataatttggaaaatccaaagttaaaggataaaattactactaattgtaatctcagcacacagaaagaatcatgtgtgtgtgtgt

SEQ ID NO: 266253 - DNA, 928 bp, Homo Sapiens
gctacatttgcagccaagcccaccagaggacccagagctagagggtgatgcttggaccccattctgcagggcagtttctccttgtatagggtgcatgtctgtttagggccatgagaagcactggttgagtgcttatcaagttccctgtgcccggccacataactttaaacccccagcttagtgactggctacaagagtcaaactctgttcacaagccatgctacctggactcctggttccatttctcaggagtctaccagtgctgccttgccactctgtccaagctttgtaagaatgcccagatgtgtacaaggatgacccatttgtgggcatgtatggcctaaagagcctgcccagccccaaggacttcttagcagagcagggcccttagtgcatctggggtgggcccagagcagctgcagccctctctcctgcacggccagagcgacttagctgggccctgctctgcccgccctgtggccatgcttccatgggctcctgactctcctagggccttcttctggaaagtgctcaagaaccgagacactatcaccaaaactggagactctgggaataggatgtcatgtgttaagcatcagaatgtcccctccaacaagctaagagtgtctactcttgccaccctgtcatcattgtgcttgaggtcaaagccagtgccagaaggcaagaagaaatgaaaaaccatccaggccagaggggaagaaatgaaaccatctccctttgcagatcacatgattgcatagaaaatcctagggaatctacaggaaagttattagaactaataagtgtgtttaagcaaggtctccagatataaggtcaacgtaacaaaaattcatcatatttatataatctatctgtaacagttgaaaattgaaaattttgagaaaagtgccattaataatagcaccaa

SEQ ID NO: 266254 - DNA, 560 bp, Homo Sapiens
  misc_feature (67)..(67): n is a, c, g, or t
tttggttaaagaagtaagtggcctgtatttaacttttgggactgggaaaatgaattaaaataattcnttattttacagatattaaagtaattgtgaaataaaagaaaaaattgtctgataaaaccacatctcatagaaacccaatgaatgccaacacatctaaaattttatctgccaaaaaacgagagaagacttgcccttctgtcagtaaagcacagataaagagaagtaaacttttctggattgaggcaataattgggcatcaagagtccacgtgacaactgaggctggcagttcaaatgtcacacctcttaggaatgactttccttgcacagtgctctcctcagggcacccttgacctctacattcctcaggttgtaaatcagggggtttagcatcgggttgaaagaactgtaaaatagaaaaaggaccttctgctgctcctcaggatggcgggacttaggggccatgtacatgacggatgcgctgccaaagaagagtcccactacgcagagagaaggaagcggaggagaggcagcgagcggaggaactgtgccgaa

SEQ ID NO: 266255 - DNA, 711 bp, Homo Sapiens
cttccgagcctgttcagtctttggtcctggtttagatataggtatatagagagagctatttgagtaatcaattcccaatatggtatgatttgagcatttggagaggtcttctttacatatcatagtacttagattattaccaataaatatttttcttttggggttaacattacagtaataatatattttgaatctaaaatttggatggagacacaggacacagaatatataatgctcaaaaaatgtaatgctcaatgaatgtctctatcatattcttttttgttgttgttgttgttatatagatgaggccttcctatattgtccaggctggtctcaaacacccagctttgcctccttatgtgccaggaaaacaggcctgagccaccaagactctcaatatattattaaaatataaacaaattacttgaagtggtacccctcaaaataatgtcattttcactttaatgtaaattagtcttactataaaatcactttcctgctttcaacaagttgcaatgtaagacgggacattttctgaaatggagagaagataaacatgaagtaagaagctttgtccccagcaggcttttcctggcagaaaatatggacatctgggtggtgtcatagtcaggaggccaggaggaaggatttgccaaaatgggtaaactgggcagtgcatgaaaactggtgcctttgctcctatgggccatc

SEQ ID NO: 266256 - DNA, 709 bp, Homo Sapiens
ctcacgggaacatcttggcccagaacacaaaccgccctgccagacgaccctccttttcgctcctcatcccagttagtgtgagttttcgcaaattccaaggcagaaaaacgaatgtatttggttcctgttcccaggtgctgtccatagcctcacccaggattgccctcacttagcatttatagcccatgcttcctctcccaaacccagacttgcctaactctgagggttcagatgaggggtggtgaagccatctcagctcacatctatgacaggtgcaaagtgcccaccatccaccaggccccagaatccccatcagtcacaccctgagatagtggcaccctctgtaggagaggtgaggaaacaggctgggaaaagggatgtgtcttggccaagatcacactttggtgagtaggtaatcaccgtaggcaatcattgtaggcactgatggccggagagaggttggggaccccacctctgccctcagctcaaccaccttgctgggaagacccgaccatcccccgacttggtccagcatctcctacacaggagcttttggttggcccggagtcatgacactgtggtgggagcaccctcaggctcagcctgggccccagtcccagctctgccaccgactggctttgaaactttggggctgggtacaatggctcacacctgtaatgccagcaccttgggaagtggagcttgaggc

SEQ ID NO: 266257 - DNA, 795 bp, Homo Sapiens
  misc_feature (85)..(85): n is a, c, g, or t
  misc_feature (475)..(475): n is a, c, g, or t
  misc_feature (536)..(536): n is a, c, g, or t
  misc_feature (544)..(544): n is a, c, g, or t
tgcttcaaataatatatttacgttacattttaccataattttaaaaagttaaatggtaaattttattttatgtattacagcaaancaaaaatctttgaatttaaaaaatgaaagaaaagttcacatgtgaatggactagtctgggataaacattctaatagaatatcagaaatgttagctaagttagttgttataccccatttaacccataatttattaacagaagcacagtatattagaaataaaagactgaaaatagtgtaattttcagaagtaaacagtaccagaaaactgacagataaaatagtgtttttatttgtcctgagggcaggtttttaaaagaaaataattagatgatgatgatgaaacttctcgatacgtggaagaattctgtaagtacacttttaggtttaactgtacattttataaaagatgggattacaactttggcaattaaaatgttatatatgaaaanaagacatttttaatggtaacacaccaaaaacctttttaagaagaaaaatggagtgatcaanaggtattnatacagcttttgtgcaaatttctcaagaaataaattgtttaatgatacgatgtagtgagccaagaatgtttaaacatggtgggtagcaatgatgctcattatgtgtacaatccacctgtgggataagaaaagacagtagacactggagactgtatatacttgtccccagagaatcaccggtcaagggtcactcacttatccttcaggttgccctaaggtacagcggcttttgagtcagtgaggaaagacgc

SEQ ID NO: 266258 - DNA, 625 bp, Homo Sapiens
  misc_feature (202)..(202): n is a, c, g, or t
ttggccgggtgttggtggtgcacccctatagtaaaaaaatcttgagggtggggccaacaatctgttttcaagggcctccaaactgatactgattaatgctaaagtttgaggatcattattcaagtgctctcaacaattctgcaatcattttaataatttgctgtcctttcttacataaactagcctaggtggtaatttcctncgaggaaactgaacccagaccagttcagaaaaatacaaaaagtataacttgattgtggtgcaatacaggcaaagtaaacccttcagaatagaacacttgactttatagcagtgttctggcgtttgcattgatttgtgatagagaagcagcctcaaatattatcctctacgtttttatcttattgattttttaactgtaattcaagtttcatggaaatctgatcattatttattagtgatataaagacaaactacttactattccaggaaaattattatgttcaaattcttgttagtattaactctgatgtatgaatctgattcattatacagaattctcaattttcagtctacaaattcattagaagtgccaacctggggtcttctttagccattaagttcctagatgactattataaaacag

SEQ ID NO: 266259 - DNA, 1128 bp, Homo Sapiens
acacaattaaagtggtttgtggaagaaagttgtaaaatctttttacttttttgcccctctggaggcttttaaccctaaattgtgtctgatgtattcgggaggcttaggtgtgcaattcttgcccaaaggcaaggagatgaatgagatgtctcatggcctcttctagccttaaaagttgaccattacagtgactttatggctccaaagttcttgaagcatctccagccctagactttgacaagaaaaggtagctcagcatctctactttccgtgagtacctgcaggagtccagccaatgtattagagctgatcattaagctccttcagtgagggctaagatcctattctcggatgagcataggggggacagccttgttttatgccacttttctctccccataccttcccctcatgtgtacttagccacctgtgttgctttgaatctgctgccagttctggctcaaatgtggcacaaaatcagtacatcagacacaccatgaaatccctgtggctataaattctaaggaatcttttgacacttccagcccaaagaacttatttttatttcgtattatataagagtccccacctctactccacgtaccccaaaaagataagctgtcctcagatcctccttctacccaggagggaaataatggatattgccaagggaacaatcagaactcatctggctttgaaaacgacctgccaagtttggctagcaggttcagacaacaagagagtaacaattggtagagagccacaggtagaaaagatactcccagctgacagggtgataaaaggcagggaagaattgggcctgtgctgatccaggaaggttttattgtttgccttgttttttgtatttactcgtgactaaattttattcatttaagtcagaattttgatatttgaaataagactactttcccttttcttactatctataaaaaagacgaggcagggatgctgtgttctttctgtcaaattctaaatgtgatctttgccattgcttatttgaattcaagaaagctatactttttcatcacatataactcacagtttcatttttgcattgttggattagacttaataaaacctaaatggaaaataaattcctaaatctga

SEQ ID NO: 266260 - DNA, 224 bp, Homo Sapiens
  misc_feature (48)..(48): n is a, c, g, or t
  misc_feature (143)..(154): n is a, c, g, or t
ggattccattttctaagagtttctgagggtgaggctcttatttttttntttaagggatcctgtctatttcctgcacttcgagaagaatcaaaatgttcctgaatttcaaatacctcatgcaaaatgtctcctgaaataagggnnnnnnnnnnnnccacaactttgaaaatcttaatgttgaagttagcaatgccgaaaggtttctgtcttaattttttaaaaaa

SEQ ID NO: 266261 - DNA, 297 bp, Homo Sapiens
  misc_feature (41)..(81): n is a, c, g, or t
  misc_feature (199)..(200): n is a, c, g, or t
  misc_feature (206)..(206): n is a, c, g, or t
actgcactggagttctgactccctttgagttgtgtgttacnnnnnnnnnnnnnnnnnnnnnnnnnnnnnnnnnnnnnnnnnctaattggtgcatattcaggtaccacctttgacgtgtggctctttctcctgaccatcatgggaagtgtctgctggattccattttctaagagtttctgagggtgaggctcttattttnntttttnaagggatcctgtctatttcctgcacttcgagaagaatcaaaatgttcctgaatttcaaatacctcatgcaaaatgtctcctgaaataaggg

SEQ ID NO: 266262 - DNA, 663 bp, Homo Sapiens
  misc_feature (129)..(137): n is a, c, g, or t
tataacttatgaaatttcaagtgtttcataagaagcatctttctgaggcacatcttcatttcagatgtcattgcagtttaggacacaatatttccctcatttgtgttttttaaaaaacatagctttgannnnnnnnnattcttaaggtcagaattaaaaagctaaatgaattccaggcttcaaactcccagaattatagctggttcaagcctaaaatgtgctatatcaactgtctacgggggaagtgccgagtagttgtggccttcgtggagtgttttttggagctctcgcctgtcccccacccccttccttcagctgcttctgtttgttcctgctgtagtgccttcagccatgaacataccgtttaatcagtggtgtattaaaatggacctgtacagtcagcaatagctaggccaaaatcgattggctatttttaaaaggaaaaaaggaagatagaaaattgctcttttaatctaggtaaatcaaatcgtgcctgcttgctttccacctgtagctaagtgtaggcaagagcattctgattgatgacagtgtttctttgtgcttctttattcatgcttatccacttggggtaaaagcaccagggtatcttcagaacggagttttcacattcacgtcagaaagcttgtgctctttttctctcag

SEQ ID NO: 266263 - DNA, 974 bp, Homo Sapiens
  misc_feature (16)..(16): n is a, c, g, or t
  misc_feature (877)..(931): n is a, c, g, or t
  misc_feature (933)..(933): n is a, c, g, or t
  misc_feature (936)..(936): n is a, c, g, or t
ctgaacatgttgatcngatgtgatttgttgtaaggcacaggtggcccttcacaatagcaacacattattttgaggggtcttcaggccaacctgatgacttcagtgattggaaatccatggtaaagggagaaatttactatatgactctcttaacagccatcactcggaggaatgattcacttcctggatttaccgtcgccgcagttgaaagccttacaaatgatcattggtctcccaaacacatactgcccgtattacagtcaaatttcttctttccaaggattgccagggtttgccttttaatggctagtcttgaattgattcaagaccagcgatcaatggcaaatcttgaggcttcccctaaagaccgcttctgattgtgttctgatattagcatcagtcagttactgcattttcctgagtcatcctccccaccttctaaagaggtgggtaagcagaaaatggctcttaagttcctttgtacacctcttttgaagtttgtagggagatgggagaagatgaaatttggaaggaaactgtgaataaaaaaagtgaaacaagatgagattacattaaatttatgacatgacatggcaggctcattttgcttcatgaataatggttaatcactgtttgaatcagagactatttactagctggtcctcataaatcagggctggggaggagaaatatttatcatcggctaatgtcatgtgactttaatatagccaaatattttaataagattgaaaagtcttcaacacaaatgttttaaatgatggcagatctcaaggcactgagagaagaaccttaggatttttgaagtcaggtgctgtcctttaaaaattgagctttaggctgggcgtggtggctcatnnnnnnnnnnnnnnnnnnnnnnnnnnnnnnnnnnnnnnnnnnnnnnnnnnnnnnnantgnagcatcctggccaacttgtgaaaccccatctctactga

SEQ ID NO: 266264 - DNA, 628 bp, Homo Sapiens
  misc_feature (104)..(199): n is a, c, g, or t
  misc_feature (532)..(532): n is a, c, g, or t
cacaactgacagaaataagagttggagacttcaatgtctcactttctataatgaataaccaagcagaaaatcaactaggaaataaaagatataacattataaannnnnnnnnnnnnnnnnnnnnnnnnnnnnnnnnnnnnnnnnnnnnnnnnnnnnnnnnnnnnnnnnnnnnnnnnnnnnnnnnnnnnnnnnnnnnnnncatatgctaggctataaagcaaacctctctaaatttaaaaggatataatacataaattatgttctccctacacaatagaatgaaattaggaattgatatagtttgaatttttgttcactcccaaaactcatactaaaagttaattccccattttgaaggtgtcgggaggtgggaactttaagaggtgtttgggtcatgagggttatgtgctcattaatgggttaatgccattatcacagaaatgtgttcattatcacaggaggagtactgttataaaagggcaggtctggcctccccttgctctctcttgcctttccacctcccaccatgggntgatgcagcacaagggtcctccagatgctgccccctcattcttcgatttcccagcctccagagctgtgctaaataaatttctgttcattattaaat

SEQ ID NO: 266265 - DNA, 899 bp, Homo Sapiens
  misc_feature (279)..(279): n is a, c, g, or t
ttctaaactacggacaggatgcatgggccagctagctgagaacttggaaactgcatagtagccaatatattggagaaggaaacaagaatttgaagtatgattgaactggggttgagtttcccatttattttccccccagttttgcctgaccttgactcacatgtagcccaaaacctggaagagtgcaccagggtaggggcagatagagctccaagagaatagaaagaactccttttctggtttgaggagcaggaaggtggctcctaaagatcagatgtngggaagttttcctgtttatgtgtttttttctccatcgtctcccactcaagctgccaggtagtattgcaatggaggcagtggcaatggtgatagcagcattagccaagtagatgccctaaaatccttagacagaaaaaacttcccctaccagaaaagccgtgaccccaagagcatggggaaatccctgttacttctgtctcccacccctcacacccccaatcccctctgcccttctgttcctccctgctgcttggcccccagacacagatgcagttataagtacatagcagagctgggaaattaaagtccctagatttctggctgagagactggaaaaggaggccccaaagagccaaaaactgatgagggagattgtagagaggagagagcataagagtgatcccatacttttgtgtataaactcccagaatcacctccaaactgtgcagcatggatctgatcccaaacaaaacatcaaagaccttgagaactagtctacatatgaaacccatctgaagagtactgcaaatggctttgaaaactgaattgatattggtaccagaacccagagaaggtaggtggaactggcagcctggacctagcctggtcacttgtctgct

SEQ ID NO: 266266 - DNA, 713 bp, Homo Sapiens
atagtgtggatgcagccttaatgaatacattaacattgaaaaactgacatacacacaacccacctgggaaaagaggaaagaagccttattcaccttgatgacttctgggtctcagtgctgatctttgtgatttgttggctctgattttctgtttgggacctggggctgcacaatgggaggaccctgaagttgtgatgttgtttccctcttcattccctaccgtggcctgactctctcgtaggaagcaccttgcttcatgcgcatgttagcattgtttcggaagaccagaactgctctcccatgaagtgcagtagtagggcctttttgtacttgggtccctcacgtatgaaactggaatcttcctggttggggttgtcttctgctctacctggcgtgccaggtaaatggagaactcacattcattgcaacatcatttcttgggaaagatttgtcagccttaagctgtctcctcctaccttcaaagtgggaaatgctcaaaggtatttatgctgcactctggccatcttctttctttgtgagagggaacattattgatcttagcctccaggactctagataattttgaaaaccaagaatatctgcgatccatttagggagaaacaagtatgatttgcttcctccaaggcagcattcttcaccaacttcatttgagacacaaatggtgtgttttgtttgttcatttgccctttaaa

SEQ ID NO: 266267 - DNA, 592 bp, Homo Sapiens
tttttttatctactacttattcacagcaagcctgtgaggttgacactattatccaaaggttgcagatatggggtgaggggtgcagagacattaagtgacttgccaagacacatatgtctctagagccaagatttcaacccagggctgtgaggctccagagcccagcccgtccccaccaggcccccgtggttctctgatgttcctttctccctgatgtgcacactcaagcccacccatcagacttcctgcccagggccacagaagcccatggaggaactagaggtgtcacttgagactgacaggtcaatcctggatggagcctcctgagtgagcaagaatttccaccccttcagggcagagaggcatttccatgaaggtgaagacaggccaggctcccagctgggctgctttcagcctggatgccccagtgcccagaccatctttggatgcttgggggagaggtgtgagatctgctctgagaggcatctttaagagcatctcgcctgagaaagcaacacagcacaatcctatcatcagataaaacagctcagatggcctccccattccctgtttcaaacaaagagaacagaag

SEQ ID NO: 266268 - DNA, 532 bp, Homo Sapiens
  misc_feature (18)..(18): n is a, c, g, or t
  misc_feature (26)..(26): n is a, c, g, or t
  misc_feature (61)..(61): n is a, c, g, or t
gcctcggctggtctcaancccccggnctcggcaaccctactgcctcagtctgaaaagtgcngcatgagccaccatcccgggaatgtttctcttttaagaaaaaaggactttaaatccatttaatagtaaaataaaacaaagaaaggcattgcataacgatagagagttcaattcaacaagaagacttaactatcctaaatatagatgcacccaactttggggaacatagagttatacaacaagtactgctagacctacaataagactcaagtagccacgcaataatagtagggaaacgcaactccccaataacagtgtttgtcagattatctaggcagaaacttaacaaagaaattctggagtttgatttcgcacttgatcaattgaaactaatagacatttatagtatacaccacacatcatctaaggaacataaattcttctcatcgctcacagaatatactctaggattgaccacttcctagccataaagaattatccatacattttttaaaaatgaaaattatgccaa

SEQ ID NO: 266269 - DNA, 773 bp, Homo Sapiens
  misc_feature (283)..(283): n is a, c, g, or t
  misc_feature (726)..(726): n is a, c, g, or t
  misc_feature (739)..(739): n is a, c, g, or t
cggcacgaggttgaaaggaattgtttactttggaatataggaaaacagttgaatgtcagactctcatttgtatgtgatctaaatttgcaatcaatttcaataatatttacaatttgtgataaaactgacttttacagattccttttcacaacataatttaggtgtctactgttcttattgtattttgttctgctgttgatctctccagcagccgtctcatgcttctcccttgctaaaagaagtttggattactcaggcagggccatcccagccccacccactnagaaaagctcttcagaatcttgtcccctctgttgagccccagatctccatgtgctacgaaggaaaccccaagacccagagaggaagggtcaacctggaggcaggaaaaagttggcttggatccatgtctcatcaataaccttaccatatgcttaggtcccctctatgctgtcatcagacctttggcaatggggtggtcactacctcacaaggcaaagtgttgtatgattagaaattacgtctccagtggttagctcacattgcctctcaagagacaggtttccaggtgtcttcattgtagtgggtattaattgtcttcagcctcttgatatccataccttcctgtcctctgcctagaagcaaggccagcggtgcctttacggactgatcgtgtggtgcgatttagggattcttcagttttgcttgctttaggtttccaaaagntatacattggtgntttgattggaataaagaaatcctataagctattt

SEQ ID NO: 266270 - DNA, 461 bp, Homo Sapiens
tggctagtgcaatggtcatactgttccatgtcatacacagcaaggggagaatgcattattctctcaatggatgcctttcgaaagatatgcttaaagcaagtgccctcctgctgctacaaagtgcaaggctgcctgtgtcaggactaaaggaagaataccgagaaccccaagttatatccttgttgcccctgctgggtggaacagggcagagcgatgtgggtgtggattagcgccctctggttgctgaaagtgaattcacagtttgttctagtccccagttagatgacgttggaaatgataaaattacagtagttaagatagtcaatggcatattttcaaacatcccgatgttctttctctccaactgccataactagtcctaggtctgggacttttcctctcaatgcattcagataaacttttatcctcgtgccgaattcttgggcctcgagggcaaaatt

SEQ ID NO: 266271 - DNA, 820 bp, Homo Sapiens
tggcggggtggccgcgctccgggtgtggacgggcggtccccgccttcacctgccgcctcgggacaagcgttggggaaccgcatcgccgctgtcggccgcttgtggaggagtccgcgcagcgccgtctaacaggtgatccgcgtcactcccaggccataccgaagcggctgaacgctgtgccagggctccttatgctcttctgttctgggacgtgaaaacgtctttccgccttattggtcgtccaaaaaggtgcaccggttcacaggtataagagtcaaaaaccagtattaccaaaaaggacactacgagcgtcagggtgcagagtggctttcttcgattaacgaaccggcaggaccatcgtagtctctaaaatcgggttctgcagtggtggcgaaagcgtagtaagtttcaagttgtaagtggagatgcagaattgtagatacccttcagtgtggttcaggacagtgtcttcagcgtttggccgccgttcagtaaattctgcatgaagcagtttgagctcgtggttttggatttacttttcaggagtatgttttccagtggaataaggcttactactgaatgggagctttctttgcctctctgagtgtagacaggagtgtttattttcattgtcttcccattttgttagattgtggacaagggaaaagttaaagcatattttggttaagtatttttaatagtctgggattctatccacctcctccataagggtttttactttagagaattataaagtaattttctaaagggagctgcttctcttggtgtttgaatcaaaagccaagaatcgacttgaaaa

SEQ ID NO: 266272 - DNA, 658 bp, Homo Sapiens
  misc_feature (149)..(149): n is a, c, g, or t
ggaaaccgagaaagaacgagggaaaagggagcgatgttgatctcaggaagcacaaagggaccttcctagctctgactgaaccacggagctcaccctggacagtatcactccgtggaggaagactgtgagactgtggctggaagccaganttgtagccacacatccgcccctgccctaccccagagccctggagcagcaactggctgcaggatcacagacacagtgaggatatgagtgtaggggtgagcacctcagcccctctttccccaacctcgggcacaagcgtgggcatgtctaccttctccatcatggactatgtggtgttcgtcctgctgctggttctctctcttgccattgggctctaccatgcttgtcgtggctggggccggcatactgttggtgagctgctgatggcggaccgcaaaatgggctgccttccggtggcactgtccctgctggccaccttccagtcagccgtggccatcctgggtgtgccgtcagagatctaccgatttgggacccaatattggttcctgggctgctgctactttctggggctgctgatacctgcacacatcttcatccccgttttctaccgcctgcatctcaccagtgcctatgagtacctggactcatcatcaataaacactgttacagc

SEQ ID NO: 266273 - DNA, 353 bp, Homo Sapiens
gacgagtcttcaatagcaccagtctgcacttcctagtgactttgggtcgccaatagaaaatgacagaaatggtcatctagaggacccaggactctcccacccagccaggataattgggttccttagtaaagcccaaggctagaccactccctaacctgatatgcatccctgaggcattatcctgagcagccactagatgtccataatgcctcatagggtgttccaggagtgagctgggtatcgttttgccaccaaataggctttgcggactcttttaagggtaggtccatcagtggcaggaacagaacaggagcaaagacataaaaggaatttgggaaactaaaaagaaaaaa

SEQ ID NO: 266274 - DNA, 784 bp, Homo Sapiens
cttgtcttaagtttatctaatgcatatactaaaagtcaatgcacctataagagttatgagctatgttccctgactgaccccttcaagccttttgactgcttaagcactgaatcatagataaattgagtccttcaaagaacagcagattccagctgattccctgtcagaatcttcttaatgactcaagcaagctacaattcattataggaaagtcacgaaagctaatacagagccaagcataaaggcactttctggcaggcccccaggtttttaatgggatttacagggtcaaatatggaggtagctttctttaagtcaccatttaatgcagaaaaatgttgatttcctttccccctttgacatcctgggcagggctaacaagatgatggggttaacagtgcaacttaggggtttcagatttccagaacagctgtgcagagccgaatctatatgacatgtcctgggaaagcctcctgagctgggaggagctgaagtctttgttgccagggacactatttgtgtccttcctgttctatgatgcctaacaaagagctctaactcagggtgctgcactgatgcagactggatgctcacagaattgccagacttcataaaagggggctcagtacattggtcctcaattttacatgcttagcttagtgaacaagaaagtaagggacatcttcagggatcagaatatgcggaaaaaattaaaggctacagggaaacttgcaaaggttggcaagaaagacttgttccctcatatggaggaagaaaaacagag

SEQ ID NO: 266275 - DNA, 690 bp, Homo Sapiens
  misc_feature (372)..(397): n is a, c, g, or t
  misc_feature (400)..(400): n is a, c, g, or t
gttgatgaaagcacttaaaacccattaagacggcggattcagaaagccctagagaatattgagttcatctatatgagaaagtgatatgcctttgaaactatgtcaaaaataaataatttgaggtcaatcttggaattctcatttacctcttaaatatagagaaattatttcttcttcctccttattattccagtcccccactccccacaaaaggcaggttattttcacctcagaaaaaattgtatttagtaatttaaaagttcacaacatatgaagtgtggcaaaggcctactttccaaattcatttgtggatctgggagcatgaaataaaataaccaggagacagtctagatatcatggggtgaaaagagnnnnnnnnnnnnnnnnnnnnnnnnnntanccaggagagctgaaccttaaaacaggaaagggaccatgatacctcagcaatcccaaggtttcaggctacaagaagtggttaatttagatctacttagaagaaaattatgttttaaatttatcctaggctatccaaataaaatgaaatttacttatatgtaacttacttcccttttatacttaccacataaaaatattttacactctttaaaatagcccaatgtgtgggctatatttctgacaactagatcccagagatacagcatgagagctgagaagggaaaagctctg

SEQ ID NO: 266276 - DNA, 588 bp, Homo Sapiens
  misc_feature (141)..(178): n is a, c, g, or t
caaaggggtagaatgtatatgtgggacaaagaaagaggctagattaacaaagctatcatttccttgtttctctttgacagctggtcaaataattcaggcatagctaggactgatgctcaagttagaaacaggtggcccatnnnnnnnnnnnnnnnnnnnnnnnnnnnnnnnnnnnnnncaagcatttgcactgtgtcccatgcaacaaggaactggattttaattttaataaatttaatataaatttttaaactgatacttatttcaattcttgaaaaaaacttttgtcttagctacttgatatgagaatctgttttcaactgtaagttgtatgaaatctaaatacagatcaagtatgtccaatgaacattagcatccaaatggagatgtgcagaaagtgtaaaatacacaccagatttcgaaagcttagtatgaaaaagagaatgtaaaatgtctcactaatatatttttatatgttgaaatatttggcaaatgttggattaaataaacttttattaacattttcacctgcttctttttatgtttttaaaagttgctactagaacatttaaagtgacctatgttgtt

SEQ ID NO: 266277 - DNA, 755 bp, Homo Sapiens
cgatgtcaggggtcaacaatggagctgctgcaggatgtgagtgatgtcacagaaaggagtgagttctggaccctgaggaagccagaagctctccctacaaagctgagaagtatgttccgagccccagatctgaaaaggatgctgcgagtgtgtagagagctgacagatgtccaaagctacttgggttgacgttgaccctgaatccacacacagctaatttaaatcttgtcctggctaaaaaccggagacaagtgaggtttgtgggagctaaagtatctggaccttcctgtctggaaaagcattatgactgtagtgtcctgggctcccagcacttctcctctggtaagcattactgggaggtagatgtggccaagaagactgcctggatcctaggggtatgcagcaattcactgggacctacattctctttcaaccattttgctcaaaatcacagtgcttactccaggtatcagcctcagagtggatactgggtgattgggttacagcataaccatgaatatagggcctatgaggattcttccccttccctgcttctctccatgacagtgccccctcgccgtgttggggttttcttagattatgaggctggtactgtctccttttataatgtcacaaaccatggcttccccatctacactttctctaaatattactttcccactactctttgtccatattttaatccttgcaactgtgtaattcctatgaccctgcgtcgtccaagctcttgaata

SEQ ID NO: 266278 - DNA, 747 bp, Homo Sapiens
  misc_feature (404)..(438): n is a, c, g, or t
  misc_feature (510)..(510): n is a, c, g, or t
attacgattctatgcaggtcttaacctagagcatctggacttttttcccatcactccatgaaagctcttctcaataaggacatctataatctcctttattccaagcccagtgacctacttccagtactcatcctacttgaccttttttgtttgttttaatagtagtttattctgttcttcttgacacttttgccttatggaaattagttgttttcttagtttatggatcactattcttttctgaatcaccttcatcctccatgagtacttttcagttctctttctttcttgtgtatttatctagttaaatatttacctactataagtaacatattcatatatagagctcaacatcaatcaaataagcacaaaataattatagaatgttaatatgtacagttcannnnnnnnnnnnnnnnnnnnnnnnnnnnnnnnnnngtacataggattaatataaagaagggtttccaaaaaagtgacatttaaccagagattccaaagaatgggcanggaaataagtagacacaatttgagggtaactgtagaatggatgatggggagaagaacattcctaggcagaaggaactgcatttgtaagacccagtggtgagacagaatatgggagcatgatgagttacaagaaatgaaatatgctttgggagccaagataggaggatcatttgaggccaggagtagcagacctgactatgttccctgaacaacatagcaagacctcatctctacaaa

SEQ ID NO: 266279 - DNA, 499 bp, Homo Sapiens
  misc_feature (418)..(430): n is a, c, g, or t
tctgaaaaccacttgctgaaatagaatgcctcttctgaatactgatgtcattagactatcaatttaggttatattaaattttttcaggatagctatccttaaatttcaaagcatttattggccaggtttctaaagtgtgatagcatcattcaccaggaagcagggaatttagaatcgaggtgacaccggaccacagagtgagtctctggtgtagaggcaggaatatgctcagtaaggtagctcgtcagccataaggctgcccaggagtgaggcttcctctgcagggtctcacgggtgccttctcatgccttttactggagccatatctaatgactttaaaaggttaaccctggatctgttctggtgaacttcatccatgtttgtaacatcctagaaagtatttattctgagaagctgnnnnnnnnnnnnngatcttcccagatttctgaaaatggggtggatactgacctacattcagtgttctagattaaaatcacct

SEQ ID NO: 266280 - DNA, 468 bp, Homo Sapiens
  misc_feature (251)..(251): n is a, c, g, or t
  misc_feature (314)..(314): n is a, c, g, or t
  misc_feature (318)..(379): n is a, c, g, or t
  misc_feature (383)..(412): n is a, c, g, or t
  misc_feature (454)..(454): n is a, c, g, or t
caattgattaggtgctgtcatgtaggaaagtatgcttttgtatgaaagtaataatgtcatttgttcatttttaatattagtaccaaggagaaaaccaaaaagggttcattaacaaatatagcaatatagcatatgcaataataataaattcaaatggtacaaaaagggataaaacaagaagtgaatgccttctttcctctttctagaagtttctctctccaaaggttcttgtggttgtttctagaaaaaangtatttcatggccaggcgcaatggctcatgcttacaatcctagcacttggggagggccaggtngatnnnnnnnnnnnnnnnnnnnnnnnnnnnnnnnnnnnnnnnnnnnnnnnnnnnnnnnnnnnnnnctannnnnnnnnnnnnnnnnnnnnnnnnnnnnnggattttatggcataggtcccacattatccaattaaaatttncttaattttaaatg

SEQ ID NO: 266281 - DNA, 688 bp, Homo Sapiens
  misc_feature (54)..(54): n is a, c, g, or t
  misc_feature (197)..(212): n is a, c, g, or t
  misc_feature (241)..(310): n is a, c, g, or t
ctgggtataacaatggaaaccattaaaaaggaaataggcaaataaccgaagganaaattactgtggaatttcaaatgttgtgaaggaaggagataaaaagtggaatatacagttttattattttgaggattcaagggaaaattccccaccctacctctctacttgtccttttcttcatttttaaaaaatcacttgannnnnnnnnnnnnnnnaaacagggtcttgctctgttatccagatnnnnnnnnnnnnnnnnnnnnnnnnnnnnnnnnnnnnnnnnnnnnnnnnnnnnnnnnnnnnnnnnnnnnnngggacagtaggtgtgtacccactggggcatggctaagatttatattaaataaaatatccttccacctccgtctccctagtcattttttaatattgtgttgcgagttgtgtaaatggtgccaggatacaatttctaatccccttactcactaaatcatctccttcctgattttcgtaaagtccacactgagcaaaccctgatgcaaaagctagtgagggccatataagaaccacataaagaacctacatttgtgatgaattttgtcatgaaggaggtgacttgtgtctggattgtgatcatgtaatcatgcctccttgtattaatcctgcaaccaatataccatgtgagcttagatagtgaggctcttactttatttga

SEQ ID NO: 266282 - DNA, 682 bp, Homo Sapiens
agagagctagcaccatgagcctcaataccctgctaacattcagaaaatcggttcaaatgatacctcccctataaaactgtcactgaaatccctaagctgtatgtcctaatttttctcccatagtatcttgactctgcctacataacatatggcattatgatctgccccttccagcaatgatctccttaagtacaccaactgtattgttttacatccttataactatgtgcatgtacacatagtacatattagttactcaataatgtctgctgaatacagaccaatgattcccagtagatttgttctaccctaatggaaaattttcagcaaatatatcactttgtgtcaaaggttaccaagattgctttcatgttcagagaaccctagagctcacacaaatcagtatgtggttggatcacagtggtaaggatacacagcgagatgacgggaaagacacaggcagagtctggaaaaatccatgtgcaggcttccttatgctttctccgtcccatgaagtgctacagaacacacacttcccccagcaacaaaaatgcagcaacatgtacacagtatttctgcccaggagagccaattagagactcagcacccaaggtatttattgggcacactctacctagcatgtaccaaaattccagactccccaaaagagagcacacattca

SEQ ID NO: 266283 - DNA, 1095 bp, Homo Sapiens
  misc_feature (38)..(38): n is a, c, g, or t
  misc_feature (373)..(373): n is a, c, g, or t
  misc_feature (404)..(404): n is a, c, g, or t
  misc_feature (429)..(429): n is a, c, g, or t
  misc_feature (589)..(589): n is a, c, g, or t
  misc_feature (602)..(645): n is a, c, g, or t
  misc_feature (697)..(697): n is a, c, g, or t
  misc_feature (740)..(740): n is a, c, g, or t
  misc_feature (1079)..(1079): n is a, c, g, or t
tgtgtatgtgtgtggctagggataacttgacacagagnatgactgtgaactgcataaatacatcccactaaacccaaacaaaatgtggacccaattcgacttccccctagctatatctcaaaagcactttcaagtccaatgtcatcaaacccaaacagaaatgtgacagcagggaagtcagaatgagaaagaaaaacattaaaggattgcttaaaatcttcttccaattttaccagttatgatcccatgaaggcccagctacgtatactgctagggctcctccagggccctgggaaagtgctgggtgggccctggcaatatattcaaaaacggcaaggaatgcgttgtacaagttcaggggccctggggctgngagcttcattagcttcacaattaaatctgcnctctgttgggtccctattattattncattattttatctcagtctgtacatgtctggtctctccaaataaatttcaaatccttagagataggaagtactgtcttaagcactaacataggaaatactcaaaaatgtgtggctgtcctcactatccatggtgatcttgaaagagagggaaaaaatgtntaataccaaatgnnnnnnnnnnnnnnnnnnnnnnnnnnnnnnnnnnnnnnnnnnnntacacacatatatgtggtatgtgtattagacatatacatgtattatttatantatgtgttagatatcctacatgcctttgtgccttaaaatatanatttatttctatatatcaattatatcttataatacccaaagaaatggtgaatttttcagtgttattaacctggcatccagatcatgtcccttcaaggaggtctatctcaggagaaagtcaccattgtagtctggcagacaatgaacagtgcttccttgggaggccagtgggtgagctgggcaagggacaatggccgtcaggggactatcagtgctctctggtgctgggcagacagtctattgttagtgacccaagaagagtccctctgactcctgccaaagttgacagcaattggaaagacttcacccttaaagaggatatccactaatctggtccctnttgcagctagctttaa

SEQ ID NO: 266284 - DNA, 562 bp, Homo Sapiens
  misc_feature (54)..(110): n is a, c, g, or t
atgtgtggctgtcctcactatccatggtgatcttgaaagagagggaaaaaatgnnnnnnnnnnnnnnnnnnnnnnnnnnnnnnnnnnnnnnnnnnnnnnnnnnnnnnnnntacacacatatatgtggtatgtgtattagacatatacatgtattatttaatatatgtgttagataccctacatgcctttgtgccctaaaatatatatttatttctatatatcaattatatctataataccaaagaaatggtgaatttttcagtgttattaaccctggcatccagatcatgtcccttcaaggaggtctatctcaggagaaagtcaccattgtagtctggcagacaatgaacagtgcttccttgggaggccagtgggtgagctgggcaagggacaatggccgtcaggggactatcagtgctctctggtgctgggcagacagtctattgttagtgacccaagaagagtccctctgactcctgccaaagttgacagcaattggaaagacttcacccttaaagaggatatccactaatctggtccccgcttgcagctagctttaaaa

SEQ ID NO: 266285 - DNA, 1028 bp, Homo Sapiens
tatgttcaaccattcccagtatcagatatctgaagcaacttccatgtctttgacccaaagaagctccaaaaagaaagcaggagggagaggggaaaaacaatactacattctcagcagagggctctgcctaaccaaaaccacccgcaacaaaggaacaggggcatctttccgaggtctgtggatcagggctggtgccctccctggcattctgatacactcacatcactggctctgagaaagggctggttcatgaagtttctgccatcatccaaaggggataagactagggagagacgcggaagtcccactaagctggctttggcctccaacacagctgacaagagtccttgggaggatttcccgaagaattccgtggaccctgtcagtgtctgttggggttggaaataaatgggcagagaggctaggctgaaggggttagaaaccacccaattaaaaaaaccccaaaactcttaaaacagtctatagagtgaaaagttgaacaattctgatatcctaatatagaaaaagctcttcaaaaggatcaatgagatctagaagaatctcttggtataaactcccaatagaaactgaaattaattttctggtgatttagaataatcttgaaagtctgaagtctgactatggcaggttagcttctttatcattttgctggtttctcttggatgggagaagggcagagttggggtaggttagttcctgagctcactcatcagcaatctcggtctcctggtggacgaccaccttggtcactgacatgtctgggtgctgctcctttgcctccttgatggcttgtacaaggacctgatcatggtcaatatcagcatctcctgtgatcacaattctcttttcaatacgtgtctctgaaatcccaccttttacagtcttggtaatttgagttgtggtggtgctgcttggggtctcagatgtgatagtttgagctgtcagcaagactcctgggtccaagtctccactgttgtcgtcagtctgggcagctcctgtgccgaatt

SEQ ID NO: 266286 - DNA, 263 bp, Homo Sapiens
  misc_feature (102)..(150): n is a, c, g, or t
cctcatcagaattatgtaccaacttcatataatattctatgtagacaatatttccttctgaatgtagttcagttgcatatttttacagaccaaagcatagtnnnnnnnnnnnnnnnnnnnnnnnnnnnnnnnnnnnnnnnnnnnnnnnnngttctcaccataaatattttcttgcagctcaaccagaaggttggcaaaatacttccagaaatctttgtttgatattctcttgccctcctgaaagttctgaaattttgaaaatg

SEQ ID NO: 266287 - DNA, 439 bp, Homo Sapiens
aaattcggccacgagcatgatttaaaagttaatattgccattttggtagattttataaacctaccaaatcagatctggaaattgaatttaaaagtttaaggaagaactaggttttaaaaattgcaataggtaaaatatgaattaaaaagaacaaactggtctctgaataatttttctgtgtgcaaaaaattgccattaaatgcataaagtacccacattgacaatttgatgagaattggatgtttttattgagaaattcccatatgacagtatatgtgggtcatttctctagattgtccagtttccaagaacagtccttcaatcccttgcttgtgcaagaataacctgcagcagggctggcttcatgggccagcatcccatgcagtctcacagggccctgctcttagaaggacctcacacttgttctaatgctctgctc

SEQ ID NO: 266288 - DNA, 677 bp, Homo Sapiens
  misc_feature (283)..(418): n is a, c, g, or t
aggctcacttcctggcttgcagatgtcctcacatggccttgagtgtgtggtgggtggagggagcagaagctctctgatgtcttttcttaaaagggcacaaaccatgtcatgtcagggccccaccctatgacctcatttaacctttgttacttccttagaggccccatctacaaatacacattgggagttagggcttcagcatacgaattttgtgccacaaacattcagtccataacagggccctagactcagttaggatcataggttcttttagacctaatgnnnnnnnnnnnnnnnnnnnnnnnnnnnnnnnnnnnnnnnnnnnnnnnnnnnnnnnnnnnnnnnnnnnnnnnnnnnnnnnnnnnnnnnnnnnnnnnnnnnnnnnnnnnnnnnnnnnnnnnnnnnnnnnnnnnnnnnntactgtaaataatagaattatatatatatgtgagagatgtcagccattaattctctgaatttaaagccatcctgacaataagatgtttattaaaatcagagaaattaaccaacatgataggattttttttcccagagcactaggtcttttcttttacagaggtattgcttcacatagccacctaattattctgtaatatatgtgcttatcaattggtcttatggactaaaaataaacacactttgatttctgatcaaag

SEQ ID NO: 266289 - DNA, 683 bp, Homo Sapiens
  misc_feature (33)..(33): n is a, c, g, or t
tgaaggacgctggggtgggccatctgggcctcntcgtggacagaggttgactctaccacccagtgggcaacaagagaatccagtacctcccatgtgtggtgtgtgacctgccaccaagcacagcacattgcacacccgtgtcacatccaccgcacacaccagtcagagactccagtcctttttcgggtgtaagccatcatttgctgagcctgtgctccgggccaggcctgcactaagcactttgcatcccctctcttagtgagtcatcacaggaaacccttaggggtatgttattatcccgttttacagatgagaaaactgagttccaggaagagcttaagtgaaaccacaggtgtactgtcctcggtatggtgcctggcacacactacggtattacggcacttacgcttcgcagtaccgccatgtcctcatcccatttacagatgagaaaactgaggctgaggacagggagataccctgcctagggtctcgtaggtattgttctgcctggcttctaagccatgctggtaaccttagagctgtgaaaagccctaaggtgcaaaggagagtgagtggaggtgtgtgtctccctcctcagcctcaggcttccagtgtgtcgggattcatcggaaccaacacaccgcgagcctgctgtaggagctcccctctcaggccacctggcc

SEQ ID NO: 266290 - DNA, 546 bp, Homo Sapiens
  misc_feature (131)..(139): n is a, c, g, or t
agtcctataaaatagagattagttccttccagttctagtactctatgtttctttctatgatcatcacttagacctccaatgaataaatcactcactccaatggaatagaaacattaagtagcaatctttcnnnnnnnnngaataaatcctgggcaaaaggtatttatgggagcaaagaaatggatgaattattttcaaaacatatatgttcccttagatggaagagttcctgggatgaaatttttgttttataggagactggcttaggaaacccaagacagaatgtatatctattcatttctaggtcatagtgtgaaaacttccatttggaaatctgggagcagttcttaagtcaaaaaacagacctggaatcacagtatccatacataccagttggaggacaaaagacattgccccagagaccagaggcaccaaaatacactacacctagctacctgagaatgcctctagctggcaactccagcaaaggcccttttccccatccttgaccatcttgagtggaatgctaagaactgctgggaggaa

SEQ ID NO: 266291 - DNA, 717 bp, Homo Sapiens
  misc_feature (268)..(395): n is a, c, g, or t
tgtttaccattaaccagaactctggaaatagatatttaatccccaaacagaggtgatggtgtgtctagaagcaatttaaagcctccatagcttgactagtcactttatcctgggcaactttttggattgtttggtaatctagaaacgagagagaacgctaattgcttcaacattaaagaaacccaccttctaggacttcacttcgttcccccacccctcctttatgttttctttcttgttcctctaagaaatgaaatatagaagacgnnnnnnnnnnnnnnnnnnnnnnnnnnnnnnnnnnnnnnnnnnnnnnnnnnnnnnnnnnnnnnnnnnnnnnnnnnnnnnnnnnnnnnnnnnnnnnnnnnnnnnnnnnnnnnnnnnnnnnnnnnnnnnnnaaatttaaaaagtatatttaaaccagactagaaactttcaaccacaaaaatccatggggtcattgaggtgcaaatggaaagaccaggagcaaaagtagagggagcaaaagtagagggtggggacagtgtggaggtgaggacagtatggaggtggggacagggtatggaggtggagacaatgtatggaggtggaggcggtggctgagcagagcaggaaagctgctgggggctgtgaggagctaggtttggctgggtgacagcaagggctggacagaaagtgctttcagaaaagcccaaggataaagtccaaagagattaaagg

SEQ ID NO: 266292 - DNA, 431 bp, Homo Sapiens
gcatgccctgtaatccccagcactttgggaaggaggattgccctgagcccccaggagtttgagaactgcccctgggcccacatagaccctccttccctacaaaaaatttaaaaagtatatttaaacccagactagaaactttcaacccacaaaaatcccatggggtcattgaggtgcaaatggaaagacccaggagcaaaagtagagggagcaaaagtagagggtggggacagtgtggaggtgaggacagtatggaggtggggacagggtatggaggtggagacaatgtatggaggtggaggcggtggctgagcagagcaggaaagctgctgggggctgtgaggagctaggtttggctgggtgacagcaagggctggacagaaagtgctttcagaaaagcccaaggataaagtccaaagagattaaaggtt

SEQ ID NO: 266293 - DNA, 577 bp, Homo Sapiens
ctaggatctctcaagaaaatcctcctctgaattggggttttgtctacattcaggaggtcaggaagaactccactagccatcataagttgtcctctttaccactccgagggaactatgctagctgtcttattcctctccaaataagaaagtctgattgctatctgaggaagaagcccccatcaaatacagtttctcaaatataaattctattttagtgggcaaaggctgcttatttgagcaatcacgattaaagcaacagcatttcctggaaataaaagtgcatgcagaggtgtttgggagcccaaagcattattgacaccagccggaaattaatctctagaggaagctcttcttcaagtgtctctgttaagggctaaacacaccctaaatgtaacttcagcatagccatgctaactgttcctcacactccctgagctaccagcctgagacaggcatcagcccagcagagcttggcattataggacatccatggaggcagggcctgactctattaggtcatctgcccaacttctccagactctgcatatttaaaacacacaaatttcctttccctcca

SEQ ID NO: 266294 - DNA, 435 bp, Homo Sapiens
  misc_feature (24)..(24): n is a, c, g, or t
  misc_feature (42)..(42): n is a, c, g, or t
gttaacaaggccaaggcgaaagtnacatttaagggtgtgttnagcccctaaacaggagaacacttgaaagaaagagcttccctcctagagattaaatttcccggctggtgtcaaataatgcctttgggctccccaaacaccctcctgcatgcacttttatttcccaggaaatgctgttgcctttaatcgtgattgcctcaaataagcagcctttgccccactaaaatagaatttatatttgagaaactgtatttgatgggggcttcttcctcagatagcaatcagactttcttatttggagaggaataagacagctagcatagttccctcggagtggtaaagaggacaacttatgatggctagtggagttcttcctgacctcctgaatgtagacaaaaccccaattcagaggatggattttcttgagagatccta

SEQ ID NO: 266295 - DNA, 553 bp, Homo Sapiens
  misc_feature (388)..(396): n is a, c, g, or t
tatatctctcaatcatgaaggtcaggaatttgggcaagtcttggcaattcttctcttaaatgtagcatcatcagctaatggtattcagctaataggcgggcaggactggaggattctaagcagctttatttacacgtccggtgatttggctaggaaggctggaaggctaagctcagttgggcctatgtctgcgccatggtctttccagcatgacggttttagggtagttggaatctgagcagaagctataaagctttttatgacgttctaagatccaagccttgttctgtagtcaaacaagtcttactaaggtcacctgaatttaatgtagagggattttggagggaataaccaagaataactaattaccacacaaggttattagagnnnnnnnnnctgttcctgattgttgcttttaggagaatgtcattagttcttggcttcttagggaatcttttccttatccctcccatctgaaggggattccctgtagtagagggatatcatgtacttctttttcagttcacttttataataatatttttccccatga

SEQ ID NO: 266296 - DNA, 890 bp, Homo Sapiens
  misc_feature (572)..(696): n is a, c, g, or t
  misc_feature (716)..(820): n is a, c, g, or t
attcttcaaagtttctcacttgattctctggtatttccagataaaaaatacgccatttgcaaaaaataactttccttctctaatatttatgcatcttttctgttttgcacttgctaggacttaaataatgaaatgttgagtgatagtgggcacagaggtcttgctccaactctcctggggaatgctaatgtttaagtatgattcccatttttagtttgagattttaaaaaattacattatttttaatttatgcctatgctattatttattcctattctgttaataaaggaaggcaaggaggacattaaattccctcaaaggacttttcaggtatctaatgaattgatctcatgctttttctcctttgacctatcaatacagtattaacatagagccacctttgtattcttagcatcttatttctaattatgatttgattatcatgaggaaaggacaagaacataaaggacaagaacccaagcctatcccaactgctatatcctttttattcagaatatcaaaaaacatggccgggtgcggtggctcacgcctgtaatcccagcactttggcnnnnnnnnnnnnnnnnnnnnnnnnnnnnnnnnnnnnnnnnnnnnnnnnnnnnnnnnnnnnnnnnnnnnnnnnnnnnnnnnnnnnnnnnnnnnnnnnnnnnnnnnnnnnnnnnnnnnnnnnnnnnncatcttggttattagatctnnnnnnnnnnnnnnnnnnnnnnnnnnnnnnnnnnnnnnnnnnnnnnnnnnnnnnnnnnnnnnnnnnnnnnnnnnnnnnnnnnnnnnnnnnnnnnnnnnnnnnnnnataattggaagcattccaatttgttctttggagaatactttcattagaaaaggtgaaaaacagttggaca

SEQ ID NO: 266297 - DNA, 749 bp, Homo Sapiens
aggtgggtgtgggactgggggctgtgagtgtgagtgtgtgcaagagattgctctgcatgtttgctgagggctggagctgggcttttcagagatcgggcatccctggtctctcagggccagttggaggttcccaggaggcatgttcttgatgcctgtggtgcctgaatccaattaactgaattctgaagagtgcatggggtaactgtctcagcctttctcctgtctctgcctctgtcctctgctccaaatcataaaatctcagagctagaagcactttcaagatcattccatccagcgcattcaatttgcaagtttaggcgttgagttccagagagggatggtagcttgctggaggtcccagttcaagcacacttgccatttgccttcagctttcccctaaacacggtgtctgtggtcagggttggtgaggaggagctttcctgttttgcctctccttcttcccattggctacacccatctctggccctgctgataccgattcccctgacatttcaggctaagccagcaggaaagggctaggacgggtgcctgggagcccacatggagggagttgggcaagatttgattcggagcaggtgtcaagacgtgttggggaaactgaggcccagtggaatagaagccagtagaggaggaatctagaggcctcctagattaaggcctgcctggaatggattggggggtggggtctttggaaaagggaggggacccacctctagcccagtctctca

SEQ ID NO: 266298 - DNA, 754 bp, Homo Sapiens
  misc_feature (323)..(323): n is a, c, g, or t
  misc_feature (460)..(460): n is a, c, g, or t
  misc_feature (683)..(683): n is a, c, g, or t
ttacagagaagttaaaccatctttattcgtggattgcaagattttgatcacagaaattccgaaagaatctacagagtattacaaataacaagggaacttagcaagatgcttgcatataaggtcagtatgttaaaatcaatattgtttattcttacgagtagaatataaaaaagtcaaaatgccatttaacattgtatacaaaacactaaatactcaagaataaatctaatgaaagatatatatgatctctatactgcaatctatccaagcacagctgcattaaaatatagatatatgtgcaacctacaaaatattgccaggangaaattaaagaccgcctttaaataaatggtgggggaagaatgatattcatggattgaaggacttgttgttaagatactagttttccccaaacagatctatagattcaatgcgagccccaataaaaaatccccccccntttttaacaagctaattccaaaattcacctagaaatacaaaggccgtagaataagccaaaacaatcttgggagaataagttacaggacttaaagatttattataaaactacattaaattaacatagtttggtactggtataaagttagacaaagactactccctcccgctccccaatctgcccccatccctagaacgtgctggcagctttctccatccaatcntgcaagggttaaagggcgctgaggaagggctgaccgactggggtgggaaacaaagcggcactgagataact

SEQ ID NO: 266299 - DNA, 205 bp, Homo Sapiens
  misc_feature (23)..(23): n is a, c, g, or t
  misc_feature (31)..(31): n is a, c, g, or t
gggtgtcttaaggggatttgtcngcggcttntcctgcctacaggatttacaggcgtgagctaccacatcccagcacatgtgtataacttcttaaaacattttaagcactgcagtaaatttggtctcaaagttgacacaagaagatccatggccaggtgtagtaagtagctcttgcctataatccaaacagtttggaggctgaagg

SEQ ID NO: 266300 - DNA, 769 bp, Homo Sapiens
ttaaaattaatgtttgctaccaaaagggggtagcagtgcctagtcatgtaggcatatgtcccactctgtcggtacagagggtaagcagcctcttcctttttaaaaaatttattatgatgatttacaaaaattgaagcttacaggataaacactcaacaaaaaagtagccagtctcaagaaaccaatttttatgtatgaattaatattattttattaatccatggccaggatgattcttaagattatttctcaattctctgaacagcttaaaagagagaaactccttcttttttatttacttgctttgaggttgatactctttaggtttttaacataactctctagctttgacaactcctcttataatttaaaatccttatagcttccatttacaagtaaggattatatctattttagtctcctcaatcagctacctaggagaagacttgccacttggaaagagaaagatagcacccactctccagttctcttctcccaaagttgcccgtatttcccttccctgaagccaatcaaatactttattgtttctcgctaagagtaatttttcactcttaagtacaaacagctcaacaaaaattcccggcagcataaatatgcacatcaataaaataattactactcacaatagactttccattacatatgtttcacaagcattggttttcttaaaaagaaccacgcatacagcactcaaattattggcagattctaactcagtagagtttgatttaatggttttacaatattt

SEQ ID NO: 266301 - DNA, 706 bp, Homo Sapiens
cttaatacaataaaattgaaataatgcacctagtaatgtggccgacatctcttctcaccaccatggactgttttcaacaacagttgatcttctggtctgtgctgagaggcgcatgcatgtctttcgtcacgtcgggcagcacacctgctgtgaaatactgctttcatctacctcttcagaaggcttcttgcttgttgacaagtaccgcaaaggctttattctggactggctatctcataaaaggatttctgtaagactttgcagtgtcattccctcagaacctaggtttgtttctaaagccacggtattgttccaggagcccctgtgtgtggggcaggtagctatccctcccatgtcattagtaatcctttaggattttaaggtacaactggacagcatcattccttccccttattgtgccaaatccccaccatcagccttgccattgccttaagatttgattattgcacccaattacctaaccactaaacagaaaggccaccttcactctttgaaaaaggcaagctgtgcttagaaacactgcttttaagagtagcacatttgagtgtgactttttccccccttcactatttcaaaatggttttgaaatggggtcttaaaggtaagcgccctcatacatgactgaaactttgtgagaggtcttatatttgaatggacccttaatgatttatgtgaaatagaatga

SEQ ID NO: 266302 - DNA, 768 bp, Homo Sapiens
  misc_feature (13)..(13): n is a, c, g, or t
atttcggcacagngtgtgtttaatgacactttcccttcctgagaggcatcttttaaatccagtctcttgatttgtgccaaatagaaacccaaaaaagacctttaatcctttgtccattggatgtgatgactttatatgtaagtgtagcttcagtttattttggaatagtgaccttttttttaatatactgttttatgagaggaaataaactccttccagaattttctcacttaaaataacttcacatcttaattacgaataggataaatatctattgtgaactacatgagaaagctgacccaactcgaataacctctacctgggtatcctttctgcaacaatccaaataagttaaaagagtttttgtttaggataaggctgttaaaaatgattaaatctatctttgggtcctcagttggaaactaccaccactcatttgattgtgattctcattcttagccaaagaatatcaaaaccaaatgtgaagcttttcatacttacagatgcctgggcccccatccctggtggttttgggtctggcatagtcttcaggcatctgtttgcattaagttccattgccagggttcagacctgccattggggacccagtcctgttttgttctcaacaaacatttattgggtagttaaccatgtgccatgttaacctgtgttaaatgctaggaatggaaaaatggagtatgttccttctcaggagagctcttagacaacaagcaaagaatgtcaatgaaattttttaagtgctcagtg

SEQ ID NO: 266303 - DNA, 559 bp, Homo Sapiens
  misc_feature (125)..(125): n is a, c, g, or t
cctgttaccagaggtggttaccacaggcgtatccatttacccaaattccatccggacttacacttaaaatcagtgcatttttcgtggggcatggccacaagcacctggggtcctgtgtcctagcntactcccaaaggccaaggtgggaggattgcttgagcccaggagttcaaggcctacagttagcctatggatcacattcccattgcactcctagcccgggtgacagtgtgagaccctgtctgtaattcgttctgtgcattttattgtctataaattgtgtttgaattttttaaaaattttaagttgtatttaaacaaagagaacctatggattaaaagactttaaaataatagcaaccaatggaaatacatgactggaattctgatgcgaacaccctattaaagaaattttttagagactattggagattgggcacagtagctcatgcctgtaattccagtactttcagaggccaaggtgggtggatagcttgaacccagcagttcgagactagcctgggcaacatagtgaaacccatctctattaaaaatacgaa

SEQ ID NO: 266304 - DNA, 360 bp, Homo Sapiens
attaaactgaataaccagagttatagcagggtagaagagaatgtagaacttctcaccttttactttcttagtgcctgtgaaagtgctaggtttcacagagttattttgttgaggtatgtcatagtgaaacaatggagaatgcaaatgcaaatacattaaaatttttagccagtaaaaccttgtttttaaactccaaaaagagaccatctctatcctgaataattgttgatatttcaagaaaatgattattgtctgaaatagtttttttattggagacctagtttattttacaagcatctatctctgcaacttttattctagttaaaagaaaaacttgaggccaggcgtggtggttcacac

SEQ ID NO: 266305 - DNA, 775 bp, Homo Sapiens
  misc_feature (27)..(27): n is a, c, g, or t
aagacaatgggatcaggggagaatccncggtggaaatcctgggctggttgtccacatgtatgtggggcccaatagccactatccttgatgggtggggcccaccaggtgagtatggggatacccccaaaatgccaaaagttctggaagaactgctgcagggggtggatccaactaagggaaagtcaaatgcccaagctgtggcagctgcagttggctggccagtcctgactgtgcttagagcagcccccaaggttgagcttgtggcacaggcaagggtgtaccacttacaagatgagctgcaactagggagatattagctcaggctaatttctgtcccacctgtgggaacaggatgacaaaatggagacactggtttgttgcatagcctgtttgaaagggtcactgactgcccacatggagttaggactatcatgactaaaattgtcctggaaccctaagtcctgggaccccgtgaagagatctagtggcagggaggatgaggactgggatgagtcccatagaggttcccatcctctcagcatgtctgatggtcactaccaagataaaagaagaccaaccacacccacagagggtagccctacaagacttgcctccacctgaaagaaggcagaccaccacaatgcaggattataccgctgtggaaatggtgaagctgggaagtaagttcaaacagagtgggagacagtcgatcccaccctccctgggattttacactctcccacttagtagaaatggattttgaatgttcccgatg

SEQ ID NO: 266306 - DNA, 420 bp, Homo Sapiens
  misc_feature (82)..(115): n is a, c, g, or t
  misc_feature (148)..(181): n is a, c, g, or t
  misc_feature (274)..(274): n is a, c, g, or t
  misc_feature (366)..(366): n is a, c, g, or t
  misc_feature (380)..(380): n is a, c, g, or t
  misc_feature (386)..(386): n is a, c, g, or t
gctaaagcaattagtgtgcctcagccttccaagtagcttgtaccacaggcatgtgccaccatgttcagctaatgtttctctnnnnnnnnnnnnnnnnnnnnnnnnnnnnnnnnnnagagacagggttttgccatgttgcctaggctgnnnnnnnnnnnnnnnnnnnnnnnnnnnnnnnnnntgagacatcgtgcccagcctatgatattttctagtttatttcatcttgttttaaatgctgataattgcctaatttcataacccactagtgggnttatgacctgtagtttaaaaactactgtaggaaagaatatagacaaaccaatgattagagcacagtttaatagcctctatgatagatgaaangcagaacacttagnactaanagagaataaaggaataaccaagccagctctaagc

SEQ ID NO: 266307 - DNA, 945 bp, Homo Sapiens
  misc_feature (614)..(894): n is a, c, g, or t
caccctggcctcagagtttttaacctaccttctcagtaactaatagaaaagctgacaaaaaggtcactatagatatgaaatatttgaaaagcaaaattagttttatgttaatgaatagacatgtagactactccaccccaaaactgaagaaaacacatggaaaagcatatatttacttaagaaatgatctcatactagtctgtaaagtagcctcaacacatttcaagcaattggtatcacacaagaccatattctttgacaatgtaattaagctaaacattttttaaaagactagaaactttttagaaaagatttaggtaaagggaatatttagaggaaattttgcagccttcaaagcatacagtaaagaagaaaagaaggcagattgggtacaacacatctaattttgttccctcctaacacgtactgatatagttcaggacacacacactcactgccaaaatatggcaccctccatccatttgaggaaaacagcagaaaccaggaaggacttttcccacacatctccccacgaagcaggttgtaaaacctaggaagaatttcctaacgtcccctgaagcaggtcgtaagattctcatgtgagatttgcactnnnnnnnnnnnnnnnnnnnnnnnnnnnnnnnnnnnnnnnnnnnnnnnnnnnnnnnnnnnnnnnnnnnnnnnnnnnnnnnnnnnnnnnnnnnnnnnnnnnnnnnnnnnnnnnnnnnnnnnnnnnnnnnnnnnnnnnnnnnnnnnnnnnnnnnnnnnnnnnnnnnnnnnnnnnnnnnnnnnnnnnnnnnnnnnnnnnnnnnnnnnnnnnnnnnnnnnnnnnnnnnnnnnnnnnnnnnnnnnnnnnnnnnnnnnnnnnnnnnnnnnnnnnnnnnnnnnnnnnnntttaggggtctcagccaccaacataggacgcgcaagaaaaatgtattttgc

SEQ ID NO: 266308 - DNA, 778 bp, Homo Sapiens
tagctagggagcaaaatgcttcctttctagaggttgaaattatagtaagcaagattatccatcattcatttggaagatgactggggtggaggcagcatgagttgtgttgctggggcagacatgacataaagggtagagtcagtacacatacttgcaaagatgtagttatgagacctaatggggacctctctcctgtcttcctgtcctgtcccatctctccttccttcccctcctgtcatctccacatgactcccctctaatcttctctcctgctccgtttctctaccttcttcaactttagatatttcacatatctttccagggggattgagaaagatccagatggatctaggctttattcaatatcttttttttaaccaatatagattattgtgtacacccctgtcctagacattaatagactagaaaaaggcacaaattatacatgtcaactgggggaaaatgagaaggtaaaaaattttaagataaagggcagggaacaaattgtcatcgtcagaaatgagggatgtttaaggggttagtacccatttttaatattagagaaatgataatcctcaaagcagctttgactccatattgctgttgctcaagtagagtaactagaagctgagtaaagctagaagttgtgtgttgaaagtgttgctagaaaaatctgcttaagcagcatgagtgtctagcttcccaaggtaactatggaaaaggatgcaatagcaataggaatgtgtaagttctgggctgtttaatatagttttctcag

SEQ ID NO: 266309 - DNA, 887 bp, Homo Sapiens
agtttgcatttgctgtaccctcccctcagccacttttaatttctacggttaaagtaatgaatcacagctgtggacagctaatctgtatgcttatcacagcaaatccgtatgctttgtattttttaacactttgcatcccaagacaagccataaaacacatttacatagagctgcacaccaagactaaaattatggtgttagacactagagccttacaccaagaataaaattacataaaacactaaatttccaaattgacaaaaacaagtagggaatacagaatcctgaatttttaaaggaaaaaaatttaactttttcaaaatattccttaggtaatatcatatatctctgcttggaaagtaacttgtatttcccctgcagttagttccttataaaaatcaccttatctggcctctttcaaggttgtcctccccttattctgagtcaggtaacctctgacccttaaacggtaaagacagactgatccattcttggtgaactgctaaatccattcccttcccccaaacaggcatgactacttggacatgtcaaccaatccttaaggatgcaatgaaacaaagcaaatccagtggctcattaagacagtacaagagacaaatgcgacaaaacgtcaactggtgaacattcacaggattactaaacactgcagaaattctctaacaggatttttttaaccaagtttgtgtaatacaatttcatgaattatgcaaataaaggtttaggctattcacagaaaagcccagtgttatgttactttcattgcatagaactgagaactgaacacatcaatcacaaaagtcacaggagacactgctgcattcctgcttgctgatggctctgttgaaacatttccatttcagacaata

SEQ ID NO: 266310 - DNA, 679 bp, Homo Sapiens
ctttttagacagatgtcagcaattctgttaccttggcaatcattacatacaagtatactttatatgcttgccagactaataagataattcagtcttagtgtagccattctttactatctaatgtaaattaacacatgactggtgaaaatccaaaatctaaagctagaaccaaaacagtcataagctactctgagacaaataccacaaacagcagtgcccagaatttctagtgatgtctcggtctaatgaaagacctatacagttaattgaactgtttcttagcccttctcagaaggctgattttacccagattaaatccaaacccaatattgtttttttcctttatatccagccccagaatttagagttattgatttgcttttgtcagtaacagagttagcagtgtgagtcagcagcctctgaacccctcaggtaggaagactgtagaagggtacttaaaaaagcatttattactagaagactgaatgagattaacttaaaaaaattaataatatttcagttagataacttgaaaacaagggccccaaatggtaatcttttagataatttggaaagtagggtttatcgattgacatgacatatcagcctcactaacacccaagataacaccgtcttttcaaaataatcagtaattcatatgtaaatagcaacacaagct

SEQ ID NO: 266311 - DNA, 377 bp, Homo Sapiens
gtgtgaaccactgcaccaggcctgcagtcttacttttaatcttacacaggcctactttttctcatggttctcttctcatctctgaaataggaatcactacctggcacataatggactggtacttaacaagcagaccatgtgtagaccacccatcctgaaccaagattcctgggcaaggctcttaattcatctgttactgaacaaaagcaaaactgctccacacatgggccacataatatagccacttgtttatttaaatttttgacctatgtgataaatcctgatgctcagttgtctaaaaatgtctttgtaagcatctgaatatacctaatactgaaataagagtttaaaaagctgacaacacaatccaagtttta

SEQ ID NO: 266312 - DNA, 939 bp, Homo Sapiens
  misc_feature (579)..(579): n is a, c, g, or t
aaaaatcctggataaaatgaaatgcattcccttcaaagcatggatacaagaaagcacgaattctcagaaacgcaaatagatcattacgacactgcagccagctttgaccctgagagaatttcttgaacctggtaaccttgagcttccatgttgatggctctgtggagtgcagggaagagatgacgaagtccagggcccagccaaagtaagggatcttataggaaaccctcccctgccacaaagctggagcccccaagaggccacatcttcatccatgggtcaactagaattaaatacaccaccaagaacatattacccctcacagaccaaagggcctgcaaggattctggtgctgaatggaagtggagggactgggaggagccaccactgaaagtttcacctgcagactggccctccaaggctttgcattgtgaacgctcacttcctcaggctcataatttaaaggactcttagactctaatgccctacgcacttggaagctgcaaactcagataggctctggagggatctacctcattctgggcctcaaagagttctcacaaatgaaattccaagganaaataaactgccccttgtcaaaaataaacatacaatacacaaaaccccgcaatcaagaaaaagatcagcaaggatttcaaataacagaattatcagataggctataaaatgaatatgtttaatacatttaaagaaaatcaaatataagcttgaaaatattcgaaagggataggacactgtgaagaataagaaagcaagttttaaaagcaaatatgccttctagtaatataaaagtgattattgaaatttaaaactcagcatgtgggtttatcagcagtaagatgcagccaaaaggagaagtaatgaattaaagacagatcacttcaacaaggacactttactgcttttccccattagaaa

SEQ ID NO: 266313 - DNA, 501 bp, Homo Sapiens
  misc_feature (424)..(424): n is a, c, g, or t
  misc_feature (462)..(462): n is a, c, g, or t
aaaatcctggataaaatgaaatgcattcccttcaaagcatggatacaagaaagcacgaattctcagaaacgcaaatagatcattacgacactgcagccagctttgaccctgagagaatttcttgaacctggtaaccttgagcttccatgttgatggctctgtggagtgcagggaagagatgacgaagtccagggcccagccaaagtaagggatcttataggaaaccctcccctgccacaaagctggagcccccaagaggccacatcttcatccatgggtcaactaggaattaaatacaccaccaagaacatattacccctcacagaccaaagggcctgcaagggattctggtgctgaatgggaagtgggaggggactggggagggagccaccattggaaagttttcacctgccagattgggccnttccaagggttttggctttgttggaacggttcaatttncttcagggttcttaattttaaagggattttttaggatta

SEQ ID NO: 266314 - DNA, 528 bp, Homo Sapiens
ccctggaaatggaactgctcctgtcaaaaggtatgatagaaaaaatgttacagctattcccaaattgccctcggtagacattttgtgatgcatacccaaatattcaacagtgtctacatcttctcactaataaagcgttagccttaaaaatatccatattttgaagtacctagcataatagctggcacacaaaataacaatcatcattttaatcgtgactagcgctaaactttttgatctttgcaaatgtaaaaggttaaaaaatattccactacagtttcatttgcattttcttcttaagagtaaagctgagtgtatttccatatatttaagcacttattaaaatttttcttgttttgtgaattagctgtttgtatgtacattttggccaatttatctaatgggttgtttgattgaaacatttagtataaatgattcttatcataattgcttcacagattcttagtaacatcctatagttgacttttaaaataaataatcttaagcatttagaaaagttaagtggaa

SEQ ID NO: 266315 - DNA, 786 bp, Homo Sapiens
  misc_feature (71)..(220): n is a, c, g, or t
  misc_feature (735)..(743): n is a, c, g, or t
gaggagagaggcacaaggtatatctgcagaagtaaccatggatttaaaagtagctacagcatcaatttaannnnnnnnnnnnnnnnnnnnnnnnnnnnnnnnnnnnnnnnnnnnnnnnnnnnnnnnnnnnnnnnnnnnnnnnnnnnnnnnnnnnnnnnnnnnnnnnnnnnnnnnnnnnnnnnnnnnnnnnnnnnnnnnnnnnnnnnnnnnnnnnnnnnnncttaccataggaggccctgccgaagctggcacgctgcatgggagctatccttaaatgccactcagaacactctcacagcctgcagccttcagaaggagagtgtcgcatggtctagctgctgagtgaccgctgatcaacagctggcttcaccttgcatcctgactcctgggagatcttcctctcccatctctcttcccttctttctctgtaggcgcagctgtcaggatcaactgaacccctggggatggctgtctttagagaggagctatgtggccttgagaaaagctgggtagatggacggcctgtccttggaaatgggctctctgcaaggacaaagcctaggagactgttcctcagggtgcagagcacaggcttgcctgtttatttaggtgtgaacttggagtcaggacaggagtttaatgaacaggagaaggaattttgttgagtttgtggccttatgctgattctttttgggatgttgagtagcatgaatagagaaatctttgatgagaagnnnnnnnnncagttttagtgaagtaaataaatgcgggttcattttcatttgt

SEQ ID NO: 266316 - DNA, 405 bp, Homo Sapiens
  misc_feature (234)..(337): n is a, c, g, or t
  misc_feature (345)..(345): n is a, c, g, or t
  misc_feature (393)..(393): n is a, c, g, or t
tcggcacgaggtaggtataagtagtaggtagggtaaaggtatgtataagcaggtataattcaaaaggtatatgaagtacagcgaagtcattgtgttagataaaagcagaaactacaaaactgtaaggttttgcttattttgtcaacgctctgcttctgtttttggtgttctgtggctctttccgccgatcctttgtctcagcctcatttgtaagtgacttgttttttccatttnnnnnnnnnnnnnnnnnnnnnnnnnnnnnnnnnnnnnnnnnnnnnnnnnnnnnnnnnnnnnnnnnnnnnnnnnnnnnnnnnnnnnnnnnnnnnnnnnnnnnnnnagatggantctcgctgtgtcatccactgcattctccaacctgggcaacaggccaanaccctgtctcaa

SEQ ID NO: 266317 - DNA, 585 bp, Homo Sapiens
ttggcctgctgagaaatgagcggctcctccccatctcacccccagcacacgcagggactactacctgagtctgcaaaacacatagcatttttgtccgtggatggtacacaaagctcaatctttttgttttcttctggggaaaaaattaaatctttatatgttaatatgattgatattcattgtgcaaaaaaaatcagtgtgtttttaaagaagtataagggaaaaggaaaactcatatgtccttctgtcactctgagacatacactggtaacatctgtgcaagcccctttccaggattctgaatgtacagtatatatgaatgcatacacagagaaatttacattcaagagtgtactatacttgttcttctataacatcagaaataggtttttacctcagatgtcttcatgtcggtaattatagaactacataattatttttatagctgtattatgtagatttaacaggttcctcattgataaaacaatgtttttttggttgtttattcagtatctgaataacgtttctatggacatccgtaaacatgtatgaggggacttttaaaagttcatggaaaatggaatt

SEQ ID NO: 266318 - DNA, 500 bp, Homo Sapiens
  misc_feature (420)..(453): n is a, c, g, or t
atctgtccagaccaaagtttctcatattgttttcaatatttttgttttaaaaattcctctatgaccaaataagcttgagaagaaactatttaaaggaaattaaatgtattttcactggagaacttcttagaacctttaatatactagactatattactaaccttcaagaagaataggcatgtaaataaagcatttcccaaactttcttggtcttggaggtctttttttcagacattctcataagactaatattctttaaaacttcactttatgggataaggaaactgatacccaaacaactatggggatttgagtttcctattaggacagtccagggacttttttattacaccacactttctctaaggacttttgtgctgcttggctaattttactcctatagtaaaattgtgagagatnnnnnnnnnnnnnnnnnnnnnnnnnnnnnnnnnnctgtcaccatagaaattatattacctatctaataattgcccatatta

SEQ ID NO: 266319 - DNA, 266 bp, Homo Sapiens
attcggcacaggcctgttttgttttagaaactactgttctccccaggattaaaatgtgcaggaagcattcatcccacccttagtttagctgatagccttacccccctcccttttgtttttttgtggatctgaacttattttacccaatggctattttcttgcatttccctctagaggtattggcatttcgagaagcacttcagccttccagatctttacataattcattacggacatattttggacttacagtatcttaggagtac

SEQ ID NO: 266320 - DNA, 1398 bp, Homo Sapiens
  misc_feature (850)..(850): n is a, c, g, or t
  misc_feature (1170)..(1190): n is a, c, g, or t
aaattattataaagaaggacctgaaggaaatgatattcgaaagacaaatgtggctcagatccggatggcattccgatatgagaccttatgcaatgagctcagcttcctgtctgatgctatgaaatcagaagagatcaccgccttgaccaactaggtccagcatttgacatgcattttaactttttggttcaatttcaagtctgctgtggctaatagtggtcaagattccgaactaggactttcctctgtgaagaggatgcctctgaagaaattttaaactggtgattttggttgcactgctcactttaagagttaacatgctcacttgttagtatttctgagtaacaagatggtgacttctccttggggatctgggagctgagcacttgtctatacttgttcctaattttccaagtatttctcttgaaactgccagtgcctgaactgttggggccaggattttccctggtcagatgccaagtaacatgtggttttctgccatacttttctccattggcccaggtaggctaattggtagttgttcatttcagcctctggatggctggctgccttaaacacaatcaatttcaaagctccatttcataaaggggctactttgaaggagttaagatggaagacttccttcttgacaaattgtgtttttagtgaatttcttaaacccgttttatttagccctccttccctctttctagttggaagccaaatgtactcatgaaaacagccactcctattctgagtcttggtttcttcacctagaaagtgagggtttggactagatgagtggctttcagggtgttctgtgaatctcctcatgaatactttagggtangggagggaagggagtgagtgatgctcacggggctgtcaaagtgactgcgttcatcacgttctacaactggggctgctacataatattttcatttgaacgaagaacttcaaaaagcacaggactagatgatctctgttccttttggctctaatatgctacaactgtaggccaattatcactttaccaattaagagttaggccagataagtgaaatttaacttaagggcacacagctaataagtaataggcctaaactggatttccttattccaaatcctgtcttttccccactattccattagaccccacaaatgttagtnnnnnnnnnnnnnnnnnnnnnttttaatcactgtaaccggatgcatttttttaaggcaaaatttctcccttatctactgtgatgacttcagaagatacaatggtcccaggggccaagtagaaagcatttttaaagattaatctgaattaagctttatcagtgtactctttatctgtgttactagtgcctggtatgtagtaggtgctcaataaatgcatattgaataact

SEQ ID NO: 266321 - DNA, 706 bp, Homo Sapiens
gcttaagccacatccttcagcaagtgagtgttcaagtggagggtttgtctttgcttggggcacgggcggttcatccacagtgaaaggagagaaggcagggcatgtggggttggctgtagaaagcgggcagacggggtgggaacttatgaagactcttctgattgttattttctctgttaagtaaaaggaaaggtcattggctaagaatgaagatggacgcgcaggtgctgggagtcatcgaagagaatgaaagaatgaataaaatagagaaaaatacaatgctattatataaacctatacatttaaattactttcctcttcaaattagaccccctggaaggcaaatctctgtcatgttaagttttaggaaaagtcataatctacttggagctaagtatgaagaataaggtatatgatttaaaccacataattctatttttgcttaaaccggggaagcctttaaggtaacgtagagtgtaccccattaaaaaagataaaaatgtcagcttccccttccctttaaatatagtaaggctcaaaggtaattgatgttcataaccctaaggtactataacagtctgaagcaaaatattaaatgtcttctgtagtattttagttaacttttaattttattggtaatttatgtgtagttaaccacatacttgtgcctcaactatttcacataaatgtgagatgtcttaggcct

SEQ ID NO: 266322 - DNA, 1196 bp, Homo Sapiens
agctcttatatctagcctgatgctggagctcttgaagctgactcttggaagtttggagggtgtagagtttcccatctagtatttaatttgtccctgtgccattagtcccagcttgaagtcatttgccagtgtcgatgttgacaggattgtgacaatattgcctttcataaaaccgagaaccaaagaattccattattctaacaaagcctgagtttcatagattgtgggcacatctagacagatatgtgcatgcttgatggtgcagagaaactgctgacttccaccaacctcatgctccccctggctggccatacagagggattcgttgtcatattgaaaaggctctgaaagatgagtttctaattgaagctcactatctcaggttggtgtttctactgtgtagtcccaagcctgtatccatatcataaaagtggaaggcctggtactcctccaggttatctggccagtgtagactcctccatcttgaatatgaacctccagggtaagaatttttcagacatgtctatacctgaacagtaggatcctgcactttccaaatgtctgcctccttttgttcttcattgacccattctaattcctgttaggtgtgagaagaattgtcttcagttctctctccattctcattcatgatggaatcattgatccattgaccagttgagaaatgattgatgctgaagaagtgggtattctattggtaaggcttattaccaaacttccgataatgaagcaggctaccaaaaacttatcccagcccaccctaggagtgtttggatttgatcatggatgtagcatacaccaaaatccaccgagacctttgcaaaattaggctacttgttttattttgcccagattatcatgggagagtctttaactagttctgaatatttgtaagtctgagtacttcatagaattataaagaaggtacagctgaccccttctcaccatgttgtaaatatttactgagactgggtgcagtactgagggataataatcttctgatttatcaaatcctgactgtctagagcaaattgtacactctctttgtgaatggtcctgtaacgtgtatgaacacatttctgggtgccttagaagttgtatttttcatgtgtgctaatatgcagtatttatacattgtgagaagctgctttgaataaaaaggttgaaacttcaaaaaa

SEQ ID NO: 266323 - DNA, 758 bp, Homo Sapiens
  misc_feature (417)..(417): n is a, c, g, or t
  misc_feature (422)..(422): n is a, c, g, or t
aagctgtatgacaagaacttattaaaataaaaactcatcacttcttggccttttggctaagatcaagtgtaaaagaaaaactcatctacgattactcaacatgctgcaggaaggaaaatttcaacacatttgtgaacaagctgtaccaatttgggaactgaatggtgaactgaaataaattgtgcaaatgtattttctaatcttacaaacttaaaagtgcttcctttgtggctccctcctgaatttactccttgggttcgaagttccctgcaaggaagctttcattttctgcaacaaaggccccagagagagctaatataggtgacaatgccataagccacatgtcccggaaggctgccaatcacatgtaaccaccccatctcttcccacaatggggctccccaacccaaacaatgnaatgnaaacagccccaactgttggtttccttcccctgtaaaccccactctgcccaacccactgggggtcccaaatcactacgccctctcttcccatctcactaattatcggctgacaaggttaattctttggtcaacaggaaatgaacaattgcaggtttgaaaaactgccaacattggaagaaaataaatatctccatattctccaagggggagcctgttaaagatgagacactagaagaatctgggcagaacactttttagtttttgtcaaataatggtaaatgtgcaatcatcagaagtttggaactaaaactagagatgggataacttacagtactg

SEQ ID NO: 266324 - DNA, 571 bp, Homo Sapiens
  misc_feature (519)..(519): n is a, c, g, or t
ggccgcttaattaaatgagaagatgaacgagagatggctttacagtaacacactccagattcttactcatcccagccaggaaaacagtttcaatattgctttctttcacaagacttcccatgatgtactgaaggagtagtggaagtggaagagacaaggagatgttcttctccactggacaaggccacatgcaggggtgggaaaaacactggcatggaagctgcaggtgacttgtagcaagtcacaatccttcctgagctctgcatgcccatctgtcctgtgggagtcccttgtcctggtccctttggttgctgggagcctcacagagtcatgcttacagtttgaaaattgtcaagcctaggtgtaaggtcgcatttttctgtttgggccagtgccttatgcttctgataggagcagcagagggaagaggcataagatgagcatgaatacagttggtgtctgcctgcctttgtcccagcaggctcttccgacacatcttgggtcttgctgcagtgtcgnctccccaggggaataatctgggagggtgcagtgagagatctggaaaaaatat

SEQ ID NO: 266325 - DNA, 718 bp, Homo Sapiens
  misc_feature (22)..(22): n is a, c, g, or t
atctaataaatttaaatatcanctattaagattaaaactctggaaaaataggcaccaaattttgacagtggtaacctatgagattttagaggacttttgcttgtgtttcctttgttatcatctacttatctgtgttttccaattggtttataataagcaggtactatttgggttaaaaaaacgtacttaataagcatgagatttggggtcatggaattaaataaagtgtctcacacaagacaactcaattttggtccccacgaaagaggaaataaaggaaatcacccccataaattgtatgggtagaaacttgaaaattgccttttgataaacgtgatataatccttgccctttatctttcaaatttatgttatttatagcagatagcataggacatttggattatacaagaaaaaaattaaatgttaacttgaaatgtaaacatttacagagaaagcatagacattcttaagttccttatttaaatacacttttttcctttaatacaactgttattttatagcagaggtagaatgctagcaatagcattctttattagcctagtatcttaaatttggaattgacctgagccaaaactttttaaataaaagagggaaactaagttaaattaggtttacatttacaaagtctgctgtgatttgtgatttgtaaaaggggtagaggagaagttaaagactgagagtcttacttgagttag

SEQ ID NO: 266326 - DNA, 792 bp, Homo Sapiens
  misc_feature (698)..(698): n is a, c, g, or t
  misc_feature (719)..(719): n is a, c, g, or t
  misc_feature (725)..(725): n is a, c, g, or t
  misc_feature (781)..(781): n is a, c, g, or t
caatcttgtgccaaaatgcttgtgaatcgagcattgggccgctggaggcagcgtatgctccgagcagataacactagtgccatagtaatctgcatctctccagaagtggacaatcagggaaactttaccaatgaagatgagttatacctgaacctgactgacagcccttcctataatagtcaagaaacctgtgtgatgactccttccccatgttctacaccaccagtcaagtcactggaggaggatccatggccaagggtgaattctaaggaccatatacctgccctggttcgtagcaatgccttctcagagaattttttagaggtttcagctgagatagctcgagagaatgtccaaggtgtagtcataccctcaaaagatccagaaccacttgaagaaaattgcgctaaagccctgactttaaggatacatgattctttgaataatagccttccaattggccttgtgcctactaattcaacaaacactgtcatggaccaaaaaaatttgaagatgtcaactcctggccaaatgaaagcccaagaaattgaaagaacccctccaacaaactttaaaaggacattagaagagtccaattctggccccctgatgaagaagcatagacgaaatggcttaagtcgaagtagtggtgctcagcctgcaagtctccccacaacctcacagcgaaagaactctgntaaactcaccatgcgacgcanacttangggccagaagaaaattggaaatcctttactttatcaacacaggaaaactggtttgnggttgctgaaa

SEQ ID NO: 266327 - DNA, 561 bp, Homo Sapiens
tggcctgggagacccccaaaggaaaagtgtcccctgcgctgctcctgctctaaagacagcgccctgtgtgagggctccccggacctgcccgtcagcttctctccgaccctgctgtcactctcactcgtcaggacgggagtcacccagctgaaggccggcagcttcctgagaattccgtctctgcacctgctcctcttcacctccaactccttctccgtgattgagggacgatgcatttgcggggcctgtcccacctggcagtacctatctacaaagggcccggataaccagagcctgattctggctctccctgactcatagaaacccaggaagggtgtacagaagtcagagacaagaaacgtttcaaatgaccaggaaacaactctgaattagcttcatcgaggacaatgagattggctccatctctaagaatgccctcagaggacttcgctcgcttacacacctaagcctggccaataaccatctggagaccctccccagattcctgttccgaggccttgacacccttactcacgtggacctccgcgggaacccgttcca

SEQ ID NO: 266328 - DNA, 693 bp, Homo Sapiens
  misc_feature (33)..(33): n is a, c, g, or t
aaattagggagactggactgaggactctaaagncttcttccctcatctgatactgaggaatctccgatttgtcaaacagctatttaaaggctttaggtttcaaatcctgcctgacgctgatatatagttaagaaaacaaaggaaagggacccccacgtcgtctttcccagacgtggaggcattccctgtgtgtctctttttctccctccctccccactcctcttctctcccctactcctgccattagcatcactctgtgatccctgacacagcatccccagccctgtcctagagccagggccagtaactcaattagcaacccccagccccagctccctcccctcccctgtgagggacatcgaggagaggagaagaatcggtctgcctcccgaccaagttgctgggaggggcaggggttcaccgagccttgtggcccctctgtcaggctgctctggcctgctctgagccaaggcgagaaaggaaaacaagaagatgaatcgccacgtcttcttggtggaggttccgatgagactttagaacaacagtgactggaaagaaaaacagcatctgctggaggagagggggaagaatgggctctgctgggagttgcatttattattatttttctttctaacaacgtgaaatcataatagatgatccacctctcaccttaaaaaaattaaaattaagaaa

SEQ ID NO: 266329 - DNA, 352 bp, Homo Sapiens
  misc_feature (117)..(117): n is a, c, g, or t
aacctggggcctgggggttgccctaaattgaagttaactggcccccctggcctcctaggaacagggctggggaatgcctgtgtccagggaatcacagagtgatgctaatggcaaggnagtaggggagacaagaggagtggggagggagggagaaaaagagacacacagggaatgcctccacgtctgggaaagacgacgtgggggtccctttcctttgttttcttaactatatatcagcgtcaggcaggatttgaaacctaaagcctttaaatagctgtttgacaaatcggagattcctcagtatcagatgagggaagaagctttagagtcctcagtccagtctccctaattt

SEQ ID NO: 266330 - DNA, 804 bp, Homo Sapiens
  misc_feature (300)..(300): n is a, c, g, or t
  misc_feature (710)..(725): n is a, c, g, or t
gaaagctggcaacaccatccaggtgtgggctggtgaagggtctaaactgtcagtactcactactttcccaccagggcacacgagatgaagggccgcttctgccaagcaagtgctgggattaggcaaaattatgggtgcacgaactggctgcaacccctgtctctcctgctcaaagaagcattctggaatggaagggagtggggaagagctgactctgaattttacccatcatttttttaaaattctcaaactttcagccctgtaactttaggtgttgttggggcacacatgaattcgctngcatgccccaaaccagtcccaacacttcatttgagacgttctggcagttaagttttccagttactgtggctgtataataaagtgccccaagatatagtgggttaagacgacgatgatgttattttggccatcactctacaatttaggcagagcgccgcaggaactgctcatatctgctccatttggctttcactgggatggctcaaaaaagtgggagtgtggggtggggtcatggaggtgggggagtcaaagcacgtgaaggttcatttactcagctggggttcccactgtcacctctattgcctatgtggtctaaacccctcctacatggcctctgtattatggggtgtcccagggagctagacttcttgtacggcagctcagggctccaaaggtgcacgtcccaagtnnnnnnnnnnnnnnnnagcaggtggaaaccttgccatgttttctaacctcaccttggaaatcacacagcatcatttctgacacattctgtccttc

SEQ ID NO: 266331 - DNA, 771 bp, Homo Sapiens
cattaccatcacccctagttggttgtgaagtgattgcctcttatccctgaaaggaaactcctgttctgaaaagttgggatgcattagccatcagtgttaggtgacgtctgttgtagtctgaagagtccttaaccttgattaaggaaggcttcctgggagaggtgggcttttggggcaattatatgatagagaagagagagaaaaatggcagatggaagtgggagacaattccacacacagggggtgggagaatgatgtgggaggcagcagtgggtgttaaggacaatggtgccaagagatttatttggctaggaacacaaggggcagctgggtagttaggagtgggaggatggtaggacagtctgacagaaaccttggaaacagttgaactctgaaaagctgatggcaaatcagatttcatgaggaaaatggcatggttgaaaatagtaatagaaaaataagactgaagttttaaatgactggatttttgaaagtaggattattatttctttggtataccgaactttgcaaagatacgtagcattgcatccttcccctttgcttctagacagggttggccataaaccaactacactgatagaggtctctccagattgtctcagaagagagagtttaccctgaaacttaatgacatgaataaaacctgtttactgaaatttttattgcaatttaacgttaaaagtttctgctggagttttatgcatatttttctctctaagtggtgggaaataaagaacaaatctctttcca

SEQ ID NO: 266332 - DNA, 705 bp, Homo Sapiens
caagactctgtctaacaacaacaacaactatagctatagatatagatatataggattaactgcatatcctatcatgcatttcaattattatatattaaatgttctctctttagtatttcacttcacatctctgctggattgaggatctcagggagtgttttacagctaacgtgtgccagacttccccatctcagtcccattctagggccaactcatggatggcatgccctgtccgggttccaataggaggtttgggcgggaaggaatccttacaaacaccaaatccttggatctgtcctgaggaagcctgaatcatctgattggccccagaatcaccctgattttccatgaattccctcaggcaaatgttggcccagaataagaccaatgtaaaagcccaggagaatagtggagcagtagactagcatccaagaatgggggaaaatgatgaactttgcccaagaatttgaaagcatgcttaattcagatttatagtatctgactcacattcacaaatttccctgtgctctttcctacaaaggttttgtttttcctttgctaacctttaccttctgcctaaaatatcactcccttttttctctttccatgctgaaaattctgtgccctctttcagctacacttttgatcactgagattatatgcttatgactttctggcattaaaagatttcactgactgctcagt

SEQ ID NO: 266333 - DNA, 975 bp, Homo Sapiens
attcggcacagcaagaatgagctgggggccagcaaaccctcggacaccagccagccctggtgcatcccccggcagcgcgacaggttcacagtgaaggctccgtgctaccgggagcccgacctgagccagaagccccggttcctggtgggcctgcggtcccacctgctgccccagggctgcgagtgctgcatgagctgtgccgtgcagggcttcgccccgggccccacgtcacctggttcaagaatgaccgcagcctggaaggaaaccccgcggtgtacagcactgacctgctgggcgtgtgctccctcaccatccccagcgtatccccgaagaacagcggggagtacaaggctgtggctgagaacacgctgggccaggcagtcagcactgccaccctcattgtcatagaacccagcacctagcctcacctcaccctgggatggtcctggacccttgaagcttcacttccgacacctgcactggcccgggaagccaatcccaaggatggaggctgtgcccagagccccaggaaaatgggagtgagaagatgcctggcgaggttttggccaggaggacgtgaagtccttggggaagaaaaacaagggaggagggcattccacctcctggctccaagctaagtcactcaacagaatgacagcgaacctcctggaccctcaccatatgggtttctttcttcttcgcatcaggagatccagagggcacctgcctgcaggatgggccggctccttattttcctgggctgagccgtttggagggagggtgggcacagctgggcctgctgtgaccactgggagggaagaggagaggaggtcagaggacctgggtgaggactagggcatcaaggtcgtgtgtgtgggtgggggcagcctccacctcctggattcaagagattccaggggtgcagcaagtgctttctatgcgtttcttcattaaaacattaggctaatacaggca

SEQ ID NO: 266334 - DNA, 815 bp, Homo Sapiens
ggaccagggacttgagggttcggtgatgaaaggaagctagccactgatgagtatcttccttttccctttttcatctgtaaaacataacctcatagggagttacgagattgaaagcatgcctatcaaatacttagcacaggtctcgtctggtcactgcgcttattaaatattttcatgggtatctgtactcaggaaggcagggttaactggtggtgtctcccacattctcaccattctgatatcaaaggggaatggaaggccttcaatactctcatctgtagttggaaatatttcatctggaggatagcttgtctctgtcaaccatccagggatgctgtgctccttgccagctgtgacctctgctcctttctcaagtcttacaacttgcttggaagataggctcagaaggtgattactaaacatgtggaaagtcagtaaacacattagaaaatcttgggtgccccagtgccttaccagttccactcaggttacaaagggcagtctctgacctccagttgtttaaaatctggtagggcttggactgactgcaacagaggagccaagtggaaaaacagcaagagataagcttggtggggagctgactacacaacgagagtttactgaaggtaggccttaactgcaagctgaatttaggcagcaatttgcaatcttaatcccataaaatgttgtactatttttagtagcattgctttcaacaccataaagtatgcacatactttagttttggttaaacgttttgatcatactcaaagccttgtaactacacaaatataaagaaatactatctttaaact

SEQ ID NO: 266335 - DNA, 747 bp, Homo Sapiens
ataataactttgatttcttgagctacatggcagaccctctgctaactgttttacattactcaccttatctgttagtcctcataacaatgctgccaggcagatcttatttatttacaggaacttgaggctcagattgcttcaaaggaggaggagctggaaggggcgaggttttcctatgaagccaattctattagactccaagcaaatgtgtattccagtcccttagttgccacaccctataaaagtaaaggatttctgaaaggtgaggatcactagagtgttttttcccatgactttcctcatatagctggggtgggcacaagcatcaatctggccacattttccctaattctaagttttccatggttttgagagagtgttcaaagctcactagttaaagccctatttttttattcattgtacttacaaattttatttgcttttgacaaaaatacaacttctatttcatttctttggatttaatttttcctcctctccagttctattgggagatcttttttcctcctgttgcaaggacttcaaccttatacccatcaggtgcctgccatggtcctagaagcacattcaggatttgtcttggtctagaccgtcatcatatgcctagggaaagactcttgtattccgtcctgagcattcacaatctgcttttgagaagccaaataaatcatgcacttatttcctccttacacaaagagcaaacacacaaagtatggataggaaaaaaag

SEQ ID NO: 266336 - DNA, 603 bp, Homo Sapiens
  misc_feature (143)..(143): n is a, c, g, or t
ggaaggagccagaaatgccatcatgacccagtgggaccgaacattcaaggtcatcaaagctcgagttgtacaagagtctccatctccctttgaaagttttcttaaagtctttagctttccgggctttggcttgtggctatttntcctgattttccctataagtaaaagatctccctaaagggaagatgcacagagtagatttacaatgctcccaattccctctcttacagcaatattgccttcacagttataaactgtattcaaatagtaaaggccaccctctcgcttcccctggctgggccccagggctaccactggtattcctgagcctctcccagctccacttctaatgctagagaatgataactaagatttctgtgcatttgaaggttgttggaaagttacaggttcattttagaaagaaagctgttcttgacagcactctgagccatcatacctctttcccatataaactattttcacagatctcaactaaaaccccttacttcacaaatgattgtgttgtgctgaaatggtgctcttatagtactggcttattaaaagtaaaaaataaacctaaaaattgattgttttaagtgaaaa

SEQ ID NO: 266337 - DNA, 1105 bp, Homo Sapiens
  misc_feature (1034)..(1034): n is a, c, g, or t
  misc_feature (1084)..(1084): n is a, c, g, or t
gagcgaaagataaacaactggctcaatcatgcaaattacggcttaataccagaagacaggactcagctgaaagagtttgtgctaaatgatgagctcccaggacgcatcatcactgggaaagtgttcatcaggccaagcataaaagaggtaaaggaaaactctgtcatatttaacaatacttcaaaggaagagcctattgacatcattgtctttgccactggatacacatttgctttccccttccttgatgagtctgtagtgaaagttgaagatggccaggcctcactgtacaagtatatcttccctgcacatctgcaaaagccaaccctgggccattattggccttcattcaaacccttgggcttccatgatacctacaggagaaacacaagctcggtgggctgttcgagtcctgaaaggtgtaaataagttaccaccaccaagtgtcatgatagaggaaattaatgcaaggaaagaaaacaagcccagttggtttggcttgtgctactgcaaggctttacaatcagattatatcacatacatagatgaactcctgacctatatcaatgcaaaacccaacctgttctctatgctcctaacggatccacatctggctctgaccgtcttctttggcccatgctcaccataccagttccgcttgactggcccaggaaaatgggaaggagccagaaatgccatcatgacccagtgggaccgaacattcaaggtcatcaaagctcgagttgtacaagagtctccatctccctttgaaagttttcttaaagtctttagctttctggctttgcttgtggctatttttctgattttcctataagtaaaagatctcctaaatgggaagatgcacagagtagatttacaatgctccaattcctctcttacagcaatattgccttcacagttataaaactgtattcaaatagtaaaaggccaccctcttcgcttccctgggctgggccccagggctaaccactgggtattcctggaggcctcttcccaggttccactttttaatngttaggggaattgattaactaaggattttctggtggccttttggaagggntgttggggaaagtttacaggg

SEQ ID NO: 266338 - DNA, 1226 bp, Homo Sapiens
  misc_feature (41)..(41): n is a, c, g, or t
  misc_feature (439)..(439): n is a, c, g, or t
  misc_feature (624)..(638): n is a, c, g, or t
  misc_feature (946)..(946): n is a, c, g, or t
tgtcacaggctttctttacagatgcggtgtaaatgaaattnttaacggggttcaaaatcagatggctaaatgtgttaatattctcatttaaacccaactacctttcttcgtctccaagcccctataatttaactctgaactataatcttttccattctatctagctcccatcctaagtcctctcctcctaacgtggaactctcctaaaatcttctccttatactagggttcgagacatgaggctgtctttttgggccttttgcgttgtcacagtcccagaccacggaacattctctcttccccaggacaggacattctctcttccccacgcctccttcctgtcctggcgttgagtcttccaaatggaaaattccagccatatcaattggtgatgcacccatttcttcctgtggaacgacagtctgatcggaattgcttnctcggagtaaatgcccagcttcttaccacttcagtgtcagcctgaatgtttggaaagttctagcacctcaaaccatttgcatctatgaaagcagaactctattttttccctttggtttagcttgtgagttctctgtgggaggaagatctgatatggccggctctctttcaaccctagttccagcnnnnnnnnnnnnnnnatgttctgggtgacggaccctcccagcaaaggggcttgctttatttgcttctctccccaaccctccactcttagcctttgtcttttgaataatccttcctcattccacttttgtggtgggggataattagtcacaactcagtagtaagccgtgcctgctgtagagaggaagcattcagggggttggaagtgtggagaccccagtctgattgctggaatcagtgctcctcggttcagtgttttgagaccaggtctttagcttctagctgggcatatttttctgctttgtaatttaacctgtatcttttntttcccatgttcctgcctcatcagggaattgtaagatttagggggaggtgtgggaaatcttactctttgccctaaagtattcagcgatcagaattctggataccctgcaaaacacctccaacctccctgcctttgaaccctgtgttaacaatgagaagcttgtttatttgaaggctgggttctcattggaccacaggggtaggttgtaattgtgtgtctaaaaaattgccttttgcattccccaatagcatgacaactggaatagtaatttgacttaaaa

SEQ ID NO: 266339 - DNA, 671 bp, Homo Sapiens
  misc_feature (555)..(580): n is a, c, g, or t
taaaaagcaaactccatttctctctccaagtactttttagcttctttgtccaagttcactaatgtaagtttttttcaggatcatcatgagcaatacaacaataaattacagtgaccagacctgccatacccctcaaaaatgccaaaaatgttaaaactaggaataggcttttttagacaaaaatggagaactaatttaaattccaagttaaacaaaacctaataagggtatcagctaagtgaatgactgcaatgcccaacctgaccaccagatggctaatacatcagccttttcagggttcctctgcgaggttgttctgatctgcaactttgttatgaaatggcaaatttgccccgccctttgaggctgactcaactaaactctcctctttcccaggaatggtctaacctcccctacacgtttatattcctgcataactttccagatgaatagctatcgtgctgctttccactatcttaggtattgccaaaatacacttactgcagatttcaaatctggagcttctaaactgttataaaatcctaaggtcatttnnnnnnnnnnnnnnnnnnnnnnnnnncatttgacttttaatttctaaattcataaactttcaaaatgacatgcttaatacatatacagaattggtctgtatttccttggagaaacca

SEQ ID NO: 266340 - DNA, 740 bp, Homo Sapiens
gaactcaagtgtcctacataggccaggactgcagagaaattccagagcaccttggcagggactgtggacatttcgcaaagaggcttgatctgagctttaaccttctgaggtcactggaaggactgagcgcattcaggagcctggaggaactcatcttggacaacaatcagctgggggacgaccttgtgttgccagggttacccagactgcataccttaaccctcaacaagaaccgaatcactgatttggagaacctgctggatcacttggcagaagtgacaccagctctggagaacctcagtctgctgggcaacgtggcctgtccccaacgagctggtcagcttggaaaaggatgaggaagactacaagagatacagatgctttgttctgtacaagctggcccaacttgaaatttctggatgcccagaaagtaaccagacaagaacgagaggaggcgttggtcagaggagtcttcatgaaggtggtgaagcccaaggcttctagtgaggacgttgccagctccccggagcgccactacacgcccttgccttctgcttccagggaactcaccagtcaccaaggtgtcctggggaagtgtcgctacgtttactatgggaaaaactcagagggcaacaggtttatccgagatgaccagctctgaagccaacttctgtataccttcacccatttcatgaaaataaattcaaaagggaaatcaaaaataaagaaaacgctaaaga

SEQ ID NO: 266341 - DNA, 716 bp, Homo Sapiens
gaaaaactcgaagattcccaggaagaagaacgagcagtcagtgtaaacctaggctcaaagaaacaaggatcactgcattacgaaccccgaactctcttatctccctccacttcccccttcaatcccagaaaggtcagaatctgggaacagagccatgaatagagaaaagtccagccacaccctgttctacttgctggattcctacctgaaacaggcctgggttagagcaggggagaagctctcatctccattagtaacagaattttgatcagtacctaagactgaacattaattactgaaatgagactgttttaggcctagaattagctaggtcactctactgtttgaaagagaccaaaaagctttaatttcttacatcatccaaaaagcctgagaaagactgttctcacatagccaatctcaggggccaagctaggaaagattaaagctgttttctgattgtacccttcgagtctggctcatttgcacaaaggaggcacttgagattagcccttttcacgaaatacagtgggatgatgataatattactattacttcctcccattaaataatttccaaattagattatttttacctatgttcttggtgggggggcagggtgtggggagggaacttctctaaaactatcacaaccgtaagtggcccctgacacaagacatgcttgtattaactaaatcgttgtgcactgtgtgtcc

SEQ ID NO: 266342 - DNA, 553 bp, Homo Sapiens
  misc_feature (174)..(193): n is a, c, g, or t
  misc_feature (218)..(270): n is a, c, g, or t
  misc_feature (321)..(321): n is a, c, g, or t
  misc_feature (346)..(355): n is a, c, g, or t
  misc_feature (416)..(479): n is a, c, g, or t
aaatggctaatcacttttaatgcaatttcaacataagaagacctaatgttaagcaatattttaacccctctccccaaaataaaaagacccagaacactgtaactctaattatccttctcccaacttagagaggattattcgtccagtattttcgttttgttagtagactgttcnnnnnnnnnnnnnnnnnnnnagagatggggtctcattttgtcaannnnnnnnnnnnnnnnnnnnnnnnnnnnnnnnnnnnnnnnnnnnnnnnnnnnnagctcaagcaatctcccacctcaatttcgtgggtagctgggcctcacaggnattataccatcgcatctggctaaannnnnnnnnngtacagatggggtcttggtacatctcccaggccgatttcaaactccaggcctcaagtgatnnnnnnnnnnnnnnnnnnnnnnnnnnnnnnnnnnnnnnnnnnnnnnnnnnnnnnnnnnnnnnnntgttctttccattattatttttatacaatgtttgcttggattcacacatgcatacatggactacacatgtacta

SEQ ID NO: 266343 - DNA, 584 bp, Homo Sapiens
  misc_feature (37)..(37): n is a, c, g, or t
  misc_feature (49)..(87): n is a, c, g, or t
  misc_feature (97)..(219): n is a, c, g, or t
  misc_feature (464)..(496): n is a, c, g, or t
  misc_feature (509)..(531): n is a, c, g, or t
taaagtattttaaataggtattctctttattgctaantgttagatctgnnnnnnnnnnnnnnnnnnnnnnnnnnnnnnnnnnnnnnngtctttcctnnnnnnnnnnnnnnnnnnnnnnnnnnnnnnnnnnnnnnnnnnnnnnnnnnnnnnnnnnnnnnnnnnnnnnnnnnnnnnnnnnnnnnnnnnnnnnnnnnnnnnnnnnnnnnnnnnnnnnnnnnntgatatttcttaattttacatattaagatatagagcagagtataagttggtttttagagaatcccaggttaaaagtcatatccagtataagaaatctttatttcttattattttgttctgtgaattctgcaattctggtgctctctgaggggaaaatagttataatagaaacaaatgtaaagaatgtttagaaaacatttacagtcactgggcgcggtggctcacacctgtaatcctagcacttnnnnnnnnnnnnnnnnnnnnnnnnnnnnnnnnnaacagcctgtacnnnnnnnnnnnnnnnnnnnnnnnggagaccgagttttgctcttgttgccccggctggagtgcaaaactccatctca

SEQ ID NO: 266344 - DNA, 727 bp, Homo Sapiens
  misc_feature (129)..(180): n is a, c, g, or t
agtaaacaaatgcccctaatgtcccaacagaatgacttactattattaaaagccaaactaaacttctcctcctataatgaagaaagtaaaaaacttccagaacagttaataaacaaagatatgtaagtnnnnnnnnnnnnnnnnnnnnnnnnnnnnnnnnnnnnnnnnnnnnnnnnnnnntaacttacatgtgaagaaggttcattttcataagtgccttagaatatgtttaagcaggccacatggaaacaaagagataaagaagcaaaatatactaagccacaatcccctccttcctgctttccctttgacccagtgtccaggagcctactggtcagggccccctcaatgacccccctccccacctcaccaaagaatttagtttgggctagcttgccatcacctaagtgcagtcacttaaggccgtaagtcaaatgctcagagtcttgagacagttgccatgtattatgggtggctgcaacaaaatgcagcaaaaaatgcagcaaaaagaccctaaagaacatacctgaagtcttaatacaactaccaataggtgatgcccaggaagactataaccccgtagtactcagctaatgaggaattggggaagggacttgcacactagggaagaaatagtttgttgaaactgtcccaggtgtacctgcactccagacacctgatcttgcaagactgtcgattaaaagtctctctttcgctgttcaaaaaa

SEQ ID NO: 266345 - DNA, 684 bp, Homo Sapiens
  misc_feature (365)..(365): n is a, c, g, or t
  misc_feature (386)..(386): n is a, c, g, or t
ctggggggtgagccacgtggtagctccttagggctccttcttagcgagtctcccagcagatctgccagagcagcaggtcggcagcaggagcccaggtccagcgttgcaggggtggggaaaaccatttcctggctggagaaggctgctgctgggctgggtgggcaagtcctgacacattagcgatcagccaactgttttattaccaggtctcccatggagaaaacacttcgtaaatcgaggagctgttacaaaagtcgaatgggcagcatcattagtgcccggctttctgggaaatgtggatttcctgacagttttctcaccttctcatcttatagatttcctgttcagcctggatcatagccatngacagcctccccgtttccctngtcctctctgtggcatgcacctgtgcatgtgtgtataaagacagaattatttagacaaatggctttcagaagttccgtcacagatataccccatgttcgtttacagtgagtttcacccaacatttgagtctattcactgagaaatggttgggaaggagctgaagggccactgcaaatgattgtagatggatgtggtaactttttggggtgaaagatttagcagctcagatgataaggttagattaagatagcatttaaaatgacatctgcaaagagaggcagttttaattaagcggcc

SEQ ID NO: 266346 - DNA, 764 bp, Homo Sapiens
  misc_feature (17)..(17): n is a, c, g, or t
  misc_feature (21)..(21): n is a, c, g, or t
  misc_feature (671)..(671): n is a, c, g, or t
  misc_feature (693)..(693): n is a, c, g, or t
  misc_feature (739)..(739): n is a, c, g, or t
  misc_feature (752)..(752): n is a, c, g, or t
tctggaagtttgaaatntttnaaataaaagttaggccatctgcagaattacatggattcatgaatagactgctttaagtactatgctatgatgctatcttatgttaaatccatattaaatcaatgttagcattttttaaaagactacatatggcatgatacatgataccatatttgtaaagaaaaataaaccaaactaaacaacgtattgtttgggaatacacacactcaaaatccctgagagaagacaaagcaaggtgctgataattaccaagctcagactgtgacgacctcagggatgggcaggaaggatgagactggggccaagagagaggaccgaattaggacttcaaagcattgatgtgatgtgcttcttgggttgggtggtagtttcatgggtgctttttatagtattttacttcaaaacttgcaaatgttacatatcatcttctgtattaatctcacattacattttttaaaagatggaaattggggaggtagaagatcatccagtttataaaaataagtttgaaatgggactaaccttcatatttagtgatgaactgaacaaaagcattaggttagtccccaacccttatctgaatgaactgacattttattagatccaaattcctggatgtaactaattaagtatctattgatcaccactgnttttcactttcctaacaacctnacctataaaataacaaatgcacttccttgcaactcttaatttaaanttttcttgctaanacataataactc

SEQ ID NO: 266347 - DNA, 617 bp, Homo Sapiens
tgagccatcgcacctggccaagtcaggctttaaagggatttgctgaatcttaggtcctaccactcaacctacaggttcttgtcaaggttaacggtgaccatcatgctgacaatctaatagatacttttttatgtcttcatttcactcagcttctcaatagcattcaacttggttaaaatgccctcttttttgaaatagtctcttctgtagaaatgatcttcctgattaggaagcttttttcataattcaattcaagtcattgaattgaactctaaatacaattctaaatacaattctaaattctacttgaactctaaatacaattcctgcgagcttggtcgagaactctcttctctccctaagtatcctcatttatttctgaaactttaaataatatctatatgctgacgtcaaaattggtttaactcagtttctcctctgaaatcaaacttgatatttaactctcttctgaactcaaactggctatttaatttctccactgggatgtatctgaagtatctcaaatttaaaacacgtaaagtgaattactgattctacaacaactattcccctaccaaaataaaaccaacttgccccacccctagtctctcccaact

SEQ ID NO: 266348 - DNA, 382 bp, Homo Sapiens
ggatgccttcagcctgctggcattactcagacccctggagctgcccagttggccagcagcttgaccccatccagagggaacctgtgtgtgctgccctcaacagcgccattttagagtcccagaacctgccaaagcagccccctctgatgctcgccctgggccaggcatctgagtgtctccggctcatggcccgagcaggcctgggttcttgctcctttgccagagttgatgactacttgcactagctgactgtgctggctggctctggctggccctccactggccccagggctggagctgccctgccctccataggcaactggtgcagggactgggaaaccatagacagagtccactcctccttgcctgggcttttccccct

SEQ ID NO: 266349 - DNA, 383 bp, Homo Sapiens
  misc_feature (371)..(371): n is a, c, g, or t
aaagagggaaaaaaatcccaagtgtacaaagcctatttactgaataacaacaccccctaaaatagaaaaaaatccctaataaaggattaatgtaaacattggtacactgatcccaacaaaatgtgcagtcataaagtaacacaaaagtttgcaatattaaatataatacaaaaactatattaaaatcataaatgattaatacatgttgatatacagattaagtcaaggattcaaagaaagttgatcacaataggcattttaaaattatggatgatgtgaaaatttgtctttaaaattgtttttacatacatttaatcatatcaaaatacataaaattaagcatcaaaaaattttaagtcctataatgcatnattaataaacct

SEQ ID NO: 266350 - DNA, 938 bp, Homo Sapiens
  misc_feature (584)..(584): n is a, c, g, or t
gaaaaacaattcacatttactactgaataaagcagacactcctgacagacaggcagccttgatctagtgccttatacaacctctgattgcgcctcgaccccaatcccacagtcacggtttacaaggtagaagcttagtcaaaatccggcttcagcagtcagggttcttgcaggaaactgaaggtgttcttgggaggggatttggaagcgagtttgatgaaggactctttgttgcggtgtggtcatggttcaaggatccttcaaagggtgctgctatttagggaccagcaacaatggcagaccgacaacatgtctcaccctaagaggcttgggggcggggagaagttctgttcgtagagcctagaggagttgtgcaatggaaagggcacccaggaagaatcgtagccacagagtgaaaccaacactggtgggtgtggggccaggcaaggaaggagaggggaagaggcccctgcctccctcctacccggtctgcagcaggttgtccctgtgggtgaagatccactgagggggaccgccagcttcctgagcacagggcaggccagagcaggacaggctgggatgganaaatgaagaatccagtgctttagccgaacaacaaatgggagccgtttactgtttagtcactatgattagtgttcactagtactcatttctcttcgtctaaaaagtggccaacaccatctcttttccacaagcactcgggagaacattcatattcaattgccttcctaagacccagacggggcagcgctctccacaggaccaccaaaaggtgttgcctgtttggtttcatcagtgattatctgtggcagcaagacaggaagttggaaatcaagtacctcaattaagtcaaggctgaccgtggaattagagaacaagtgtttgttaccccggccaggtcaccctagggaaaacagg

SEQ ID NO: 266351 - DNA, 621 bp, Homo Sapiens
cgccattgtgtggacaacctgactccttacaaacgtgcagtggcttcccaacgctgcctttgagtttctgggtctggctgctgaatgtgttgtgcttaagaatccagacaccctgctgttcctgccagagcttctcacgagatatttcgggtagttcatcatctgtcatgtgcagaatgcattttatttctcatagacgcttgtcatgataagctggccacattattaaaaggctcccaaagacaatttccagagcgttttccaagcgttccccttgggcatgaggtaaaccggagatagcgtggtcgcaggcctggcccggtgtggcttcccaggaggggaggtctgacctggaggcccagagccccccagggtcgggtctgcagccccagggctgatgcgtggggcctcgtttgcacaggccgtgtagccggagctcagcactggacctgttccacccaggcctcaggagcaaggcaaactgacttcctgaagcttcctgtatcggttcctctggccacagtaacagattactgcaagcccagcggcttagagcaccgcaagcattactattccagagcagagtccaaaagggcccaggccagacacgatggcccacac

SEQ ID NO: 266352 - DNA, 698 bp, Homo Sapiens
gctgaaaaagaatcaagaattctcatctggttgctagttttactagcagacagtggcctctcccattaacttcagggcccctccagacaccaaaccagcccttggtacagagccaaacaatgtctacaaggtccttgatctccgcgtggccttttctaagtcagctgacttttcaaaggatgacctagaaaactgtacattctctgtgatattccctaaccacactgacccacaatcttacccgcaggtaaatttctacatctgacagggactgcatcttttcaactaggaatctgaacccacaacttatacaatatgatagcatgaaggaatacatgaaattaggactgaatggaaaaaaatcaaagacatccaactgtcattgaatatcccttaatacttacaattggttttctatcatcatatcaactaccttttctccccacctaaatgactaattctttgagggccggtagaaaatgtcacatttcctttcagtctaccatagcatcctagtacagaacgagatacacaggaggtctcaaacaaatacatagtagttatttcatattaaaaatcaaaagaaagctccatataagaagttttcaaaacactagattttatgagtcaaagaaaaaatgaaatttggaaaacggtattcaaaataaaaagagccttgataatgtagaggaaattta

SEQ ID NO: 266353 - DNA, 640 bp, Homo Sapiens
atgcaaaatatccagtttcagaaaattacaggtgatgctagaattcctttgcctctcgactcctttcctgtcccagtttctactccagagggcttaggaacttccagcaacaacctaggagtcccagctactgagcagcggcaggagtcttttgaaggattcattgctagaatgtgctctccttcaccagatgcgacttctggaactggaagtcaaagaaaagaagaggagttgtccagaaatagcagatcttcttcagagaaaaagaccaaaacaggtgaatataccaaaaaacactctgataagcaacaccctggaaaggacctgcattcctgatctgactgtcctgaaaaccagaaaagcaaagaaactagggaaactagttctttggttaatgaaccaattaaaagtaggtctttgaaaaaatacgtttctgtcaagaaagaaaatagaatagtgactgtttcatccaagacaaataaaagtaaatccagtccactagaacattctgaaagtgatactcttggatgtgattttgaatttcaagaaagcatccattctctatcacacctttcatatgactaaatcttttgaaactatgtttttacctttaaattttaataaattttcttatgtcccc

SEQ ID NO: 266354 - DNA, 882 bp, Homo Sapiens
  misc_feature (729)..(729): n is a, c, g, or t
tttagaggggagaggggatgaggaattcctgtgggtccagtcttggttctcaaaagaagctgcccatgacctatctccctttcctggctcttctttcctctgtggaggcttcattctcaggcaagttctctgtcttcacagtggtgaaacggccaccagcagctccaagctaacatctcaccagtttagccactcccgaggcacaagagtggctccttctccagagctccagcaaaagtctcaggttcaattcttattggccggggtcgggtcccgtgcccaccccagaaccaatcaatcattgcagtcaaggaaacggaatgccctgattggaggagcctggttgcgtgcccacccttccaggctctcctgtcgggacacagtgtgaaccaaggtcttggggccggagaggaatagagaaggtgtcactgggactaggctgaaggggccataaaaggagcccaggggagaggctgtgaaagggagagcaggggcgatggcgaaggcctttgaacaccaggctgaggcgcccggatttcttctgcaggcagaagggagccaagacaggatgtctagcaggggagggcctggagcaggcaggggtgggcgtggggaccggaggcaggacagctgtgaagaggccgcagggatgggaaggggggacggggctggacccaaggcagaggcagtgagcacgggtgacagatgtcgtcacccccggcaggcctncaccctggggcggcccctgctcagcttctgcccattgttgccgcagcacgtaaacacccgcacagccagagcttccgacgtctcaagagaagtgggaagtgagatttatgcatgaaagaaaccgcttggtttttagagattggtgacgtattc

SEQ ID NO: 266355 - DNA, 850 bp, Homo Sapiens
  misc_feature (89)..(89): n is a, c, g, or t
  misc_feature (262)..(382): n is a, c, g, or t
gatatttgtccctgcccaaatctcattttgagatgtaatcctcagcattaaaggtgggtcttggtggaaggtattttcgtcaagggggnaggatccctcattaattgatgctgtcctttcatcaacgcccatatttctgccatatgcattttggaaaagtttttccagtgttaagaataaatattgggagttttattgaaatattaaatttatagaaactgctattattttaataatgagtcttcaaacattgaaattattnnnnnnnnnnnnnnnnnnnnnnnnnnnnnnnnnnnnnnnnnnnnnnnnnnnnnnnnnnnnnnnnnnnnnnnnnnnnnnnnnnnnnnnnnnnnnnnnnnnnnnnnnnnnnnnnnnnnnnnnnaccctcacaagacctgagtactcacaagatctggttaagtgtgtggcacctccctccccctctctttgcccttgctcctggccatgtgagatacttattccccttttgccttccacaatggttggaagcttcctgacgcctccctacaagctgatcagatgttagcacccatgcttccctgtacagcctgcaaaactgtgagccaattaaacctcttctttataaattacccagtctcacgtatttctttatagtacttcaagaatggcctaatacagatggatagtttgcaaatattctttcccattctatgggttgtctcttcactttgttgtttcctttgcaatacagatttttaacttgatgtgatcccacttgtccacttttgctttggttgcctgtcaggtattacacaaaaaatctttgcccactcccaatgtcctggagagattccccaatgttttattt

SEQ ID NO: 266356 - DNA, 560 bp, Homo Sapiens
  misc_feature (22)..(22): n is a, c, g, or t
  misc_feature (65)..(65): n is a, c, g, or t
  misc_feature (141)..(141): n is a, c, g, or t
  misc_feature (390)..(504): n is a, c, g, or t
aaaagtacctcacagggcgggnagcaagggccaaagagagggggagggaggtgcccacacacttnaacccagatcttgtgaagtactcaggtcttgtgaagggttgccttgaggtccagggatacccccatttaaccctgnatgtgttccatatacatttccatgactgtatccaaaatatctcatgtacccccataaacatatacacctatttgtacccacaaaaatttaaaaataatttcaatgtttgaagactcattattaaaataatagcagtttctataaatttaatatttcaataaaactcccaatatttattcttaacactggaaaaacttttccaaaatgcatatggcagaaatatgggcgttgatgaaaggacagcatcannnnnnnnnnnnnnnnnnnnnnnnnnnnnnnnnnnnnnnnnnnnnnnnnnnnnnnnnnnnnnnnnnnnnnnnnnnnnnnnnnnnnnnnnnnnnnnnnnnnnnnnnnnnnnnnnnnctagctatatcaggagctgtaactataactatatcaggaactataacaattctata

SEQ ID NO: 266357 - DNA, 672 bp, Homo Sapiens
  misc_feature (550)..(550): n is a, c, g, or t
attaaggcagaggagataccctcaaactcttttcattattctcttaattctgcacgtatttattttccacaacaaaattatgagatgctaaagctggaggccttcactatacaaataagaaaaataaactccagagaggtgaagtaacagaaccagtctcataattgcaagagaacctgaagcactgaggtttcctgacacttagtccagaacactttctccctactacacatcagcctctttttgatgatagtggagatgttctctgtacaaaatagtttagaagaaatgttgtacattttccctttgaatatacatgatgagagatgatagtccaatagctgggtggcattgtgagcttctaggacctcccagaagctgaggatctgtatccctgccatgggctgcatctccagctggttttctgcccactcacagcctgcaagtgtgcagatggtaaggatattatcatttccaccatggggggtgggggagagtagggggagaaaagacactgtttcatttaagtttatttcaaattccttgttgnttgtcatgttaacatgctctcacatttgcagacattaaccaacaactaggaggaaaaaaattcttgtcttaagcgcagacatagagaaatggcatctaagaaaaggtctgtcatttaaggag

SEQ ID NO: 266358 - DNA, 1070 bp, Homo Sapiens
  misc_feature (868)..(912): n is a, c, g, or t
agcaacccaggaaagatgtgaattctgtggcattaaaattcagcaactcgcaaaatttggaaaccttaacatttcacttagcaaaatacatatatagtaatgtaaaggccctgagtcttgggttttcatttcaaggtgagcatttgatattggagctgggttatttcttgttttgttctctaatattgtcagaagtaatcctactccttggtttcaacatttcccctctccttttaattgggacacccctactcgtttaccaccagcttgaacacatcacaggtaattggcaagcaattaactaaaatagtagttgtgcagctatggaactgtgaggcagcttgctcttttcccatcctgggcaattgggttgttcagtttctttccctccatctggaacccagtaacatcacccacgtttcccctagcagtctctcaactacaacccactctgatagtaattgctaaatcagttaaggtcctctagttaaaagcaagagaagtcacctcaactaaattaagcaaaaacaaacagaactattgatttgggaagacactggaggagctggcagaatcagaaggtaagttggagtaccaagtctcaggtagagccgaccttggtggctttggggcccttctagggaagcccctgcttcttcctagttttcaaaatcctgggagagaatctgattggctcagtatcagtcaggtatgactgtgtttggatcagtcagccctgggagagaagaggagaaataacacatagggcaaacaaaccaatttgtgtctactgtcatagaataatatttttagtaaccatcagatggggaaggcctttctaagctacttagaagatttagatgccagnnnnnnnnnnnnnnnnnnnnnnnnnnnnnnnnnnnnnnnnnnnnntctttgtgacaaatgatgtcgtaaaaaagtggccaactgggagaatctatttgccataggtagacaaagaatgttccagaatatacaaacctgtgagtaaaaggtaaacaatccagtcaagaaactggcaatttacagaagaaatacagatggtctat

SEQ ID NO: 266359 - DNA, 462 bp, Homo Sapiens
  misc_feature (64)..(64): n is a, c, g, or t
  misc_feature (73)..(73): n is a, c, g, or t
  misc_feature (78)..(78): n is a, c, g, or t
  misc_feature (98)..(98): n is a, c, g, or t
caaggtcttggccactggtcaacccccgggctaaaagtgccactggggtagggatcataccctnaactaaaanccctnaaaacttcctggagctcaangcaaccctccctgccctaggccctccctgaagtaactggggactataagcaagagtcatccaagccagggctaatccccaaagtgctgggattcacaggcatgagcccactgcacctgaccagtgacaattcttttataacttactttaaaatttcatggtacttacttgacaaaggtatcaagaattttttaatgattaagtatagcaaagaaaaccacacaaaacaaatgcatagcttaatacagtagaaggcaaaaatgaaaaagaaatttagcagctaccccaagagagctatacatgccttttctaataataattctcttctttaccaaaaataactattaatctcacttttttaaatt

SEQ ID NO: 266360 - DNA, 143 bp, Homo Sapiens
aagatatccagtaactgactgatcagctggcggtgggctctgctggctgccaggatgggccaccagcaaaaagggaaaattggttgtgagtgagaagaagagataagaaagtccacagggctgataagaaagaccatgggctt

SEQ ID NO: 266361 - DNA, 460 bp, Homo Sapiens
ggccgcttaattaaactagatgataattctcaggtactgataaacacctgttgttgttcactttcctcataaaaattgtcagctctctctgacacttagacctcaaactttagcatctctgtggagctgccatccactgtataatttcgcctggcaactggactgaggggagtgtgcccaggcagctgccaagcactccctccctgggcttcagggtcagagtgcccagcgtttatcagaggcagcatccaagcccagagccagtgtcgactcttcggctggtgcctttcctctgaggggctatcaatgtgtagataaagccctgagtaggcaagagcagtgagatccactgctatggtcttgatacatcctcaaactttcccttcccagcacagaggaatattggctggcatgcaacctgcaaaagaaaaatgcgaagcggccgggcacggtggctcat

SEQ ID NO: 266362 - DNA, 790 bp, Homo Sapiens
tacccaatatttgcatttctaccaaaccctagtttgaattcccctgctcctgtgcacagacttagggtagaggattaagacaaaccctctcagtttgcctgagtttgaaggagttaccaggacttgggacattcagtgctaaaaccaggaaagttccaggcaaactgaaatgagttggtcatcctatggaggttacatgatagtaagggatatacggtcaaccctgtgctgacttcctgctctcactctccaaggtcgaagtctatacagatattaacataatatcaacaatccaaaaccttagtgcttaatgcatcctaccatgcccttgataaagctaaatacaatgatacactagatgagggggcggcagccaggaaagcttctcctttgagtaacagacttttggttagtatttgtgctcaatgtatccttagggaactggatgctgaggttggaaaagtgtgatgactctcttccaaagaccaagtggaagttcagcactaatgatcagttcctcttggaatataagaatgtccatttgggtattccttcctatagtgttaatagtgggtcagaaattatttacaatgaacataatttcattatacagtatagcttctgcttcattctttcacggatacatgccctcactgtgtattcaactaaaaagccactcagggaataccaactattgctagacactgtgttaagagtagaaaaatgatgacatggtctctgtcctcaagaaactatagtataaagaagtgacataccagtgttcttccag

SEQ ID NO: 266363 - DNA, 961 bp, Homo Sapiens
  misc_feature (63)..(194): n is a, c, g, or t
aggaggctaccaaatagtgtctctggtttgtaacatttattccagtttaaaaataatacatannnnnnnnnnnnnnnnnnnnnnnnnnnnnnnnnnnnnnnnnnnnnnnnnnnnnnnnnnnnnnnnnnnnnnnnnnnnnnnnnnnnnnnnnnnnnnnnnnnnnnnnnnnnnnnnnnnnnnnnnnnnnnnnnnnngcatcaaataaaaaaaagagaaggcccaataccaaaatattaatgtagccatattgctatacagagaggttatgggtgatttgtattttctaattttatttctattgtattttccaactatttttcaatgggaaataagcatattcctttggtcttagaaacaagtcaataaatgctacataaaaacaaaacaaacttgctctactcatctaacgaacaatatcttgtgtggatgaaaataaatgtcctttttcttaaagaaataaataattgataatgtaaaagagtgtctttgaatatttctcttcatgtattttctcttcctcctcctcctcttttgtttcttatctttttggttcctcaatgtacaactctagctccttctcttcctggtgccaaccttaaacacctggttaatgatctgaattctctccttctgtgctttctcattgaggagtttgaaagcaaagagtccttggattttagacatttgggaatggccaagattttgacttgttttgtgaaaagatgtatttgttcagttgagcaagtgtgaagcaaaatctttcagcatgtctattaatcttagcgggcctgagtgatgtaagggtatgcgcactcatgttttatgatgtttggtttcataaaaatatgtttggtttcaaggcattggcctctattctctgttgactaagaacaaatttggagtaaggaaggcatcttgaattttatcccaaacctagtttgttttttaatcatcaaaaaga

SEQ ID NO: 266364 - DNA, 736 bp, Homo Sapiens
  misc_feature (409)..(409): n is a, c, g, or t
tcttacctcctggtatccaggttaaaatactttctgttcttgggcaaagagaattagaaacaaatacccttaacctgactcccttgttcttgagcccaggaccaagaaagaagaagctgtacaatgcagaagcagggcttgagatcacctccaacctgccaagcagatagagatctgggtatgccaacttgggaggcagaggttgaaacctcataggaggaactttggagctcatagaaggccttggcattgtcagaggccttgagttccaaaaccatgccagtatttctgccttctgacaggctggctagaaagagactaaatgggagcatttttctctgacagtggggcggagggatgaggggatgacagcccaggaagaagcagagacattgcccataagtacttnactagagggcaggccagcacagctttatgcaagttaagggccttgaccttgccccaaggcctgacctcagatcccagattcatcatactagccttttgatctttgccaaattacttaaactcactgtttcctcatctgttgaataatggtgtctacctcagggtttgtgaggactaagcgagctaatgcatgaaaagtgcctagtacagtgcctggcatatagcaagaactcagcaaatgcttgctgctctaacgaggcgtttctctgatgacagatttgatctaagcagacacctcagggtgtactgacatctgagcaaaccatat

SEQ ID NO: 266365 - DNA, 658 bp, Homo Sapiens
  misc_feature (105)..(235): n is a, c, g, or t
gtgagctgctcggagcccaccgagggagctcccacggccaggtcaggcacgccgtccacgttaaagtccaacacagccaaggccgagccaaaccgacctgagggnnnnnnnnnnnnnnnnnnnnnnnnnnnnnnnnnnnnnnnnnnnnnnnnnnnnnnnnnnnnnnnnnnnnnnnnnnnnnnnnnnnnnnnnnnnnnnnnnnnnnnnnnnnnnnnnnnnnnnnnnnnnnnnnnnnttcaaggatcctgtgggcctccttgtccaggtccaggtcaacaggtggcaggcccaggtcattgccgtagatgaggtacacgcgcccgatgtggatgtggccggggcggctgtagcctggtgcgcccaccacgaggtcaccgtgcccatcctggttgaggtcagctgaggtcattgcccagccaagcctcgcataaggaaatgacaagaagtaagatgctaaggggctggagacgtgcttttgtgacaactgagagccacctatgaacattgtccttatgttcctttccaaagccttgtagataaaggacatggaatccggggtccaggaatttacactaaagaacactcctctttcagtatagtttatattcctgtcaacactttcagttagggatgtagtcaaatttctgtgaaaatcatt

SEQ ID NO: 266366 - DNA, 564 bp, Homo Sapiens
aagagccacgctgtcttgcctgaaaatgataatgtgtgtccatttggtgtgttgatttgtatagaatcatttttcaaatggctacctttgtcaatcatcagatatttatagcctacctcctatttgcggtataccatacaagattaataatagacttgaggatgaatgaggtacatgccaccattgactcctggcttctgcgtcctgcttaacattaggatagcacaggagtttaaataaacagccacccctctgtcgcatacgccctggctcacactcttctcctgccatgctttctcacaggctgtgttgtgacagggcatccaccactctacctttaatctgacctaatgttgcttatcttccaagattttgctgtattgtctgtttttccaggaatactctgcaacatacttccatcacctagttttatgatgatctattttctatgttcccctgctccctaaaacttcagtctccttgagagtggaaactaagtcttattttcattacatctctagttcttaacagtttttcaaaagatgattaaacagtgactgtagt

SEQ ID NO: 266367 - DNA, 430 bp, Homo Sapiens
  misc_feature (95)..(95): n is a, c, g, or t
tgagccaccgcgcctggcaagggactttggtctttcttgcttggggctgggatgagtgtgtcctgtgtgagaagaaggaggcacaaggcagattngggtgggccacagctgttaaccgggagccacagagcgggcttctgttacacactattcttcttttcttcactttaacagaaccatcccttgaggtttagctgggggcacctggctgcccagctacagactagattttccagactaatttatatcaattttctttattcctttaaaagttgtttatttattgcacttacatactaagataccattctcaaaggaccacgaaagcagaaatggttaatatatgaagctgtctataggcatgatagaataaaaagtttaaaaattatttgggtcaggcttaaataattttaacaggtaaaaaaagtgt

SEQ ID NO: 266368 - DNA, 538 bp, Homo Sapiens
  misc_feature (46)..(81): n is a, c, g, or t
  misc_feature (350)..(375): n is a, c, g, or t
gattctaacttacagtaactaaaacaaattgggattttgctgactnnnnnnnnnnnnnnnnnnnnnnnnnnnnnnnnnnnnccctcaaaaaatcaaaccaaacttggcattgcaagatggctgctactgctccagagagcaggcccatgttcacagtaggaagaagaaatatagtgtcaggcacatatttcctttttgtctagaaagcaaaacttgcctcaaatcctccttccccaagcaaactctccccttatatttcagcggctagaactggggcacgtggccactcctcgctgcaaggcaggctaagaatgtggaacaaggattgtagtcactgactcattcacatnnnnnnnnnnnnnnnnnnnnnnnnnncagaaccagagggattcttcaacgtctggcttcacccccagagagtctaattctaatttatgcacatcagaatttaggagcactggcttaaaaccaaccttgattcatcatctgggtctggcatattgctccccaacaaacaaaatgagggtctcttggcaag

SEQ ID NO: 266369 - DNA, 894 bp, Homo Sapiens
  misc_feature (348)..(348): n is a, c, g, or t
  misc_feature (398)..(398): n is a, c, g, or t
  misc_feature (412)..(412): n is a, c, g, or t
  misc_feature (443)..(443): n is a, c, g, or t
ctgacttcgatataaaataaaagacgagcctgcagctgtctgcagagaagaggaaatcataacaagagaagcggcacagtctaacctctcaccaggtcacaggccccacgagggcaaggactctcctttgttccctgccatgacccctagagcaatgccctgcccacatgggagctcagtagcaaactaactaaatgaacacactggactaaggacttcagggaggggacagggcagccatccgcctgttctgggtgagcctggtgaatcactctagtcagtgagcagataggtgagaggaggtgattaaccccaaatttccctttcaacgtgacatgtctctgtgtngaacgcaggcgcttaattgaaaaaacaaacccagccacagaacggcctcncaacagtgggaganaaaacaacccagaggtgtaattgactattgncaaaaagctgaatcctttaggccaaaacaagcaccccccaccgttataatttcgagttatccattctttattacaactcatagccttggctcgaaaagcctgtaccagggattccgtcctgtgggggcaattttggtgcctgcaattagctgaacaggcagcttttgtcccctgctaaagcactcaattgcaggtgtaattaggttccctcacccctgaaatctgcagagagccgcccgccttgactaactgcacccacaattaagtgcttacgggcatgtggctggagccgggaaacatgtgcatgcagctaatagcaggggcaccaagcaggtttgcaaaaatagacactgcggtggagagatccaggctttttgcatttgttgttcaaacggctctgtccagctgggaataacgaggaaagacaaacacaccaattaggctgggtcca

SEQ ID NO: 266370 - DNA, 611 bp, Homo Sapiens
  misc_feature (11)..(11): n is a, c, g, or t
  misc_feature (25)..(25): n is a, c, g, or t
  misc_feature (34)..(34): n is a, c, g, or t
  misc_feature (43)..(43): n is a, c, g, or t
  misc_feature (69)..(69): n is a, c, g, or t
  misc_feature (89)..(89): n is a, c, g, or t
  misc_feature (99)..(99): n is a, c, g, or t
  misc_feature (107)..(107): n is a, c, g, or t
  misc_feature (113)..(113): n is a, c, g, or t
  misc_feature (118)..(118): n is a, c, g, or t
  misc_feature (140)..(140): n is a, c, g, or t
  misc_feature (153)..(153): n is a, c, g, or t
  misc_feature (161)..(161): n is a, c, g, or t
  misc_feature (232)..(232): n is a, c, g, or t
  misc_feature (265)..(310): n is a, c, g, or t
  misc_feature (342)..(377): n is a, c, g, or t
aatcccaaaantttggaggcaaagntggtgaatntttgacccnagaatttaaaccaacctgggcaaaantacgaaaaccccatctctanaaaaaattanaaaaattnaccggntttgntggcaacatacctgtggttccnagctaactaaagnaggctgangcaggaaaaactgcctgagccacaagaggttcatggctgcagtgaagcccgtgattgtgcaactgaactcnagccctgggtgaacagagtgagactctgtctcnnnnnnnnnnnnnnnnnnnnnnnnnnnnnnnnnnnnnnnnnnnnnncatccaactgaggttgggcatagtggctcatnnnnnnnnnnnnnnnnnnnnnnnnnnnnnnnnnnnnaagtttgtgaccagcttgggcaacatggcgaaatcccatctctaccaaaataatacaaaaattagccaggtgtggtggctcatgcctgtggtcccagctactcaggaggctaaggtgggaaaatcacctgagcccaggaggtcaaggctgcagtgagctgtgattgagcctgggtgacagagcaagaccctgcctcaaagaaaagaaaaaagaagccagctaattctcctctta

SEQ ID NO: 266371 - DNA, 753 bp, Homo Sapiens
  misc_feature (599)..(678): n is a, c, g, or t
attgcttcatggacacaggaagacttctccaaaaaaagcaactttcttcttattgttatccttggcaaaattaaatcatgtcgtaaacaatatcccaatcctcttgtcatccatcagactctagaagggtggctcctaatgcttttcgggtctcggaccactgtggaaatttggtgaaagccatgcaactcctcctttggaaaagttatggtagcctgctttagaatataaatgcagaagttcagggtatagtgaactccatcagtggaaccctagaaagtctcaagctttagcacggaagtggctgggctggccaagggaaggaacagggaagaaggactggttggatttacaggtctcacgggagagtggtggcattgtcacagaaagattatggactccctgccttctaagcacaattttattttatctccattaaaatattaactcttttggaaacatgaactcttactgccttaaaaaaagcaatctagcaacaagtgttaaaacctgaaagacacaaatacgttttgttctggcaattccactcctgggaatctctcccatggaaacaaaattatcagcatagaaagcgtaannnnnnnnnnnnnnnnnnnnnnnnnnnnnnnnnnnnnnnnnnnnnnnnnnnnnnnnnnnnnnnnnnnnnnnnnnnnnnnntgagttacattttgataatctgcaccaaagaatatgatgcgatcatttaaaggaaggaaatagagctctatagcc

SEQ ID NO: 266372 - DNA, 774 bp, Homo Sapiens
  misc_feature (637)..(637): n is a, c, g, or t
tcctttcacgttcaaaagcatctgggggctcctgggggttcagcggtgatgatacactatgtttggttttgctccagtccttgtgtgtgtctgtggccacagactggagcacagtgtcttgctacttgacttgacttttgaggctctatagaggagaataatcgtgccttatggaaaggctaaggtcttttcctaggtcccctcccccaggaacatcatcacaggtcaaacactgtttctggggaaggccagtgccccttgaagggtgctccctgctttcgggaagtgcctaaacacaggaaacatgccctcagacatgggggctgcactttgttataagacagttctcatcctatccagacacaagaacattctaacataatatccctgcagttcttccacaattggtccccagagctttggaggcaaaatgtcatctgggtgatgtcctttctcctacagccatcatcaggcttcagctgcaagctgtgaacatatattaattgctgtcagcagcaggtccctttctttgagaaatcttcaggtcctgaggcttccatctgccagccatgggcccatgacttcctctcctaggggtcagcaaactttatctgtaaagggcccagtaaatattttnaggctttgcaggccatatggtcttgagactgttaaattctgctgttgtagcttgaaagcagcctttgacaatatgtaaatgaatgaccatggctgttacccagtaaaactcaatttaaaatacaggtgaggccaggt

SEQ ID NO: 266373 - DNA, 472 bp, Homo Sapiens
gcttcaataccctgtctcactgtgggagggagcagaggatggagctgcccggatccttcagggcctgggcttccggcagggctgagctccagaatggggtgggatcaccctctggagataagacctggacctggctttacccaaaccccaccagtgccctactcccgcaatcccccagccccagcacccactcccagcttccagcacagctgtaattggggctgagggtaacgaccagcgccaaccccagctgcggagggcctggcatgtgtgggaaaaagccggaaaaatacattttcccctaaagacttgtaagaaaattctcactgatttttttccttttaccccaagctttcacagcactaaatatgccacacttagtaattttacgagcaaaccaaactatacatcacacggttttatgttcctaaattaacaaaaggactttaaatctatatggcgctcttaaaag

SEQ ID NO: 266374 - DNA, 628 bp, Homo Sapiens
ccctgagaaatctccttcaagcatcaccaaacacagtttgaaaattacagggttagcaaaaagagcctgggctgtatgtagggtggaaacactctgatctgaagcccagctgactccactactaatttgctgtaaagctttggacatacacttagctgctgtgagccactaataacattgggctaatatctgctgtgcttctctgacaggtagtcatgaaaatcaaatgatgcaaaatatatacaagcactttgtaaattgtaaaatgatacaaaatttaaagtttatagagccagttacaaaatcctattagtcatatatttataggattgtgttcacagcaatcatttaaccacaaataaaatatcccttgatgatactgccataatgatatgtccattattagattatgttacatgacaaagttgaaggaatttggcagatgcagttaaggttcctaaacaactcactttgagactgttgaaagggcctgacctaatcaagtgaacccttgcaagaagaattctccttgtaagccttgaagaagtatgtgagagggccacattggctaaaacctaaaggtggcctctaggagatgagacctaccttccagttgtcagcaagcagg

SEQ ID NO: 266375 - DNA, 721 bp, Homo Sapiens
  misc_feature (301)..(309): n is a, c, g, or t
agctttttaaagatacagctacaatcaacaaaggactggcacatttcagaccacagctacttttctactacaatgtgacttcatatttatttagtcctatcctgtcccaaacaaggtttgttaagacagcttacaaaaatacacacagaataaaccataaaattatttataagggattgacaattttggaaaaaggaaaaaggtacatttatgtttatattcacataattataaaggtctaaaaagttaaaccccaacttcatagtacatgtcactactgaatagtataattgtgagtacnnnnnnnnnaaagatgtacttttacaagtaggtgagaaattgattattctaagatgtcaaggtgggtgaacttcttgaatatattttcctattttctctttctctctttcaaatgtaactttcattaggtcttctgttttctggttcctaagtctgatccgtccagagggatgtcatttcgagccacagaaaaaaagtacagcctaccccatcagaagactcacatctgaagtccattattgttccccaccacttagatctgaataagataaaacatttaaggagcaaaagtttttaaattctattgtgagggggccaacatctttcaaagatggttgatttctttttgtgtaggcaggtgctgcatagactctgaataataaaatgaagttggggaggtaagaaagaactcattcataat

SEQ ID NO: 266376 - DNA, 755 bp, Homo Sapiens
ctggaaattgatgagaaaacagcttctgcatagtagctaatgcttatgtccatgtgtggttcttttgtagcgtgattggactcccaggagaagaagactggcctagagatgttgcccttcccaggcaggcttttcattcaaaatctgcccaaccaattgagaagtttgtaacagatatcgatgaactaggcaaagacctacttctgaagtgtttgacatttaacccagccaaaagaatatctgcctacagtgccctgtctcacccatacttccaggacctggaaaggtgcaaagaaaacctggattcccacctgccgcccagccagaacacctcggagctgaatacagcctgaggccttcagcagccgccttaaagctgatcctgtcggagaacacccttggtgggctttatgggtccccctcagcaagccctacagagctgtggaggattgctatctggaggccttccagctgctgtcttctggacaggctctgcttctccaaggaaaccgcctagtttactgttttgaaatcaatgcaagagtgattgcagctttatgttcatttgtttgtttgtttgtctgtttgtttcaagaacctggaaaaattccagaagaagagaagctgctgaccaattgtgctgccatttgatttttctaaccttgaatgctccagtgtggagtgggtaatccaggcacagctgagttatgatgtaatctctctgcagctgcctggcctgatttggtacttttgga

SEQ ID NO: 266377 - DNA, 479 bp, Homo Sapiens
  misc_feature (226)..(257): n is a, c, g, or t
tggttttataatggaaatctttgaacaagtaagatctgcttagatttacattcatctttggtagagtaaacctcatctctaaattaaagagtttgtaatttcttacctttatgattagaatgaaaattcttggagagggcctaatccacatgtcagtttttaaagcttaaagacaaaagacaacactggcatttgtgttaatatctgcatttaaatatatatcatnnnnnnnnnnnnnnnnnnnnnnnnnnnnnnnnttagctatatggaaaaaatggatccctaccttacagtatatgcaaaagtcaattctagatgggaaattaaactttaaaaatttttaaagaaaatacagggcaatatctttatgacctcagagtaaagagggatttcttaaacaagaactacagctcataaaggaaaaagttggtttattttattactttaaggaaaaaaaaccttctatatatcaaaagact

SEQ ID NO: 266378 - DNA, 1012 bp, Homo Sapiens
gaaagcagtctgcaggccaggagtaggccttcaccagaaaatgatacaggccagaaccttaatcttggacttctggcctccaggactgtgagaaaataaatttatgttgtttaagccaccctgtctatggtatttggttatggcagcccaaatggactaatacagtaaacttcttaaaccaaggtaagtttcaaaagaactttaaatgtaatcaaatgaatttataggcccactgaacagagccaaaatacagttactaccaacccccccaccttttctgtttacaaataacctatgatgattataaatttaccttcttacacagttttagcactagcaaccaatggcccattaaggacaggaagccctaggatcaaggatggcacttttcacagtggtcaggaatacaggcttcagggaacagtagccagtttcaggtgcaggctctatttttttaatgtctatacatttccaaaaattattccttaaggaaggttaccaaaatttctcatgacttcataaaattatattatattcaagttcagttgaaagaaaataatgtatacttcaaacaccagaaactattattagagtaaaatatataattatagaaaacagaactgaaatttacatttcaattcaattcaacatattcaacattaaacacttctagcatgtcaagcagtgtgctaggcattcacattgtttagagaaaataaagacatttacctatacatagatgtcaaatatgagttaaaaagcatagtagcctgaaatccctacccagtgaagtccaaactacagtacttactggacatctcctctttgtattacaaataagcatcccaaactctccttgttctaaagctaaactcctaatcactaccaccaccagcaacacccactgttcaccctcttaatcaaacctggtcttcctgaagtccttttctccaataattaacatccccagccatccagaaactttcaagtcatccttaagtcctctttcttt

SEQ ID NO: 266379 - DNA, 1111 bp, Homo Sapiens
agtagcaggatcagtatgaagataatacagtatctcttaaaacaggcagccagcaaatgaactttctgcattggtcagaatttccatcatttcactgttaatgaggaaagtacagttctttagctaccatgaaagtcaaacatatcctaagccttttggaaaaagacatacatgttagaaaatctcaaatggatgagtcagcctgactgaccccacattgactccattttatatgctggccaaatcctgtttctgactttcctggcacagccctggacatgcttctgtatcataggacttgttccccagcgcctttgctacttccttcaggcacattcctaggaaagattggcagtggggtttgctctttgccagcactcctgccggtttgggggttatggatgccaggtttggctccaggcactctgctctccatttgtggaggcagggacggtaacagcacctgacaagtagggatgatcacattgtattcagaagcctggtggagctctataaacccaaatttctaacagtctccaatgtaatgccctgtaatagaagctgtccttaaccctcaatcatctgtattcagctagtataaaaatgcaaatctgctcttatgcctaaacagttaggagtagaggagacttggcttcctttggaaagtcaggatgatagcttcatcccattctggtttttgtgattaattgtgacctacaaaggggtttactactctagcaggaactttgaatttcctatatacatctctttctggttagcaggcagaggaaatatcgttgacttttggcttcctggcaaatgtctcatttgccttgtcatttgttgattccttttccctgatctctgtttggtgtgataatgtacagcaaagctgaaaaccgcagggctacatgtacacttgtaggtacctatgttgtgattgccaaaaggctcagaaagccagttttctagtgaaaatggctaacattctaagaaatgctttcactgagaaagagaacgggtcaggggaaggtggaacttaaaggaagatggagtgttcctgaattcagattcctgaattagccatttatagtttcatgggaagacaatg

SEQ ID NO: 266380 - DNA, 681 bp, Homo Sapiens
  misc_feature (668)..(668): n is a, c, g, or t
gcttagtgttcctgtcagtggcacttagccccagctgcaacagctggcttctgcttgaacatttttggcaactcacatctagcctcatcactggccctcagagatccctacgacatcaacactgggccctagaggtccaactacaacctggtcataaacacccctcagtggcctgagctcccactacataggtcccctactctgaggttctagagcttttgacaatcccagtttcccctgtttggttcccccagggctaggttggtagcagcttcctcagtaatatctccaggtgagcccagtgctcccttttgtcctttctatcctctaatacatgtgtaaactaattcctctagtaaattccctctggtgaaatctttcttgtggtttctatttttctggctgggctgtgactgatgtactttgggtatataaaaatgaataataaccttccctacccttaaggagctcacagactagttaggagatgaagataggcaaataaatgtactaatttattttcgaggtagtggattggccattttatttcctctcccaaccaaaaccacaataaaatgatagcaaaggtattaaatacaacaaactctaagtgatagagagaacaggaaacaaaggaaacacatcagcagagaatctcaacaaaattnctggagggttaga

SEQ ID NO: 266381 - DNA, 747 bp, Homo Sapiens
gaggctcataactactttactgcgatagttataaatgttaaatgaagtagtctatgtaaagttgtagccaaataataaatggtccttcattctgcaagtgtgattgacccacaccactttcttgtgtatgatctttaaaaaattatacttagatcttttgtttatagcatggtccctttaaaactataatctagtgtgtgctgttgtcaactgtgtaaacttttagagagacagaattaatcaatgttcattgagtacgcaaagcatgttttgctgtaaaacagaatacagagtgcaaaagccagattttggctgtaaggacaaggactatattccctttgttctttgcatttagggggttgattcacaaatactaaaaactcatttactaactactcagtcatctgcttttacaaacacttttttccataaaaaattcaaacagtacagaaatatttaaagtaaaagtttctcctttcccagtccccatttctttactttgcccactattaacaatttgatttctagctgaattactttaaaaatgattttaagtggtaacgataatataaatgcataataaattctcaaaggaaatctgctaaatattaagttattactgaatgaaggataatattatttattatttattcatggtttttctccattggtctataatgagctaatactcttaataaagagacaaaggaataaatgcaatgaaaataaattatttcagctgctctg

SEQ ID NO: 266382 - DNA, 211 bp, Homo Sapiens
ctagccattttctataaacctgaaaatagatgccagaaaagaaggtgccgctataaaatgctttcttgagtgatttatgtctaacatacaattaaacatttatgagaaggaaattatcaggttaaaatataaactcacttgccaattatttgattttcaggatatctgacttttgttaattactgaaaataaagtattatttctaatcaca

SEQ ID NO: 266383 - DNA, 707 bp, Homo Sapiens
aagatagggtctctgttgcctaggctggatcttactgcagccttgacctcccagcctcaagcagtccacccacctcagcctcccaagtagctgggactgaaggctcacgccaccatgcccagctaagtttgtttattttttgtagaggcgaggtctcactatattgcccagggtggtctctaactcctaaactcaagcagtcctcccacctcagcctcccaaagtgtaaaccaaactttttattgcatggcttaattgtacccattgaccatgaggaagaagagtccagcaccaggaatggttgtaacacctcctacaggaaaggtactctagttaggagctgcagactttcgtggttttggtcatgctccacgccgaagtcccgaagggaaaggcatggatcctgcctggtctggcagaggcaggagcctagggatagaatgcatccttctttgcagcataccctgtgaaacccaggttttttctgacaccctggttagtgaaatactgaaggggaggagagactctagggtttacctccaatattgctgagcaggaaaaaggccttttgcttgtggtaggtaagtaagaggaatggagctgagtaacttgataacgaggcaggaatctgctttatgatgtgaaaacattaccttttaaatgtttgtttggagcaatatcgaagtttaattttaaataatttacaa

SEQ ID NO: 266384 - DNA, 501 bp, Homo Sapiens
aaaaaatatataaatatgaactgtgttacgagatgattgctgtgacgaaaaataaaagcagggtaagaaggatagagagtaacaaaataggggatgattgctgttttgggaatattatggaagtattgtgatgaagtagcttttgagcagaatcctaaaggaagttttctaggcaaaaaataagaactgagtgtaaagcttgcatatctgttgggcagacggtggttagtctgtaagcgtttggggttgtgggaaagggtgagtgaagggtctttcctcctactcaggaaggtggaggtacagagtcagtgttgctaggaacacatggagctctgtgggctctcccctgcaatccgacctgataatagaaagatgcagtgacaagacagatggaatatctatttgttatgcctgcagtgggaggtcaggaaatcccttatcaaggatgtcatgctttatataagaagaatgaattcaccaggagaatcgcttgaacccagc

SEQ ID NO: 266385 - DNA, 670 bp, Homo Sapiens
cttaagtgaaatttgcctgttgtgcttctgtgcttatgtttgatctcctagtaaataattgaagagtttgaggtagttccccagtggaaaggtttctagaatagagatttgtctgaaaatgttcagaagagctgttcagtattctactcagttgattttatggagggagtcataggactctcagtgttggagtaactagttgtgttgtagcctgtcatggctttggagtgatttgttctttgctggatgactagataaatcagtaaagacagaattcaggaaaagggatgagagatggaatggggaggagactcagatttaaagaatgccttgtgctaggccacgtgctgagcattttctataagtcagttccccaagtcctctgaagaactcaaatccttcagcacatgtttgttccgcacaggttagcagtggtcacaggcaggccctgagggtggactgcctgcccaggttcctgtgctgtgggtggcgctgggctttgctcagaggagtcaaggagaagtcacttggccccagctctaagaagacttgctgtccaggacaaagattgtcaagctgtttctctaaggttcatagtgagaaatccgttttatgttgcaacctgtaggaacacattagtcccacagtcagaagtaaaacatttcatctc

SEQ ID NO: 266386 - DNA, 388 bp, Homo Sapiens
ggacaagagcggaggcctggggtgagcgcggcccgacgggcacgggctaggacagacggacgcagacggcccgacgacctgggcgttcggcggaggggcgctggggcctgactcgcggaaggggaaactgaagcagaaagaggttacttaatgggctcaaggtcacctacctgacctaccagcagctcaatggccttaccaaagaagaaacttcagggtcttgtggctgcaaccattcacgccaatgactgaggaatggttttaagaaagactggcatcagctgtttctcaatgcatcagtcacttgttcgcagattcaaacagaaggacatgttgattttcatggaatccggcagggttttactttcctgtttacagagtgaggttc

SEQ ID NO: 266387 - DNA, 789 bp, Homo Sapiens
  misc_feature (290)..(290): n is a, c, g, or t
  misc_feature (465)..(465): n is a, c, g, or t
  misc_feature (480)..(480): n is a, c, g, or t
  misc_feature (495)..(495): n is a, c, g, or t
tgagcgcggcccgaccggcacgggctaggacagacggacgcagacggcccgacgacctgggcgttcggcggaggggcgctggggcctgactcgcgggtgggtgagacgttgacggacccggagaaagagggaaggcagatacgctgggaaacggatctggggaaggtgtgaatgcgaaaagtgtagggacagacgggggcagaagaacttactcccccggattgtttgcagacagcatatctgccgggtctccaaaggtcctttccttcaaaatagagtttagcaattgnagcagaagagagcttaaagttaaacctgatacatccccccttcacttgaggagaaattggtggttttctgcttttttaaaaatccctatttgtatctcctcttctccgagtacctgtccctcaagatattctctgcccagaggtacattctgcccccactttctgtctcttaaanaaaacaactttgccnatttaaaaaagaatnttgacttaggcagctttaattctctgcactgagtgttcttatctgtggatggaggtataagatttcaagagtaataccccctcccaatgtttcagtaataatctaaattcacattaagccttaggctggagaacatttgagctattcgctttagctactagctctgaaaacttcaaagcataacattcccaagtttatctaaaacttgaatcttaaaaataatgataattatctgttatgcttcaaagcataacattcccaagtttattaaaaacttgaatcttaaaaataaaa

SEQ ID NO: 266388 - DNA, 653 bp, Homo Sapiens
ctataaacttgtagttatccacctcaacatcatgtgactgggaatggacgaaggggaaaagcactggccagtctcacattgctgtcagctccacaggtaagtcctcttgccgaatctgatggtctcctaactcagggatcaaggtctgggtaaaaaactaacaacaggagaaaggaggaaaagtctttactctcagaaagggagccaataaatgaataatgcaaaaaagaaaggtaacattattttggtatctcgtaagagcctgggagcaagagaatgctcttagctatatttacagatgcccataagacctgatgaaattgtctcctttatttgaagctgtctaagatgggttgccaggagatttaaataatttaatctgtagaattttgtctgaatcttgatgatgctaataacaacatcttgaggataaacacagaataattctaatgcttgccttttggctcccattggttttatctattgtggagaaccacttttgggaggcaaaattaggacacgttgtctctgaaatgcacacaaacgattttgttgaacaacgaagtcacagaccaccacgtaactattaaacgcagttatgatttgttaagaaaggtgtccagaaacacagacataaaataactgctgcattt

SEQ ID NO: 266389 - DNA, 440 bp, Homo Sapiens
  misc_feature (164)..(172): n is a, c, g, or t
  misc_feature (274)..(274): n is a, c, g, or t
  misc_feature (302)..(302): n is a, c, g, or t
ctctgactgatcatgtagaacatggatatggattacatttacaagctcaggaagacggatcagttgcaaacatgacatgaagataatacctctaaatataactgtctgaggaatgatggaatggactgtttttattttcacctatctaagcttggaattaatgnnnnnnnnncatctttcctcacatgtggacaagacagtcctataaacttgtagttatccacctcaacatcatgtgactggggaatggacgaggggggaaaagcactggccnagtctcacattgctggtcagctccacangggtaagtccctcttgcccgaatctgatgggtctccctaactcaggggatccaaggtctggggtaaaaaacctaaccaacagggaggaaagggagggaaaagtcttttactctcaggaaggggagcccattaaatgga

SEQ ID NO: 266390 - DNA, 377 bp, Homo Sapiens
  misc_feature (356)..(356): n is a, c, g, or t
gctgaaggatcactgaggaaggggaagtgggcaaagcagaccctcaaactgacacaagacctacagagaaaaaccctttgccaaatctgctctcagcaagtggacagtgataccgtttacagcttaacacctttgtgaatcccacgccattttcctaacccagcagagactgttaatggccccttaccctggggtgaagcacttacccttgggaacagaactctaaaaagtatggcaaaatcttccttgttacagggtgggttgaggccgccttgccagtgggagggacaggcacccctcaggcaccaccccaccctcatttcaggaggcacaccgttgaggcccccttcgggccnttttgtgggtgttttttaata

SEQ ID NO: 266391 - DNA, 761 bp, Homo Sapiens
aaccccttggcaaatctttaaattctcccagaagtgtgtgtttcccagtttgaagggccctgccttcctacaaactgtgaaatttggcggggtgctgcgggggaggaacccaaatcacaaaataaacctagcagaactacctgtaccatcggttcactgttgctagatggcagagtgtgtgaagttcctggccaattggagaagcagatattaaagttttaaagcaagaaattgcttcagtggcatacaagtcacttgcccagaacacaagcccctgggtgggagcatggtgggtggaacagagactggaagaggaagaatggaagggtgggtgggccatcgaagcctcccatggaagcccccttcacatattctccccctttgatggctgccctgaagagtcagcccccaaaagcaggcttgcgggaccctcttcccagaggtccagaccagattcctttcagtctacttacccaagttgaagttctcacaggctggtaaaatgccagtgagcttatttgcaagccagggtccatatctgccctagcaaccccaacacgaagacttgaaggactataaacgtggacagagaacaggcaggccaactttacacaaaggaatctgttctcatgcaaatgaccctatgcaagagggctaaaagagggagccttggggacaactctgaagagccaactttttccccaagaagatgttgggggtcttcttaagggcatcatgatggtcttgcccactgtaaaggt

SEQ ID NO: 266392 - DNA, 978 bp, Homo Sapiens
  misc_feature (15)..(15): n is a, c, g, or t
  misc_feature (22)..(22): n is a, c, g, or t
  misc_feature (56)..(56): n is a, c, g, or t
tttggccctacgcgncccagtnttcggcaccaggtcttcaaaaggcataacgaagnaaaccgcaggctccttcaaacaatgcatcatcttcacttgcttcattaaatccagtaggtaaaaacacttcttcaccagctttaccaagaactgcaccttgtatatctgagtcaccgagaaaatgtatttcatcccccaatacccccaaggccaaggttattccagcccagaattcagcagatctgcccgagtccacacttttgccaaataagtgttcaggaaaaacttcaacctaagtatttgaaacataatcatatttcttccagagataatgcagtatctcacttagctgcacattcaaattcatcctcaaaatgtcccaagctgcctaaagcaaatatacctgtaagacctaaaccttctttccagtcctctgcaaaaatgacaaaaaccagttccaaaaccatagccacgggtctaggaacacagtctcaaccatccgatggagccccacaagcaaagccagtcccagcacagaaacttaaatcggccttgaatttaaatcagccagtttctgtgtcctcagtttctcctgtaaaagccacacagaaatcaaaagataagaatatagtttcagctaccaaaaagcagcctcagaataaaagtgcatttcagaagacaggacccagctccttgaagtctcctggccgtaccccactgtccatcgtgagcctaccccagtcttctaccaaaacacaaactgcaccgaagtcagcacagactgtcgctaagagccagcattcaactaaagggcctcccagaagtggcaaaaccccagcttcaatcaggaaaccaccctcatctgttaaggatgcagatagtggagataaaaaacctactgcaaagaaaaaggaagatgatgaccattattttgtcatgactggaagtaagaaacctagaaaataaatacatactcattat

SEQ ID NO: 266393 - DNA, 464 bp, Homo Sapiens
  misc_feature (22)..(22): n is a, c, g, or t
  misc_feature (34)..(34): n is a, c, g, or t
  misc_feature (56)..(56): n is a, c, g, or t
  misc_feature (161)..(169): n is a, c, g, or t
ccgttgcccttaaagaaaatangaagtccggggncagggggtgtatgttttacagnccgtccttaatttgaactaaccacattcaaagtgcctcaaaaagtcacatgtggttaagtgtctgcccatattagatagcatggctctagtaagtagcagagagnnnnnnnnncactatttatttttctctactccatcttctatgctgttagaacctacctttgagctaagatgatccatgcgctctccaccctctaacaacacagatgttgccgattataccaacagggccaggaaaggagcataaacccaggttaagccagaggagataggaagggtcttttcactgccttggagagcctctgtcttgatctgtcctgtcctgtcaccatgtcaagaacccttgtgtatgaattgcagagagtgtaaattaaaatacataaaaattgttaaagcaatataattat

SEQ ID NO: 266394 - DNA, 610 bp, Homo Sapiens
  misc_feature (196)..(390): n is a, c, g, or t
caagagtgaaatgcagggagccatcgggacggtggacaccttcactctgccttgtaaagaaaaggccctcctagagcgtaggagttttcttggagtttttgggtggcatggaaagttctcatcataacagcactgacaataacaaaatatttaacagtggttctcagtagtgggttgggtgacagtgaggaatcannnnnnnnnnnnnnnnnnnnnnnnnnnnnnnnnnnnnnnnnnnnnnnnnnnnnnnnnnnnnnnnnnnnnnnnnnnnnnnnnnnnnnnnnnnnnnnnnnnnnnnnnnnnnnnnnnnnnnnnnnnnnnnnnnnnnnnnnnnnnnnnnnnnnnnnnnnnnnnnnnnnnnnnnnnnnnnnnnnnnnnnnnnnnnnnnnntgagaatatcataaacattcaacattggaggaataggtaattcttttgaagcctcctgcaaaagcccatagtctgtagccctggctgtgtggcctagtgggctctgctagtgtctaagcctgatccagacctttcttcctctatatgtttgggaggcattcatgaagaattgagtacacatatatatgggtcagggtgtttgaaaggctgccaattcagg

SEQ ID NO: 266395 - DNA, 453 bp, Homo Sapiens
ctgaattggcagcctttcaaacaccctgacccatatatatgtgtactcaattcttcatgaatgcctcccaaacatatagaggaagaaaggtctggatcaggcttagacactagcagagcccactaggccacacagccagggctacagactatgggcttttgcaggaggcttcaaaagaattacctattcctccaatgttgaatgtttatgatattctcaagggtctctcaaccttgggcagaactgatattttggggccagataactcttaggttggggggggtctgtcatgtgtgggtgtaggaagggcttaggtgcatgctaaaatccttcacccactaggatggccactaggcaacgctgccctccaaattggtggacaaaaaaaggaggtctctaggacgttgccccaatgtccccttgggggggtaaaattggattcctcactgtcac

SEQ ID NO: 266396 - DNA, 986 bp, Homo Sapiens
  misc_feature (13)..(13): n is a, c, g, or t
  misc_feature (52)..(52): n is a, c, g, or t
  misc_feature (58)..(58): n is a, c, g, or t
  misc_feature (81)..(81): n is a, c, g, or t
ctgtccattttgnctaagaatcacatcctactgaccctaaaccacacccctnaccaantcagagggaaatctgaccataanccagcctgcaaatacatagcaggcagcctctctgtagtagccttggaacataatacaaatgatgtcagcatccctctgtggttgggtcagaactaagcactggctatttgcaaggctgagtccatattacccttccagcacctgaagtgccaagctgaggtctcaacatgggtgatgtgaaggacaagagagaatcagtggctgcagtccttctatatatctggtcactagatccgccagcttcttcaacttgttgggcttattatatctctgaaaggggacctgaacctgcatcattctgcaaaggagatgattcctgagagatgggtgaaatataatcactaactaaagagataaattcttcactttacttcctagtattgcatcccagaaagggttaaagtaagggatattggctcctgctgatcaggccacagtgtgacacattctataaaatgcatcacaaaactacattattcaatagacttgagtgttgcacctgctttcttatctccttgtaggtggttaagtttcccacaaatgcaatttgttaatatggggccacctcttctaacaaggtaaatctaaaatttggcaggcatttgcttggctgcaggtgcaaaatgaaagatcttttttctgctttgccaaaaataaaaattatgttgtgctctagtcctgggaaaaatattctcacatggagggtagaacctgaccccgagaaaggggactggaattctagagcccaaatcatgtgctattattcccaaaaggctgagtggggaatctgaagtcttgttttaaatgaggccaggtattgagcaaatctccctggtaagagagcccactgatatttggagatgtagccatttgtgatgataaatgatgactgttactcttatgag

SEQ ID NO: 266397 - DNA, 457 bp, Homo Sapiens
  misc_feature (26)..(26): n is a, c, g, or t
ccaagtgggtaatccttccacaaaanggccagcaccgttttccataataacattttaaaatgccactgaatattccatttgaatagaaatatccatctccccagggtggagtgtaggaaaatactataaacttttctttgcaagtaatgtttttgcaccgtcagttgaataatttatgctcaatctgccacaatgagacttttctatgtacaaatgctatttgcacacactatttgtgtacagatatgttctgttctacagcatcggttttggacgctggggtcatgagatggctcaggcagtactataaacatacactttcaacacacaatgcctcgtgcacacagatttcctgtatgaataccaactccacacagggcattgtattgtggactgactcaccagaaattgcacttccaacacagtcttcagtttggggaagaaacactaactcatg

SEQ ID NO: 266398 - DNA, 440 bp, Homo Sapiens
ccaggcctacctacggagaaggctgcccgcctaggtatttgccaaggccggatttaatggtcagaatttcccctctgatatgtcctagggtgtgatttaggtcagtagactgtgattccttagcaaaaaatgaacagtgataagtatactgggggcaaaatcagaatggaatgctctggtctatataaccacatttctaagcctttgagactgttcctgagccttcagcactaacctatgagggtgagctggtcccctctatatatacatcatacttaactttactaagtaatctcacagcatttgccaagtctcccaatatccaattttaaaatgaaatgcattttgctagacagttaaactggcttaacttagtatattattattaattacaatgtaatagaagcttaaaataaagttaaactgattataaatttatg

SEQ ID NO: 266399 - DNA, 576 bp, Homo Sapiens
tgatttcttcttgtcttcaacatcaacccatgtgagacccaggctggcactcaggtgctgaagggtaatatggactcagccttgcaaatagccagtgctagttctgacccaaccacagaggatgctgacatcatttgtattatgttccaaggctactacagagaaggctgcctgctatgtatttgcaaggctgatttatggtcagaatttccctctgatatgtctagggtgtgatttaggtcagtagactgtgattcttagcaaaaaatgaacagtgataagtatactgggggcaaaatcagaatggaatgctctggtctatataaccacatttctaagcctttgagactgttcctgagccttcagcactaacctatgagggtgagctggtcccctctatatatacatcatacttaactttactaagtaatctcacagcatttgccaagtctcccaatatccaattttaaaatgaaatgcattttgctagacagttaaactggcttaacttagtatattattattaattacaatgtaatagaagcttaaaataaagttaaactgattatatttgca

SEQ ID NO: 266400 - DNA, 661 bp, Homo Sapiens
  misc_feature (20)..(20): n is a, c, g, or t
aactgggagcatcataaagnctagagaaggcttacaaagcaagatggctgccactgagatcagcacactggggtttttaacagaaacctattacttgatttactgggagtggtagaaccctaaagaaccggtgaacatccaacactgaaatttgagctggctcttcctcagaaaggtttcagcggcttaatctcatgcaatcttgcaacattcctgaattcaaacccatgaagtagagagtcagcccgagaccctcttcagaatccaccgagtctgctgggcaggaagagctagcttgttgagttgtcctgctgcaaatgaaatagtaactttctcagaagcataggatattgaaagattcctttaagaggccaagtcctcaaaggcatgtatgcaacgtgaagtcatgggggcaggccttcctggttccaatgcatgttttcacagggttgtgtctctatgcttgaaggggagctcttgggcctatctgagggatcatttaccacttgctgtaggaaagtccagtggaaatcacttctagtggtgagtcttggccaaatatactcctatgtagaaggcctgtgtaggaggttatgcttggaacagttgagtagatgttctggcaacctgtgatggccttactaagtcatgacagtcagca

SEQ ID NO: 266401 - DNA, 466 bp, Homo Sapiens
  misc_feature (14)..(14): n is a, c, g, or t
  misc_feature (48)..(48): n is a, c, g, or t
  misc_feature (96)..(96): n is a, c, g, or t
acttcaccctcccnaaagctgaaatgcccaaatgttggccattaacangccatgaagcccactgtgcctgggcccatagccaaggtttccagttanggtatagaagaagtggtagtttttcacccccgcagtgtatagaaatgttttatgtagtactggaaaatttaatttgagaggcctaagaattctgagaatcttgaaactaataagctattggaggcttcaagggcagcatcacctgataaaaagggagtcccccatcccccagcccaattatgactataaatcctcaaatggagggaaatggtgctggatgattagccagaaaggggtaacaatgccggaatacagacagaataaaatctagcagctaagcccaacctaacaatcctagaacctgacaatcctagaactcctagctcactagcagtagacaactagatgctcccctccttcccacagatga

SEQ ID NO: 266402 - DNA, 439 bp, Homo Sapiens
  misc_feature (14)..(14): n is a, c, g, or t
  misc_feature (28)..(28): n is a, c, g, or t
  misc_feature (53)..(53): n is a, c, g, or t
agaaagaggttccnaaacctgaaataangggtcctccctaaaagatttccccngttccctaacctctggaaacctgaaaaatactacccttgtgtgcccaaaaaggagtttgaaagatgtgattaaattaaggatccttgagaagattttccctggattactgggtggtcactaagtgcaatcacatgtatccttataagagggagacagagatttgtccacagaaaataagaaggcagtgtgaccatggaggcagattagagtgatgtggctacaagacaaggtatgccagtagctaccacaagctagaagaggcaaggtacaaattgtctcctagggcctctggagggagcccagccctgttgcaaccttgatctcggcccagtgaaactgattttacatgtctggcctatgtaaaagagtaaatatgtattgtttt

SEQ ID NO: 266403 - DNA, 685 bp, Homo Sapiens
aggaaatcttaaagaaactctccaccttttctaagtagtgtatcaaaatctaaaccaaggagtctctggacaagaagctgggagaggcacaaactggacatctctctctctcatatccttcggcattgggttatctatgggagcaaggagtgggcacgcttctctgttacaaatagaaaacgattccagtcatacaggacacatcccactccaaatgatatttccaaaaacatacctctgacagtaactttgatagatggtttgtcaaatgtatctttctgggtatccacacctcttggcaatgaaatttgcagctcctcccttccataaatgaagtctctttccccaccatttgaatctgggctggcactgtgacttgatttgatcaatagaatgtggaagaagtgactgtatgccagttccaagcctaggtttcaagaggccttataaatgtctgttggaaccttacccagccatgaacatgttgagtgagcatgctggagaatgagagaccacatgaagcagaaacatgctttcctagctgaagtcatactagcccaaccaacatggcagctaacacatgaatgaggccaatcaagaccagaagaaccactcaagcagatcccagcccaaattgcccattcacacaatcaggagctaaataaattactgttgtcttaacact

SEQ ID NO: 266404 - DNA, 714 bp, Homo Sapiens
  misc_feature (291)..(310): n is a, c, g, or t
aaaaataaaattattctaaggatgctcatgtttaatccatgatttatccaaggcagagaatgccagagaattcctctcttgagagtctctgttcctggcttagaacacttgagtatttcccctccagaaaacatattttatcctgagctttctttctcactgaactgcatcatcattttctaaacagaatgctgaagagctgactttgagtctgacaggccctgacccaggaaatgagccctgcttgtgggcagccccttcctcaagccagcctactcaccccaagcccannnnnnnnnnnnnnnnnnnncccaggccaggggaggatccaggacacatgtgcgttgtctggccttggcagccctcagtcactcagagataaaaaggtgcaggcaaggggaggccctcaacacacctggtcactgcttttcagactcattcaccaaaaaatcccaggcatgggctgcccatagcccatgagcggtctccccaggatgacccgagtactaaaaaccagagaaaaggtgtgtgcagttgcaccagctcaccagcttcggtgtgtcgcttcccatgttgcagctcaggaaatgtcctcgagggaagtttagccccgtttgctttggattcgttcctgtttccttctaattcagcaggatgcctgttaacgaaccttactcggaagtctcgctttggtcagccatggttctagattct

SEQ ID NO: 266405 - DNA, 823 bp, Homo Sapiens
ttgagtggtgtcaagcaacaaagatttaatatcttctagttctaggtcagaagtctgaaatggctttcactgagctgaagtcaaggtgtttgcagtgctggatcatttctggatgcagtgggaggatctattccttgccttatgcagtttttagaggctccttaccctccttgtcttatgccactttatcccctttaaagcctgcagtggctgttgagtctttctcacatctcatcatgctggcactgaccctcttgcctccgtctgcccccctccctctgctgtgactgccttgggcccacctgggtaatccaggatcatcccccaatttaaaggtcagctgatgagcaaccttaattccatctgcaccttaattcccccttgccgtggtaacctcacgtattcacaggttctgggggattggcgcatggatgtctttgggggccattattctgctcaccacaaccacctttttgtagtttcataggtggttgaaatgaaagctgttgtcttgtatttttgcctcctagagatttttgctgtgagaattaattaccagtaacagttcaatatgggggacattctggctcatgaatctgaattacttggactagtgaaagaggtaggtatattatacaaagcagaggtcacagagaaacagatcttgaaaacttgtgttttaaaatgcaacaaactatttagtgccttgtaatgtttcttctattgttatgttggagctatttttctattatataatattccatgtatttacattttggttttataactaaacaaatcttaaagccacttaaaaagtcccttg

SEQ ID NO: 266406 - DNA, 788 bp, Homo Sapiens
gtgccctcatcagtgtgggtgggcctcctctaatccattaaggtcccagtggaacaaaatgttgaaagaaggatgaatttgctctttctgtttgagctgggacatccatcttctcttgccctctggcatcagcactcgtggttctcaggccttcagacttggacttaatcacacaccactgattttcctggttctctagcttgcagacagcagattgtggcacttcttggcccacatagctgtgtgagccaattcccataataaatctcctcttaaatgtatgtacctcctattggttctgtttctctggagaatcctaatactatgctcaatagttgcctaataatttgaattggtacacattggctgtatgaattcctttaaaatactcctatacatgtactttaccccagatttttcccatggtctctcaatgatttgctccccaaagactacttctaaagggattaattttcaataagtctttgaactcttgccattcagggaagaatacattgttgttatttttagtcaatgatgacccttttatacaagatctctagctcagtaaaaacttttagtgggagtatgatttgaaagagcagagaaagtcaatattccacttgagcttctagaaaatatttctagtttagactccgttgggacctaaactggacagaggaggcacatgtagattggcatgattctgtttcttgaataggtggcagccacacaagtgtttgcattaaaattattcttacaatttggcaaatatatttctgtgccga

SEQ ID NO: 266407 - DNA, 750 bp, Homo Sapiens
  misc_feature (99)..(179): n is a, c, g, or t
gaatggcctacctaaccccaggccagattgctaaatcataagaaaatggttctatcaagttttggggtggtttgctatgcagaaataataaccaaaacnnnnnnnnnnnnnnnnnnnnnnnnnnnnnnnnnnnnnnnnnnnnnnnnnnnnnnnnnnnnnnnnnnnnnnnnnnnnnnnnnagcatttatccaatttgaataacgcctcctataataagtcgagggggtagggctttactgcatgagaacaattctgtatattatcaaacacacagcagttccatttctcatctgagggtggggcatttcctattactgactgtgtctcatcatctctaaagtaaagagagtcaataactcactgaacgtctaagattcttttcagctctgaaattccatgactctaaatgagtagccggtgcttatcgtttatacagtggttttcaacacatcacatcacacacactagcaaaggtcggaggggaaaaaagcaccttgagaacatcccatcccaactgcccaggccatctgagtaacaggaaccaccccaccagtcaggaagagacggctgaatgcatattaaaacactccaagtatgctgcccttctggaatatcgttaaacaactcagtctgtcatatggtcctttgagtttttcaattaaaaaagaaatggcaaatgtaaatattaccatctctttttcagtctgctaatttgtgttcaggaaagtcttccaacaagaaaaacacatg

SEQ ID NO: 266408 - DNA, 932 bp, Homo Sapiens
  misc_feature (240)..(240): n is a, c, g, or t
tataattaattgtactatatgctgagtacaactaaaaactctgaatattatacgtaaaacacaagaagactctgaaaggtggagagaataaggcagaggagctagggatctcaggacccaaataatgacactgcagtagttccctgccttttcttttagcctcatatattccataattagagctaaagaagctgataacccagaagtgcaatggccacagacaaagaaagcgccagcaanaagcccagtcttttaaatactagtagagggacaccatagcaagacagaaaactttttgagaataaccattctacttcaaccaaacaccacagaaaaaaacattggtcacactcatagctgcaaaggccaagtagggatcctagatttccatcctcaccaagctgttatgaggcaccctaacacctcctccactggaattgtgtcagattaggccaggtacagagttgggactttaattcccatagaatggttaactagcctttccccaacttgtagtgttactggagaccatgtgggaagctaaaacttctacgtttatttgggagtaaagaggagcttctgtccttccctgctaagtggcatcagaggagtcctattggagaatgaatgctttcaccacttctaagcagtaaaaaagccttcctctaccttatgcaccccaacccccagcacccaggggtattagtagaggctacatgggagcagtagcttctcagccagagacatgtcagtggaggtggagtggagagtcaggattcccacccagcccaggggaatcaagaagctgccccatctgtagtgtaaatggaggacaagtggggaacctgaacatctacccccaacttgccgaaatgaaatggcacctcactatcttcatctgctggagcaaaatcaaacaaagccaactaaca

SEQ ID NO: 266409 - DNA, 716 bp, Homo Sapiens
  misc_feature (285)..(346): n is a, c, g, or t
tatagcggagggtggatcagaggacagcagcactgggagctggttggagagaatgagtaccattgctgaagccttgtcactcccccaaccgcacacacacagcaacatcctcaacgcccctttctgttccatacctctgttcggctatccccgcattggccggccagcctgagctgtccagagccctttcacagcagcactggggtgtgttaaaccctgggctccagaggcaaacaggtctgggcctgaaacatcaccgtagccctgacttgctctgtgcccttnnnnnnnnnnnnnnnnnnnnnnnnnnnnnnnnnnnnnnnnnnnnnnnnnnnnnnnnnnnnnnagttggtgatgattaaacaatggggaaatcaagtccttagcacatgtctggtgtataacgatggctgtgttagctttgtgtccttgttgattgtaatggcccagtccatgttgtaatctgcccctcagggagttcttgtctttggacataaatctgaattctcaactagaaacaagatgtccccagcagccccaaaggaagcctctagtgggacactgaggggattggacatgctgttacccactgggacccggcacagggctgggcacacagaagcctggactgggttttatttgttcctttatccccagcactcagcacaaggctggtacagcatgcccaggtggctgggttctcaaaaatactaaac

SEQ ID NO: 266410 - DNA, 533 bp, Homo Sapiens
tcttctttctctgctctaatggtttgggaattttgcattctctttctgttcttcttgtggctgcccttaaacttggattccgtgtccgtttgtgggattatccgcgtctataacttcgtgatgagttcctgatctccgtcttccaaaacttgggaagtcatccgagggtttgttccagattgttttgggtaattttaaaattttatttcacactaattttattctaggaatcgcttcttcatcttactgaagttttgatgcgacgttatagttatttaggcttaacgggaggttgcatgggttttgtggccgtttctggtgtcttcctggtgtgtttggatttgtgcttcgccacgtccgcacgtcacttctgagcccagtgcggtggcccctgagctcctgccggtcacgggctgtgtgttgtccccctcacaccagagacagtcgtttcttctcttaactcttaagccctcctcagtcactcggatgaactgattaaattctgtgcttttaatactaagcattaaaaaaaa

SEQ ID NO: 266411 - DNA, 608 bp, Homo Sapiens
cctgtagtcccagctacttgggatgttaaggtgtgaggatcccttgagcccaggagtccaagacaagcttagccaacagggcaagaccccatctcaaaaagaaccatgaggcttctgattaactatagcacactgtgtctatttcttctccaccctgactcattaaaatgacaataaaatacgaaaaatacaaaagagagaagacaacaggggaagagagattttaacacatttctggatgatgctaattaaatttagcagaatgaaagaagctataaatggagtggccagccagagagggttatagaaacaagttttattccataagaatccctggagatggtcataaattagaagtgtacagtagtaccaaggtaggcagggataagttactgtactaaaaacagaaggtagaaacactgtatgtagcacttagaccaaccccaccaaagttccttttcccagtccccaaacccacagaagaccagtggtttagtctccagagaaattgaatttgaggagctgtatactctgaaacttggtggagaaggggaaggtggttggactgaaatggatgaaaataaaattctagcaaccttggtttatac

SEQ ID NO: 266412 - DNA, 325 bp, Homo Sapiens
  misc_feature (63)..(63): n is a, c, g, or t
ccagagtctcaagacaatctaagactggagacttagattccccagggatacccatgacttacntgtcgaattacttccgctttttccatcctgtgattgaatgtctacctagagacttcatagtctcatagaatccaagcataggaagggccatagtggggttcatcctgggctaccacacatatgcattgcatccctaccccagcacacccactaagctgttgcccaacttcttcctaacaccttgggacaactgggaagttcattacctcatcaggtagcttacagtttcagtcagttctccattaggaaagttcttgccttt

SEQ ID NO: 266413 - DNA, 705 bp, Homo Sapiens
  misc_feature (484)..(508): n is a, c, g, or t
  misc_feature (516)..(648): n is a, c, g, or t
atcatttggctgcccacttgctttctgcattctttttttctctttaaaattcttagcgtcaagttgggaatgacggaaacaccaatttatgtcccaaattcttcccctttctggcacactgctttattataggcggttcccaggtcttatgctgttatcattcaaactgcagattacaagttgcacagtcagcaggaatgaaaaggatcaacagagtcttttgttttttccagcaaatatcctgagtttccagttagccatgcagggaaacacagtcattttcatagtattcactgtggtggctttcctctggatcacatcccaggctgcctcaaacctgttggtatttgtggcggtcatcccagagtccaaggtttcttcttcgtcagaaagccttggttcctgttctgagaacagcattttcctatttgtttttctccagcagtgcaaagttcctttcccttttctgggttacactgcttcnnnnnnnnnnnnnnnnnnnnnnnnnggtaaacnnnnnnnnnnnnnnnnnnnnnnnnnnnnnnnnnnnnnnnnnnnnnnnnnnnnnnnnnnnnnnnnnnnnnnnnnnnnnnnnnnnnnnnnnnnnnnnnnnnnnnnnnnnnnnnnnnnnnnnnnnnnnnnnnnnnngatgttcctaccttacctatttcctgatttccctttaaaaatagcctgggctacaga

SEQ ID NO: 266414 - DNA, 689 bp, Homo Sapiens
acatttactgtactacagggaatctctcatttcaaaatgacctgtgttgcagttattgtttataaaactgttcatttatctgacgtaaggggctaatcaaactgcttaagtacattcctggatgtttggaagatttttaagcgccatagagagggtacttatgctatggaaattgtgtttatatatatatgcataattgccactgaaattctgaacagacccaaaggaagaaaaatactgtgatttaaataaagctaacataattaatttatatctattttatatttgacttagtggggataaattgttttgtgggaaaaccatattataaaatagtctaagttttttatagttgaggaagaatttgaggtgaaagatcatgttaattgtaacaattgcccagtactttgtgttcactatgtgtctggcactgatttatgtttattaatttactacatcctcagaacaattcagtgaagtaggtattactaatattcttactttgagattatgaaaccgaggctcaggtagtttaaataaatttgccatgtcacacgcagtggctcatgcctgttataaccaacactttgggatgctgaggcaggaggattgcttgaggccaggagttggagcccactctggggaaaacatgttgagatcttgcctctgcaaaaataaagtaaaataaa

SEQ ID NO: 266415 - DNA, 1059 bp, Homo Sapiens
cacacactaaattaaatggtaataatttctatggagaaaaataaagcaggaaagtccttgtgcgatggtgacatttgagccatgacctcaaggaaataacagtgagccatgaaaaaatctgaaggaagaactgcactctaggcagaaaaaattgacaagcgcaaagaggtcttggtggtgcatgcctggtgtgtctgtctggaaagcaacagggatgcatgtggctggagcacagtaaatcaggtaggagtataggaggagaagcggtcttagagagaacatgctaccagattatttggggcccacaggctattgtaatgactctggcttttacagaaaaagatgggaaaccagtgggagctttgagtatccaggggtgtgatctgtattttgacaggctcactctggctgctgttgagaacagactgaaggaagccaaggacagattcatggagacctcttaagagtcaacagcaaaattccaagcacagatcatggtggattagaacaagaagttagtagtggaggtagtaaaaatggaagcccaaaggttattctcattccagcttctaattagtgtcagttcctctcagattctggcattagataattgtcttgattttgtgcgtttttcttaattttcggttttcatgattgttagataccattctgaattagatattgtcctgaatattcaactgtacctaattatgatcctgtacttaatatgcttaaaacatggcagatgcttggtaaattcttacaatgaatgtgtatcttaaagggtttgggtagaatgaagtagatttatcttcacaagcctattttcaggaccacatttctattgttattgcttttctctctatgattagcatatatacccatactttagctacttgtgttctttaggcttatttaggagatggatggtggatttgtatagtttaattttaaccttaatactcagtctttctttttaagggtttcacttcagaatatgtgtgtttgtgtatgcatgtgtatatacatatgtaataaaaatcagatatattcaaaagt

SEQ ID NO: 266416 - DNA, 803 bp, Homo Sapiens
  misc_feature (13)..(13): n is a, c, g, or t
  misc_feature (34)..(34): n is a, c, g, or t
  misc_feature (57)..(67): n is a, c, g, or t
  misc_feature (504)..(544): n is a, c, g, or t
  misc_feature (769)..(769): n is a, c, g, or t
ctgttcaaaagtntttaaaaccaaccaggaagtncagcttccatttcattaagaaannnnnnnnnnncaagacatggtgcagtatctactagcttaaagtttatcactccattagggcttattgacagcagaaatgtgaatgtagtaatgtagaaataaggaagagagcacttaagaaaaaaacagtacagaagttttagagttttttaaactttaataatatgcttgactaatatagtcaaaagtgatatgcactcgtgaaattaacccattttctgaagtccaaattagctattaaagtctttttttaccaaaaacatataaggatttagtacactatatagattacatagctttcctaccaacctaaagcttatcaactttattattgtctactgattttcaaactaggcattaaatttagggtgagaaagaagtgatacactctgtttcaactagggtggttgcatattatcctctctttaaaccgggcttatatgtaannnnnnnnnnnnnnnnnnnnnnnnnnnnnnnnnnnnnnnnnctgaaatggagataagatacataaaatacccagaacagacctttgtgtgtatacagtgtatgtatacataccatatgtagcattgttatgtagtattacataaattacatgaaattttgcataagattagtaagcaagtcactgaaactttattaacaataagtatgggcttggcatggtggctcatgcctgtaatcccaaagctttctgcagtgggagttttgncttgaggtgaagagtttgagaccagcctgggcaa

SEQ ID NO: 266417 - DNA, 591 bp, Homo Sapiens
cttcgataatacatggtcactatatggttcaaactctaagataaggggaaaatctcctggagttaactacaatcagatacatactatatatcaaattgatatatagtatatatcaaatgtagaggacatcagaccatatcattgctcatttcttctgcaacacttactttcctgaacatgatgctttacttattcttttatcaaaatattcatcttgacacatataaccagaagttttaagagctatgaggaagtcaattcagggcattattaactgaaatttctagttatacaaaagcaggatactgtcgtagtgcaggattaatttaggtatgtggcagagggagtttaactgaagcaagaccaggcagatcagagaccagtggtcagagttaggacaatcaattcccagtcagtccaaaagcggggtgcccattacatggctcagttgaatgtgggcactgagatttcctgtgaatgtgaatgtgaatgtcaatgtgggctcagtatttcctgactcaaaggaaactcagtctgaggtatacctgagggtgagaagaataccagctgccatcaaaagccattggaaga

SEQ ID NO: 266418 - DNA, 431 bp, Homo Sapiens
  misc_feature (395)..(395): n is a, c, g, or t
cgacaaaaatacatggtcactatatggttcaaactctaagataaggggaaaatctcctggagttaactacaatcagatacatactatatatcaaattgatatatagtatatatcaaatgtagaggacatcagaccatatcattgctcatttcttctgcaacacttactttcctgaacatgatgctttacttattcttttatcaaaatattcatcttgacacatataaccagaagttttaagagctatgagggaaggtcaattcaggggcattattaactggaaatttctaggttatacaaaggcagggatactgtcgtaggtgcagggattaatttggggtatgtgggccagagggggaggttttaactggaggccaggccggggggcaggatcnggggacccgtgggccggaggttgggggccatccatt

SEQ ID NO: 266419 - DNA, 765 bp, Homo Sapiens
  misc_feature (441)..(441): n is a, c, g, or t
ctttgatgcttaatcctctcattttgcaggtggaaaaatgtctgcctcagatacaggcaaaatccaaatatggcccatgaagaggctaaatatgatttagctctcatctctgcctctaggcacattcctagcacactccaccttactccctgtgcacatcactgtctcagtgtgccgtactccttcctgtcctagggcctttgctttggctctttcttctgcttagtgggctattcccatctcccacccttccccatgccctttgcctacttaattcttacttatctttcagatcacattttaaatgtcatttatttagggaagtttcccagactccctcagacgaagatcaagatcccctattacacactttaacagccctttggactttccatcaatccaattaatatggcttaaaatttatatattttaatgtctacntcccactattaggctgtaaaagcccatgagggccagggaggtctattttgttcaccaccaactcacctgtacctaacaagtgtctgccacgtaatagggcctcaaaaatatgtgttaaataaacaacttcattgttgtgactcatccaaacaaaaagagatgtgttctctagaaaaagttaaagtgaagactcccttgacaatatccatcaggacctgagatgtaaaagaactattcctaaatactaatttatatcacttttctgctgccatctgttttccagatggaaatctctccatctatagtatctcagaaaaaccttgc

SEQ ID NO: 266420 - DNA, 754 bp, Homo Sapiens
taacaaagctggagcacacaggtgcagcccttgtacagaacaatggaaatggcatggagacaattgctaccagttctataaagacagcaaaagttgggaggactgtaaatatttctgccttagtgaaaactctaccatgctgaagataaacaaacaagaagacctggaatttgccgcgtctcagagctactctgagtttttctactcttattggacagggcttttgcgccctgacagtggcaaggcctggctgtggatggatggaacccctttcacttctgaactgttccatattataatagatgtcaccagcccaagaagcagagactgtgtggccatccttaatgggatgatcttctcaaaggactgcaaagaattgaagcgttgtgtctgtgagagaagggcaggaatggtgaagccagagagcctccaatgtcccccctgaaacattaggcgaaggtgacctgattcgccctctgcaactacaaatagcagagtgagccaggcggtgccaaagcaagggctagttgagacattgggaaatggaacataatcaggaaagactatctctctgactagtacaaaatgggttctcgtgtttcctgttcaggatcaccagcatttctgagcttgggtttatgcacgtatttaacagtcacaagaagtcttatttacatgccaccaaccaacctcagaaacccataatgtcatctgccttcttggcttagagataacttttagctcccttcttctc

SEQ ID NO: 266421 - DNA, 513 bp, Homo Sapiens
  misc_feature (107)..(107): n is a, c, g, or t
  misc_feature (499)..(499): n is a, c, g, or t
caagatctcaaaacactgaagcagaccgtaccaaattgactttattgttttaaaaccagccccttctgtctgccaccacccgccaccccttcccgaaggggaagaanaaaaatcataatagatgtctctccagcgtgcacctctgttctcctctctctaatggcagcttgggaccctgaggcagtgacgcttagtaatgtatcctaatagtcagtgtttgtctgacaaatacctagtgaccacaagcctaatcagggccgccatgaattaatggtcagtgtagtgatgggtgctgaatgatcataaaaatagcttgggaccctgaggcagtgacgcttagtaatgtatcctaatagtcagtgtttgtctgacaaatacctagtgaccacaagcctaatcagggccgccatgaattaatggtcagtgtagtgatgggtgctgaatgatcataaaaatagcgaatactgggccgggcttggtggctgatacctgtaacttnggaaacggaggcag

SEQ ID NO: 266422 - DNA, 366 bp, Homo Sapiens
  misc_feature (12)..(12): n is a, c, g, or t
  misc_feature (59)..(59): n is a, c, g, or t
aacctctggtcnccctctccctaaggccagcttggggaccctgaggccagtgacgcctnagtaatgtacccctaatagtcattgtttgtctgacaaataccctagtgacccacaagcctaatcagggccgcccatgaattaatggtcagtgtagtgatgggtgcctgaatgatcataaaaatagcttgggaccctgaggcagtgacgcttagtaatgtatcctaatagtcagtgtttgtctgacaaatacctagtgaccacaagcctaatcagggccgccatgaattaatggtcagtgtagtgatgggtgctgaatgatcataaaaatagctaatactgggccgggcttggtggctgatacctgta

SEQ ID NO: 266423 - DNA, 454 bp, Homo Sapiens
  misc_feature (50)..(50): n is a, c, g, or t
  misc_feature (55)..(55): n is a, c, g, or t
  misc_feature (65)..(65): n is a, c, g, or t
attaaattccagggcgggccccctgaattaggccttgtgggtccacctanggtantttggtccanaacaaaacactgaactattaggaataacattaactaaaccgtcaactgccctcagggtcccccaagcctatttttgatgaaccattccagcaccccatcacctacactgacccattaaattccatggcggcccctgaattaggattgtggtcactaggtatttgtcagacaaacactgactattaggatacattactaagcgtcactgccctcagggtcccaagctgcccattagagagaggagaacagaggtgcacgctggagagacatctattatgatttttttccttccttcgggaaggggtggcgggtggtggcagacagaaggggctggttttaaaacaataaagtcaatttggtacggtctgcttcagtgttttgagatcttt

SEQ ID NO: 266424 - DNA, 687 bp, Homo Sapiens
gtgtgagccaccatgcctagccatgactggcttcttctgtacattaatcttgctgccctatgggatatttcagctgtagcatacacaacccactagcaacttcctcgtgtctctcaattaaaaactcttgcaagacaatgcatcattttgaccaagtcccagaagttattggttttcttagccagttagataggcccaacttggttaggtagttaactccgttaagctgtgaccaatatgagctatgtctgttggacatcatgggtttgcagagatttttctgagggaggagggcagaggatgggcagagcagacctacattattacagaaagatggaactaggattccaacccagggtcttctgacccccagtcaaatacttcttccacttgaagaagcaacctattaaaattaaaaaagttaacatgaagctcttttcactttttccattgaaaagctactagcaggctacacatatattacaatctgaattaatatactatgcatacatgtaaatattgactgatttctttagtaccaataagttggtattctagataggtcttcattatttgtcacaaagatagcaaactgttcctatgatagtatcattgaaggattttgtgaacacactgatttttaaccttacttggcttagataagtggtatacagaccaatccatagt

SEQ ID NO: 266425 - DNA, 886 bp, Homo Sapiens
  misc_feature (189)..(206): n is a, c, g, or t
ttttttacaaaaaggaaaactgacagagaatttaaagacagacacaccctgtctctccaaattagaacaaaacatcactagctctaattggcagggatctcctattaaatggtcagaggtatactagtggatacaaacatactaacattttttaaagcttgccaaacccatgttacgttgtgggagagnnnnnnnnnnnnnnnnnncaacctggtcatttactaagggttctatcaaattcgcagtgatgaggggtacaaaaggaaaagatgtttacttgtacaagaattccttactgccttcaactatataaaaatgaagcaaaaagaattgtgcagtgcaaatatgactcattaaaaatgcttctgaaaagaatcccgggtaaatatctaaattaatcacctttttttcaagcacctgatataaaacacgtgtgcacgtgtgtgtaatctgaggaaaacccccacagcacaggttttccacctcactgaagcatcagctttgagccctaagtccttcatcttctcccaccttattgtttcccttccttttctcctaacccacgactccaagggtgatcaacagtgtagcttagtagttaagaacacaagactttggaatctagcttcctgggtttaaagcccagttccgccacttactagctctgtaatccttggcaagtgtcttaacctctctgagcctcagtttcatcacagggataacagtgcctggctcgcagggttatttgagtaaatgaaatggtatctacaaagatcatttatgcgcccaacacagaatgggagttctataagttatacaccaccatctttgagttagtctttgctcagattcctctattccatgtattcctgttgtttcacccgca

SEQ ID NO: 266426 - DNA, 900 bp, Homo Sapiens
  misc_feature (62)..(174): n is a, c, g, or t
  misc_feature (678)..(715): n is a, c, g, or t
tgagactataggcatgcatcaccacgccactacaccttgcatactgtttaaaaagtttatgnnnnnnnnnnnnnnnnnnnnnnnnnnnnnnnnnnnnnnnnnnnnnnnnnnnnnnnnnnnnnnnnnnnnnnnnnnnnnnnnnnnnnnnnnnnnnnnnnnnnnnnnnnnnnnnnntccactaaagtgtgaattctaagagactgccaggctttggtctcttaaaccgtggaaccagtacaacatcatttctgccacattctctgggtaatgaagaagtgatggggcagctcaggttcagtagaaggtcttacataagatgaggaggggaggagaaatcttttgaaagaagctgccatactcacctgtaaaatgaaggaggtggcctacatccctaaaggccttcatggtttttatagtctatgattctctgatgtagtcaatactcatatttctgagagtacatcacattgacctcagggatgcccatttctccataatatcactgtcagtcatttagcattaagcacatgcaggcttgcattatgatttaccttatgaatgtagttactctgacgtcccaacttgataagatcctcaagactttatgcctccttgaaactccattacctgatgcagtgacctatatctcatatgaggccttcaatgaagatgtggtcnnnnnnnnnnnnnnnnnnnnnnnnnnnnnnnnnnnnnnagtatcactgctgttaaactatcctgtctaattgaatgagtgccaagcaaccatttacaaagttgaaaaataatgccacatgacttttatgattttataggccttttaaaaatagactttagataaaatagagatgcaaatattatttcccattgagctactgtttgctttaaatgcacactcgc

SEQ ID NO: 266427 - DNA, 452 bp, Homo Sapiens
gtgattgatcctcggacactccgagcgacaagagcttagatggcattctttgcctctgctgtgcttagtctatggcacactaatctgtacacacacatctctgtcccctcaatcctccccatgagcctgcattcccctggcagccctggcaaggtacacgtctgtacaatgctatctatgacccccgtgttctcttaaaggcagagggagaaacactccatcttggagccacagccttgcactttgtgttgcacgagggctgcggcacattggccctgggtccatcaggaaaacaaaaggagctctcttcagagaccacccaacttaccatggcagccgagcctttccttgctggaagcaaccagaattgccttatgggttacagggggcaagggggggcaaggaaacccagttgcaggaaagttggttttagttgggctaaaaaacccttt

SEQ ID NO: 266428 - DNA, 550 bp, Homo Sapiens
agatcagtcagaaaggctttctgagaaaactggcttggatttctgggtctgttgcagtcaattcaagatgaactggcttgtatcaatgaagcgctcaatgcagttcacaaaacaggcctcagcccgactgtccaactttggcccaggcttgtccatgcacttctccccaacaaagttcagtcatctggtgcacccagctgctggaagcgctgcttttgagtctctacctcaatgaaaatgctgcaactgcgggtccactgcacccaaacccgccgcagaggaagagcaggaggaatccatccccgggacaaccatgcttgcagagacgaactccgcaccaaccttcacgtgtctccacgacctagttaatcaatttaaaatgaggtcactagggtgggccccaatccaatatgactgataactttataaaaaggagagatttggatacagaaagagacagagtgaaaaccatgtgaagaaacataggaaaagatggcagctacaagccaaggagaagcttgcagtgtgtattcatctgttctcatgctgt

SEQ ID NO: 266429 - DNA, 643 bp, Homo Sapiens
  misc_feature (41)..(41): n is a, c, g, or t
  misc_feature (281)..(281): n is a, c, g, or t
agagtctattgtaaagatatggttcccatccagcagggatnctatggtagtggacaaaattttatcagcatctttccagagagcaaataatttgaagatacgcactaataccatcaagaactccacctttttaggattcagggactgttgtgtgtttattgcttgtgatggtaaactctcatctaaaattttcctgcttagttcaatctaggtgatactttattaatgccacaattaagcaattctgatttcttattatcagttgatataggagatatttncacaatatgctgaacaggttcctagaaagccccctttcctatgcatagagattatgacaagctatatagagaccctaagtgtatctagattaaatgctttagtccagtgtagggaggaatcaatgaaggtgaactaaccttaacttccaacgatgaaaaatcttctgtgctgcaacatgaggctccttcatatcattgaaatagtgaaccagagaaatgtatccacgaatcccacccacactccaaggacacagaaaaaagtatttattccctcccttgtggaaagtgtgcagtttgtagttccctcatgcataaaatccaaagtatttagctttaaaatgttattttgtgtgcggatctaa

SEQ ID NO: 266430 - DNA, 503 bp, Homo Sapiens
tagttgactgagtctgttacaaataatctcttaattatgtgacttactccactcaaaagacttcagcaattcaccattcctctgagaccatttacaggttattaaaaaatctaagttccgtatagttggccttcaacttggatgttaagcttgacatgattcctttccacgtgttttcattttcttctgcgacaggacctcctgccccccagaatagtgcatttatctcccaaattcaatcatctatattaactggggacctgctatctggataagtgatatccacaagtgttccaagaaactttaatattaataactttatcgcaatcaatagttccaaattcatcagacaggatttcactagagttgccaaaaaggaatacaatttaactggctctgagagccttcaccctgttctcatcccgtgtttccatggaagatgcaaagaacagagacacacgagaaaggtggacaggcagagtcaagaatgaaacggaatgagg

SEQ ID NO: 266431 - DNA, 756 bp, Homo Sapiens
  misc_feature (586)..(605): n is a, c, g, or t
  misc_feature (713)..(713): n is a, c, g, or t
aacatctttacacttagggtttgagtttctgtatctataaaaaagggtttggattaagtgatccctggcacttataaaatgttagggcttaatattattcatagatcgaggatagtttcattcttagtcgcctccttagtcactcttcctataccaatctgagaccattttacaatttagaaaagacaaataactggttgggttacttgatagtataataaccaagaaaaataattttagaaggaattaagtttgaaaccacatgttaacaaattctaccaaagtgggatttgcctgtgattaaagatgctgtaaacatttgggccagtagttataatttgaaaaatgtttatagccatatatataattttttatttaaatatacagtttcatcagtctattagtatttcattaagtctaagatgccatcagtggttagcaaacaccactgttttatgcactgctaagaaagaataaagggctgtgtgcagtggctcacacctgtgggaacgccaaggcaggagcatcacttgaggccagaagttcaagaccaacctggtcaacattgtaagaccctgtctctacnnnnnnnnnnnnnnnnnnnnttagctgggtgcggtggcacatgcctgtagttccagctactctggaggctaaggtgggaggattgctagagccacggtgttggaagctgcagtgagctgtgaccacanccactgcgctccagcgtgggcaacagagtgagaccctgtttct

SEQ ID NO: 266432 - DNA, 685 bp, Homo Sapiens
  misc_feature (128)..(128): n is a, c, g, or t
  misc_feature (618)..(635): n is a, c, g, or t
cccagtttgcttaggaagaaaacaaaggacataagttagttctcatgtcttcccagcaccctaaatactcgggctaaacttccacagtcagaccgtcagcttcaggaagggctgctgttgggaacttnttttttagtttgcagttagttcagctccagccaaaaacctacaaaaagccactgcaagccctctgcctgctcgtataagacaccttggttggcccctgtgactgtccatccataggatggttggccattgactgcacagagaggtagggcaagataaaacgactcatttgtggatctgactccttgtacttctgtttggattcaaacagaggaagatagagtagtggccttgggaaaccgtggagagagaaaaggcatagtcagaatgttttcagaggagcgcagacttttcaaaacccctctcatcacgttcccactgaccttcagttccagtgctgtggccacagggtgtctgcaccccaacttctttgccaagaaattaatgatctgtgaagacacacagacatgaggcggacttactatttaaaggaatcctgaaacgaatatttttctgatacatatttatcctaatatatttgctgagcatggnnnnnnnnnnnnnnnnnnccctattttggagtttttgggttttttaagcctagggaatgcctaatatg

SEQ ID NO: 266433 - DNA, 858 bp, Homo Sapiens
  misc_feature (279)..(279): n is a, c, g, or t
  misc_feature (298)..(298): n is a, c, g, or t
attgttgattatttgtgtagctttctaaggcacaaggtcactttctgatacctgtaagtttctattagaatggtgatgtgagagaagtgggaaaagcatgttctttgactaggcttaaagggttaatgactaatactccagccccagggaggatcctgaatcggctttgaagttagacatgggtttgttaacaatctaacctgtatcatcagtgataaagggggggaatacggttcatttcacctgagtataaagatgtgtgaaagtgcttagcacacntgtaggcattcacaactcngccttccaggacccctgtgagcaagctcatgaaaaagtgactgttggtaacacagcttgtgtccagtcctggagtatcctggctcttgtatccccatgcacaagactgctgggtgtcctcctgtattcactttactggttttagcctgaaccaacaaccagaagccaggcccctagtttcttatttctgacttctcaccatcccatctgcactggtaaagtttgcccatctatgtagccactcctgctcattttaactaaaatgtttagctttcatcccctcagtgtatttactgtggataccaagattgcttaagcctccacacagaagtggggcaccttggacagcactggcaaagcttctacagttaccataatatcataaacccttccgccacctccacttgaggcctaaaacaaggatgtttatcttttctgccttagttcatagtttgtgagactcatattttcattaataccactaatttgtcaaaacacaccttatttgcctgctgtgtaagataatgtaacctaaaaataaaggtctttttctgaatctta

SEQ ID NO: 266434 - DNA, 782 bp, Homo Sapiens
  misc_feature (286)..(523): n is a, c, g, or t
  misc_feature (536)..(550): n is a, c, g, or t
  misc_feature (553)..(593): n is a, c, g, or t
taaaatgcaaatagttctaacagagatttcacataaatcctgatcatgcatacttcaagtcaaataaatttatcaaaaactttttttcttagtgtattgaccaaacatgacaataaacacagtagagtcctaaacatagagaggagacatcattgaatggagaaagagattgaaaagaatgaaaagctgagagtgctgaagacaaaacttagtgccatttacactatgacttaagaatacaccaggctgggcgtggtagctcaggctgggcgcggtgcctcacacnnnnnnnnnnnnnnnnnnnnnnnnnnnnnnnnnnnnnnnnnnnnnnnnnnnnnnnnnnnnnnnnnnnnnnnnnnnnnnnnnnnnnnnnnnnnnnnnnnnnnnnnnnnnnnnnnnnnnnnnnnnnnnnnnnnnnnnnnnnnnnnnnnnnnnnnnnnnnnnnnnnnnnnnnnnnnnnnnnnnnnnnnnnnnnnnnnnnnnnnnnnnnnnnnnnnnnnnnnnnnnnnnnnnnnnnnnnnnnacacaccatcttnnnnnnnnnnnnnnngcnnnnnnnnnnnnnnnnnnnnnnnnnnnnnnnnnnnnnnnnncaatgtacagatttttgtatatcaaatagacctcaataaagctgtttttaaaaaatgtgcctactgcagccactctgtaaaaccgtttggcattttctcaaaatctaaacatagagttatcacgagccagcaactccactccttatccagagaaatgaaaacatatattcatacataaaaacctgtaag

SEQ ID NO: 266435 - DNA, 423 bp, Homo Sapiens
attcggcacagcaagatagtaagtcaaggagcatctgtactccatttattgacaccccatttaaaaaaattgttaaaaactatcaaactatgaacatgaagtgaaggatgcatgtttcgatgtagtctgaaattagctttcaacatgaatgaagtgttaggttttagcttcgtgggcaactttgtctgattttcttccattgacataaaaatagtctcaggcttgtgtgggaaaattaagtatatagatactattgcatttatcaagggagatataacttgtggattcattctataatgttttacaggagaattttttttatctcagaaataagaattttacatctctacaagtaaatcagaaatataattagatacataaattcataaacatacaaaataggtaaaatgattatatggattt

SEQ ID NO: 266436 - DNA, 888 bp, Homo Sapiens
aaaatttctaaaacttgtagtgagacagccttgaatttaaaatcagaagatgcacattctgtttttacctctgtcactgactctgtgggtctagccatgtcatttaaccacacttgaatttcaggtattttgtctgtaaaatgaggataataacgcctgtctactacattaaaccacaagatggtttaaaggttagcataataaattattagagtatgacctaggagttacctaatctgacctctttattttacagatagaagtacagaaaggtaaattgaattgctcaaggtcacccagtgtgtggcaaaatcagaactggaaacttaggtcttctgccagtcccattcaagggctttttccattgtacagttaaattatatgttgtgtgtaaggcatagtataaactgtaaaccatcatgcaaatgtcagatgattgttttccctcagtttttccagcgctgtttgttacccttattactatgcagtgtttaaatggatgagagtggtaagaaatgaaaaatacatcactaaccagtggtcatagtaattacattttcagagaaggccatggccattagaaagttcaagctccagggcagtagtcaccttcagctttctccaaagctttagtcccttccctgctggcttccatcccctatgagcctaacctaattctcattattgctgtgtcctgcccatgtggaatgggcagcaggtggtcatcagtctgaatcaattactgtaagacctcagataattagagcattactcaaccaaagcaaagtatattccacttttatgggaaagtaatcaatctcaaaataataataatgataataataacaagaagagaaggaggaagggagggaaaaagaaagaaagaga

SEQ ID NO: 266437 - DNA, 730 bp, Homo Sapiens
gtgacagcgcctgcaactgaaatttcagcagcgggagaagatggacaagagaaagctcgggcgacggccatcttcatccgataagaaagatgttaaatgcaaaaccagaggatgtccatgttcaatcaccactgtccaaattcagaagctcagaacgctggactctccctttgcagtgggaaagaagcctaaggaataaagtcatctctctagaccataaaaataaaaaacatatccgagggtgtcctgttacttccaagtcatcaccagaaaggcaactcaaagttatgttgacgaatgtcctatggacggatttaggacgaaaattcagaaagaccctacctagaaacgatgcctaatttatgtgatgccaacaaggtgcaatcagactcattgccttcgacatctgttgacagcctagagacatgtcaaaaattagaacctcttcgccaaagccttaatttatctgaaaggatacccagagttatattgacgaatgtcctgggaacggagttaggaagaaaatacataaggaccccacctgtaactgagggaagtttgagtgatacagacaacttgcaatcagagcaactttcttcatcatctgatggcagcctagaatcttatcaaaatctaaaccctcacaagagctgttatttatctgaaaggggctcacaacgaagtaagacagtagatgacaactctgcaaagcagactgcgcacaataaag

SEQ ID NO: 266438 - DNA, 661 bp, Homo Sapiens
gtgctccaataaaactttatttacaaaaacaggcactgacttgcaggctacagattgcagacccctagtctgattgaattttagctcctcttcttccacatctaccatttccaatggactgaaaaaatggcaccctaaagatatccatgttctcatctctgaaatttgtacatgttaactcatatgattaaagaaaagagaagttctttgcatatgtgattatgttaagggtcttgagatggggagattattctgaattatccaggtaggtcctaaagcagtccacatccatatcccttttaagagggagggaaagggagaagttgatgatgccccacacaggagaggagaaggcaatggggccaaggaggaagacgttgggatgacgagtctacaatgcaaggaatgccagcaaccacccaggaattggaagaggcgagcaaaggaatctttcatagagcatccagatgaagcccagctttggtttgtgcttgatttcagctccataagactcatttcaaatttctggcctccagaactgtaagagaataaattgatgttgttttaagccatgaaatttgtggctctaggaaacttacccccttgttactcatgactattgtctcactttttaaaaaaattttataaaatctatttattt

SEQ ID NO: 266439 - DNA, 777 bp, Homo Sapiens
  misc_feature (18)..(18): n is a, c, g, or t
  misc_feature (367)..(375): n is a, c, g, or t
  misc_feature (404)..(515): n is a, c, g, or t
  misc_feature (540)..(652): n is a, c, g, or t
  misc_feature (724)..(724): n is a, c, g, or t
agagagcagcacctgagncttcaataccctgtctacacaactattaggctcttacagggcagagaacgtgtatcctgtgtatgtgcacacacatacacatacataaaagtatcataagtacttaataaatatttgctaaacgaatagtaattgaaaatgacattcttactcaaatccttccgcatatacccccataaaagcagctgtatttaaattaatattttataatataatgaacaaatcagtggttgtttctaaaccttttgcatttcaaaaggaaatacaacaaatacaaaagattatgttttattaaactttatatatacagacttatattcaggatccaaaccatctttttcaaacaacnnnnnnnnngtggggctcaggggagggacaaggtctannnnnnnnnnnnnnnnnnnnnnnnnnnnnnnnnnnnnnnnnnnnnnnnnnnnnnnnnnnnnnnnnnnnnnnnnnnnnnnnnnnnnnnnnnnnnnnnnnnnnnnnnnnnnnnngcatatgccaccatgtccggcaaannnnnnnnnnnnnnnnnnnnnnnnnnnnnnnnnnnnnnnnnnnnnnnnnnnnnnnnnnnnnnnnnnnnnnnnnnnnnnnnnnnnnnnnnnnnnnnnnnnnnnnnnnnnnnnnnatgagccactgcacccggccttcaaataacttttgtatgtaacattacaatattaataatttttttctattncatcccattttaattagtgagaaaaaataattaaaaagcacaatttcttagct

SEQ ID NO: 266440 - DNA, 509 bp, Homo Sapiens
gtcctaccatatacaaagcagatcactgagtcagctccatgactagttacataggaagccctggattggcgtgaaatactggtgcccgaggttcctcctgccccttaggctcactgacagatcatcccaagcaggcttatcaggttgggtctaattttaaaacagtcattgaggagtcctggccaccccacccctgcttttgtttgatgcttcacctgtgtttgctgggttatggtgtaacacagtaaatcctgtgtgtattttaaacaccaaaaataatgggatctgttgctggtctcttttacgaatttcaggtttcactgtgagacagaattcatttcacctcagtcccatgagcacttttgtgtgttctaatttctctacgacaccataatgggagaagacaccgatgcaacctgcggaggcctttctgcagacccacctttaactggttttctctctcccaacttgggctggccaggcactagcaagaccacactctgcatagg

SEQ ID NO: 266441 - DNA, 766 bp, Homo Sapiens
  misc_feature (280)..(280): n is a, c, g, or t
  misc_feature (293)..(293): n is a, c, g, or t
  misc_feature (486)..(539): n is a, c, g, or t
  misc_feature (734)..(734): n is a, c, g, or t
aaatatgaggggccacccctctctgctgctgctatatatggcattaaccacctgcctggatacttcacccagtgaggagacagaccaagaagtcttcctgggtcccccagaggcccagagcttcctgagtagccatacccggattccaagagccaaccactgggacctggagctgctcacaccagggaacctggagacgggagtgtctggaagagaggtgttcctgggaagaggccagggagtattttgaggacaacactctcacggagcgcttttgggnagagctacatctnacaatggcaaagggagggcgtggacgagtggatgtggccagcctggctgtggggctgacaggtggcatcctgctcattgtcctggccggcctgggagccttttggtatctgcgctggcgacagcaccgaggccagcagccctgtccccaagaggccgggctcattagccctctgagtcctttgaaccctctgnnnnnnnnnnnnnnnnnnnnnnnnnnnnnnnnnnnnnnnnnnnnnnnnnnnnnntatgagcaggcgctggcagcctctggggtacacgacgcacctccacccccctacaccagcctcaggaggcctcactgaagagctgctttcgagacccggctctccgaaccgtgcccctgattcataccggattccggaagccgctaggcctcatagacgccgaagctggacttggagtggggaatggtggaagtnaggggtcattccggcccgaggcctgcccaaaa

SEQ ID NO: 266442 - DNA, 800 bp, Homo Sapiens
  misc_feature (650)..(660): n is a, c, g, or t
aaacaatggtagaaatgagattcaaaaaataaaaggccacataagaaactcttctcccccgaagaaaaaattacaaataattacaagaatgtaactttacttattttcctggcttagaatgatcctcttgaataggaaatcaagaagaattactgtaggtaaaactgtcttcttaaaagtgaagattcaggttctgatttgctcagtaggctaaatacagagcccgttttcaaactgtgggagctctttcctgtgaggtttgtctgaattgcaacactgccaaacatcgctcggtgctcttccctagcagtctctaactctggcaccagcttccacaatgacgcgctaccagctgccttcagagcgaagaccagtccagaagctctcagcctgctgctgttgatataaagtgaatccctctcctggttcagaagacaagagcgagacacacccctgcaaacctctttgaactcatgtctcatccaaaaatccatcagcatttatagctttttcaggagtttttagagcaacccccagcaggagccagtcaaaataactttggaagtgcatggttagattcttttcaggagacaaccttgatagcttattgttttttcttcaccttattgtgtgatgtttctcgccattcnnnnnnnnnnncattttacaacatgccattagattgccttaaagtctcctaaatatcccaatattagttacatatctgttccttgctactcctgcagatatttgaccctctgcctatcaattcaggtgaaagatctattacagattattat

SEQ ID NO: 266443 - DNA, 728 bp, Homo Sapiens
  misc_feature (86)..(86): n is a, c, g, or t
  misc_feature (101)..(101): n is a, c, g, or t
atatattaagactcttttgacggctgggcagggtggctcacacctgcaatctcagcaccttgggaccacaggcgtgagccaccggnggcccggcctttctncctttcttcatttaaaaaagaaatggggataatagtacctatctcatagaattattgtaagaagtgcatgcagtaatgcatgtaagtaggtgctcagaagagtcggacacgaagtaagtgcttttatcatccttatcataattttcattatcagaacaaggagagaccaggtagaaaattattgtgattcttcaggtctggaatactagagtagcatcccaaatgaaggcaccattaaactttgcaaatctgtatgacaccttcatgccaattagaaaaaacacctcttcacaacccctttcaagatatttgcctcctacctgctaaaaacacccatcatactacccacagatagcccatgatgcctttttcctgggacaggtgcctcttcccattcgtgcagtgtacagccttcatagctgtgcaactcacatcacaatcagatggaagaatccccaaggcttggtgacagatgagttactgggtaacacagagagaggattcaaaggaaaagttgaacgggtccagaaaatgcatagatacatgtgtaaaaatctggtaaggttatgactagccacgtcccagggttcaaagcttttctcagatgttaaaatgaatcatgtaagt

SEQ ID NO: 266444 - DNA, 583 bp, Homo Sapiens
caaacatcaaattaagaccaataaaccactgagtgcatactctggagacattgtgcctttccaaatggcgtaatgagagtgtgagtacaactcacgctgtcactctcctgtcagaaaatgacagttgcctgtatcagttctactcccagagcactgactatcacagagtgaaaacttggatttgacagcaccaactttctgccctccaagtaggagtctgtggggactgaaccagtccagaggaagaatcatcgctctagaaggagtgagtgtgtaaatttaaatcatcagcaaagcagaacctggttactgaaggcaggagagctggttccaaattatctccctcagttagtccccctccccaactctgacaaatgaattaatttacaggtccatttctgctaagttaaaatgcatctatcttctcctgggattttcttcttccatagaaatggagttttctctctccccagtgtcggctgaagctttcaacagaaaccaaaattctaaaataagaaatcctttaaaatatcagatccacatctccttcacctaagaaaaatatataaggccttttacatat

SEQ ID NO: 266445 - DNA, 748 bp, Homo Sapiens
aaaatttccttgtgttctcttgtggttttaattttgtttaggtagaacatttaacatgaaatctatcttcttttttaagtatgcagtattatattgttaactaagtactatgttgtacaacggatctctagaacttattcctcttgcataactaaatctttgtacccattgagcaacagttccctacctctaaacttctgttccttgatctttttaactctctattttctcttatgggctgcttgtaggtgattcaatgtaacaatgacagaaaacagttacaggactttattcctctggcttcctaaaatccagtcaaaattgccttctctgcccattccaggcttacttttggttacaatagtgactgcagtgtatgctgagactgatcaatggaaaagtgtcagggaacatttggaatgatagccttttagttctgtagacactaaagtactgactctaccaaatcaatgatgggagttggagctgcatgcaatgcctgctgcagaacatctgaattccatcttggagccacactgcgaagtacccatcactgattatctaccagttctaagaaggggaacattggtgagaccttgatattctgccgggggtactacaaactagacccaatcattgcttacttgcttgacatttttgtttgccaagtgttcttttagctagaagaaaaaaattctcttttggttaaagtaaaagatagttgagattgttacttttacaaacttat

SEQ ID NO: 266446 - DNA, 699 bp, Homo Sapiens
  misc_feature (284)..(284): n is a, c, g, or t
  misc_feature (321)..(321): n is a, c, g, or t
  misc_feature (597)..(605): n is a, c, g, or t
  misc_feature (626)..(626): n is a, c, g, or t
aatgtatagcacaacaatacagttctcatcatgactgtgcagctctaaaacatcatctgctaacaggtgatgacttatgtccttaatattatcttcattttataagtgagaaatttaaggtatagagaggctaaataacatctctaaaatcgcatagtaagtgatagagacagggtctctaggtttgcctcattcagcctcgtcccagagcacagctccagggagcacgccatttatatggaatgcctgtgaagagcgccccctgggaggcatgcgatgcaggnggcttttttccttctctttttggccaccaaccaaggnccatacttgtagtccccctggtgtcccatgggtttatgaaaagagttctccatcattttacaatataatatgcttctctttgagtactagttgagtttttcttttctacgggaacatttttaaagctgttgaggactgttgtttcttttctacggaaacatttttaaagctatcaattgtaaagctattgatagctttaaaaatgtttcttgagaaaacacttaattggataggtgacactaaaagcttttttaaaaagttccacacagcttatgnnnnnnnnnataaatcggatatattcaagntgtcaacattgtggggaatctcaacctaaattgtacccatattcatatctatacccctaaggccaagctcagc

SEQ ID NO: 266447 - DNA, 278 bp, Homo Sapiens
  misc_feature (177)..(177): n is a, c, g, or t
  misc_feature (256)..(256): n is a, c, g, or t
acagttcttagagtgtttacagacaaataagtaagatgctcaatatgaggtggtaggtcctgtgtactgggtgtatgccagatttcacaaggagtgagtttaaccactggacagcagagtgggtgctagagctgactcttgaaggatcagaaaaaattcaccacaatagaggggttngggcgttccacatatagagatgacattgggctgcattcgggggagcccacaagtaatggcatagaagtgtttgttgtcntgataagccctttcccagacat

SEQ ID NO: 266448 - DNA, 1134 bp, Homo Sapiens
  misc_feature (92)..(92): n is a, c, g, or t
  misc_feature (334)..(342): n is a, c, g, or t
  misc_feature (433)..(571): n is a, c, g, or t
caaaataaagtagtaaattatgttctaacaaaagaccaatgacatttataagggagaataaaataagcaacaaatttaaagcgaaactaggntactttatgctgtctgcatttgtatagtggattttggtgctaagatgcaagtctgaaccagtgtaattctgtgctttgctgtgtttacaactttccttaaaaaatcaattcctaaaatgaacgtattttcaaaagtcaaattggtgaacttgcactttaaaaaagctttttaaaggcacatttttatgaatcttcctttccataatctggtaaaaatcatttttcattgtagaggcaaaacnnnnnnnnnggacatatccaacccatatttgaaaaagcaagtgagctcctctaaacctaattgcaaaatcttaaggaaatctgattgtttctagaagctnnnnnnnnnnnnnnnnnnnnnnnnnnnnnnnnnnnnnnnnnnnnnnnnnnnnnnnnnnnnnnnnnnnnnnnnnnnnnnnnnnnnnnnnnnnnnnnnnnnnnnnnnnnnnnnnnnnnnnnnnnnnnnnnnnnnnnnnnnnaataaaaataaagataaacttagtgctgaagaggtaaatagcactacctcttagttttcttcttctataagaagtgctcacctatgatacccttttgaaaaacctactgcatccttttccatttcctatttcaaaaatagaaaaatattaaatattagaatgctaatattcaacataaacttcaaaagtgagattttagcattaactctgttatttggttaaaatcttgaatttaaaacttctacctgtagatattaagtttagcttcttagtattttatgtgtgcacagtggccttaaaagtaacgatgaaaatcttggggtgttaaaaaagaatagcttaaaacaaaatgagaagacaggccactgaatgagagaaaatacttgcaaaagacacatttgataaagaacacaactgaaatatacaaacaactcttaaaattcaacaataagaaaatgagtaacccaattaaataatgggcaaaaaacctgaaagacatctcaccagagaagatatacaggtggcaaataagcccatgaaaagatgctccacatcatacttca

SEQ ID NO: 266449 - DNA, 789 bp, Homo Sapiens
  misc_feature (548)..(558): n is a, c, g, or t
ggtaagataattctaccatacttcctaattccacctagagaattctcaaacaatccacagaattttattcaaattgcccttatgctcaaaatgctaattgatgtctcagcagagcactggaattcagttgctgctcaaggttcctttggatctgacgtcctccactggtaccagacctgggaaccagacctcccacctccctggtcagggaggaactatcacagaactatacacccaacaattcataacatggtcaataggaaaaccaattccctgaaattgtggacagctagagttctggttttacttaggcactaactcttgtgattctgggcaagtcctagaatctctctgttaaatcatttactttcatactgatgcttcttatatgtactgtaagagttatatactcccaagtccagcaaaagtatttccactccatgttgtgcgctcatgtggaaagaaaattttatattttgttatgttttaggtcacagactcctttgaaaatctgataaaatcacatgatttgtatccttttctcaggnnnnnnnnnnntgcacctgcatagtcttatacacaaacatttccatgtacttcctagggagtttccctgatgcctaaaaggttcaaggactcaaatgaataccctggtctacagtgcaagtccattctctactagcagtataatttgagaaactctgaatttcagtttcctcatctataaaatatagttaatgatgtcaatctctctgctgacatcttgtaactattttgaacacaaaaaaa

SEQ ID NO: 266450 - DNA, 428 bp, Homo Sapiens
  misc_feature (254)..(254): n is a, c, g, or t
  misc_feature (407)..(407): n is a, c, g, or t
  misc_feature (414)..(414): n is a, c, g, or t
tcctctgcactccctagcagcaaaaagcaccatcatctgcccagttgtccagccagatctattactgacacctgcctacctctctttctcccctcttctgtcctttttttccaccttcccagtcagtcagtcattcatatctgtgttctttcttccccctccaaatctacccctgtcctgaccacctttgccttcattcaggccctcacctgatcttgcctgggagggttctgatgctttctccctgggaaggnccttgcttaaggctggaagatctgatttcaggggggtaggggggtggccccaaattcggcctcccagacttaaactctatccctctttggcactccgattccctaggctggacccatttcccctttaattttttcaagggtggccccaatttncctggcnttggatatcctggt

SEQ ID NO: 266451 - DNA, 408 bp, Homo Sapiens
  misc_feature (103)..(111): n is a, c, g, or t
  misc_feature (355)..(355): n is a, c, g, or t
caagagatgggggtctccaaaaatattttaaaaattagccaggcatggtgggatgtgcctgtagtcctagcaactcaggcatgtgccaccacacttggctcannnnnnnnncccaaacagataagaagtttaggacacgaagaagaaaagtaactgtttagagtcatatagatagcaagtagaaggttttcaaactcaaacactctgacactagaattcagattttaaccacttattatactgcctctcatttctatacataattacagtgaattatgaatatattttataatccctagactataagccagaggccaggaactgttgttttagtttttcctgcaacacatggtcntaatggtattcaatatttatggtaagtataaatgcttaaaatttttcaagaaa

SEQ ID NO: 266452 - DNA, 802 bp, Homo Sapiens
  misc_feature (329)..(339): n is a, c, g, or t
  misc_feature (417)..(417): n is a, c, g, or t
gtgttgaatgtatatggtcttgaatgcttcctagacaagctaagatggtattaaataaataaataaatatgtcaagtgctttctaaccatcactggtttctgtctttccagaactcaaataactgactttaagtcacatatcttggtatttcaacacatattaccttaagtttttagttaattgttccatatgtgtatgtattaactttcacaattgttgcacacggtaaagcatacttttcacttcatttgtagccccattctggctctgccgttcaaatatgctaatcgtaacagctttacaatgactgaagtaacgagagaggtgnnnnnnnnnnngtcttaacttaaaagtggaaagggaagatgctggaaacgctctgtctgaaaagtgtctcccaaaagtgtgttaattangccactttttccgatgaaaacaggtactgtcctcaaaaaagcattaatacaactggaaaactccgctctgttggagacgctccttctccttagtatgcggaaaagcccagtgtctcatcacccagggggcgctgtgcacacagtcgctgcacctcctcccaggactcggaacctttacagaactggggtcaattgttctttctaacattcatttgcaacctgactagcggatcaatttagataacgtcgttttcctctaaaagtacaatcccacgggcagggagtaagggtggaaggtcggaaagaatagtagggaggaatctaaaatccccaaataaaatatcttttgttacgctttcacacaggagacttacttggattttca

SEQ ID NO: 266453 - DNA, 782 bp, Homo Sapiens
  misc_feature (525)..(525): n is a, c, g, or t
ctgatgctttccttggttaccatattcaggatttgtgatattttgacacaactcacgaaagcaagtttctgtaaagagggctagactatgcagagctgaggctagcagttcaccatgacttacttgtggctccagctcaccccgacgtttgtagatggctttttctccagtcagcccatcaatgatcttgggcatcatctaattctccagtagcttgatgtcttagccattgtctttctttacctttagcctacaaaaggacacacatacacacacaaagccttaattagttatgcagagtctctgacatactttgtgcatgaataacaggaaacacacctgggatcttttcagtaagtgatggttctgcatgaacacagtcatataaatgaagtggtttctgctctgctgacaaataaatgccctttgtccgttttaattctttcaacatatggaacaataaaatgaatgaaagatggtatgcaaatgagtccctggagagatgtcccagtatctggaaataanaataatgggggcgcatttccttacagattttcctgtccacggtgccttcctcaaaagtttattagttaaaataatcagcttgaatttgttaacattgtctgtaagcccagagaaaatgtgacctttagaattctaccttttggtaaagagtttgttactcaagttctctgggacttagagtgcaagtggaaatagctgaaaacaatagtatgtgaacattttgtaccccacaagtctttctggttatctattttcag

SEQ ID NO: 266454 - DNA, 609 bp, Homo Sapiens
gagagagagggagaaatctccaatgaaaagtttttaagtcgtcaaacgtggggtgcttatcaaggaccaaagtctttcaacatgaaaaggttatatatattttctggtgatggggatttatcataagaatgtttgggaaagtgagggggataaaaaaccttggcagcatagttgctaattactcttcatctcactttttttggccatcctaacactacagtatcctcacatttctacacacgtaaggtagtctgaaatgtacttcctcaagggttacaggaaaggaaacttaattgataggaattatactttcttgctttgaaattactcattcctgaatggatgtactggtgaataatgaaattcccagagaacaagaataggaaagcactacgagatccaagtgacctgatagtacactaactcatcagtccttaattagccaaaatttggccttggagactttttcctcaaacatacaaaaatttgcccccacttgactaatctgtcaatactcaagagttcttgtctaaaaacattgcacaaaacagagattgtgcaaaggctttcattttgatcctccacggtgcctcaaatataacaaatgtt

SEQ ID NO: 266455 - DNA, 707 bp, Homo Sapiens
ggtaagtctagtgggcctagaatcttcttacctgctgagattgtctaggctcctacaacctcggcctgtagacttaagagaactgtgtggagcatggaatgagatttttgccccctccctccctgtcttccttcctttctcttttttcgttttgcagtaattagtgttggttctgtctcttttcctgtctccacacacacataaacacatccttagtcttccttcctttcattgtaaatgatagcaaactgattttgactttttccattttctttatatatgaagatataacataaatatatagatgtaagcatttctgaagggcaggaaagctggtaggggctttatgaaatctcccatgaggccagtttcatgacttaagcagccccacagggctggtcttcagatccaaggcgatgggctgcagggcctgcaccttccctcttggcagagcggtgccacagaggtgcagagctgctgcgctgggcaagacctgctcctgcacaggacttggagtaggggcctgtgccgagggcggtgctgctcttcctggggccctcaccagcctgtgctttacatagaggcttgtaaagaagcctgcgagacaggagtgtgttcagaatatggacagggtcagccgattacagcctgaggggtaaatccagcctgccattgaattttgtaaataaaaatgtatctaaacacaa

SEQ ID NO: 266456 - DNA, 383 bp, Homo Sapiens
  misc_feature (13)..(13): n is a, c, g, or t
  misc_feature (24)..(24): n is a, c, g, or t
  misc_feature (37)..(37): n is a, c, g, or t
ggctgggattacnggcatcaggcnactgcgcccctgnccctagggctttcttttttaaaaaacaagtccctaacaaaagggggtttctacccagcccctgagcccacaccttctgaaactcccttgcccaggatccccacagctgtccacctcgcaagtcccactctctgccccacagagactgccctaaaaggaggacacaacagatttcagataaaaagcacctgtgtatcgtaaatatttcaggaaaaagaattcagatcttttcaaaggcttgcttattgctgctaattgttcctgaggatctttctaagcagcaatatacttgagaatattagctgctactgtttgttttccctctaaggtcctgaggaaatcaaaag

SEQ ID NO: 266457 - DNA, 730 bp, Homo Sapiens
  misc_feature (703)..(703): n is a, c, g, or t
agcagaggtgaacaactttccccctcagtcctggcaatgagggtttggcaccattctcattctttatcccactcaatcaaaggaactctgggaaggaggttgtgattgctggcaagtcccccccaactgtaccacgggcatgaggagctgaagagaactgctgaggaggattttcctaaagttactgctgaccttgaagcattgttaaagactaatgtcctctcctccactgttgaggctggctgcttctggaggctactttgcactcttcctcttctccttttttccgcactttctcaacccctcccacatttacagcaagaatcaacattctcctggggcccctgagggaaataagaagctggtctggaaggagaaggactgcaatccatggcgaaaaaacactcactttgtctctgcagcaaagagttgccccttctttctactgttgtttctctgtggactgggcaaggtggggtatttattcctcactagctgggttaccatcttcaggcacttttaacatctggcattcggaatggaaatgtaataatggacattagggagccctgcctttttctactggttcccccaatgtttgaaagaggcattaggctcctggtagccttttctgtgcattgctgtatacacacagacacacacatgtatgtttgttaccaagaactggtcagaccttgcgagnttatttgtaaacactggacagatggag

SEQ ID NO: 266458 - DNA, 494 bp, Homo Sapiens
  misc_feature (475)..(475): n is a, c, g, or t
ttagaaacagacctgcctattacagtctcattcccttccatactcatccttgcttgtgtggctacctcccaagctaggactgcaagacccttatcactcctgcttactattggtttttgtgtccttttggcaattttctagtggctgcttgaactattggttgtcagattgacctgatttgtttcacttgtaaacaaaatgcttaagccactgttgatttttgtgggcagctcagttgcttagagcaaggtgttaatgaggacatcgggtcatagggtccagggctctggggttgactgggtaaggctttgctctgggcccatggcaccaggaaccctgaacttcccccttgccagctggtcttggcacatgtaggctatgggctcattatggggggacacagcaggggggtgggagataaggacaagggcaaatctgtccatctttggccaggaaaagggcaactcccactgantaggggcagtaaccttttc

SEQ ID NO: 266459 - DNA, 796 bp, Homo Sapiens
agggctcctggagggcacttcctaaatttgacaggtttctttataacagcaattttgcagttgttttctagagctttatcaaatttgacttctaaagctcacttttctactttagagaatgatattaagaatccctgattaaggacaataatcttcacaaactaaaaagccatccttatattcaaacatgctttaaaatgtgagcagtattctaaacttgctgcagacaacccatacaatcacatgagttattttaagaaaaagactcagttagacacatctacagaagctaatactaacgtgctgttcttccaatgaaaaggttactgacctattcagtaggagttgtcttttctggcagagatgacagatttgccttgtcttatctccaccccctgctgtgtccccataatgagccattagctacatgtgcaagacagctggcaagggggagtcagggtctgtggccatgggccagagcaaagcttaccagtcaacccagagcctggacctatgaccgatgtctcattaacaccttgctctaagcaactgagctgccacaaaaatcaacagtggcttaagcattttgtttacaagtgaaacaaatcaggtcaatctgacaaccaatagttcaagcagccactagaaaattgccaaaaggacacaaaaaccaatagtaagcaggagtgataagggtcttgcagtcctagcttgggaggtagccacacaagcaaggatgagtatggaagggaatgagactgaaataggcaggtctgtttctaacatacccaggcag

SEQ ID NO: 266460 - DNA, 819 bp, Homo Sapiens
  misc_feature (11)..(11): n is a, c, g, or t
  misc_feature (777)..(777): n is a, c, g, or t
ccttcatttgntttgaaacacactgtaatattggtcttttgttctatcccaaatacggattctttcttctttctttggcaggaaggcactttgctatgcctagcccccaccaggtagtggtattctccatggaatgtgtgggcttttccaaagctctttcagccatcagttctcatagccctccccagtcttgcaggcaagatatgagctttagaaataggcttttatcattcagcttgctttgtgttgttttgaggggttggggtacagtgggacaagttttattttgttttggcatttatagaaaattgagaagtttcctttgatcaaagccatatttttgatttaaaacaatgattagcagtttagaaaactatctctgctattttattctgcttttaaattctttgttttttatatttctgtcccttagactttaacattttaaagtgtgtaaaaataaaacactgtcagtgctaatcatagaaaatcagactatggcttgaaatgactagaaaaacatttcaaattaggctgctttatgatttgcatattatgattccggccattggagtttttggatttctaagtgttcataataccatgaaaagtaaatattttaaacaattgtatccccgtttaaaaactttctaatgttaaaactgtatttttttcatgtattagcccatgtgtgataatcttagttttccaattatggagggcatgaggagtagctttatttttaatacatagtacttgaaaacttatttcattctnatattggtgttgaataaattgaaaatgttaaatgtttttccg

SEQ ID NO: 266461 - DNA, 943 bp, Homo Sapiens
  misc_feature (1)..(1): n is a, c, g, or t
  misc_feature (630)..(630): n is a, c, g, or t
  misc_feature (794)..(873): n is a, c, g, or t
nggattacaggcataagccaccgcgtccagccaggagccctaaatttttaaacagccctgactactgtcctggttctacctgtgagttgctcactcttccccaccaacagaggatgggaatgaagctgccgggttctgccctcccaagtcatgcctccctccatgctgagtttgtatccaagtcacgttcccgactctgaccggaggcaggaaagccaacactcttctacctgctggttcccatccggcaaacgatgcatcagcaagaaggcaaaatacccagagaaaattttgagtcacgatgccaaaggggcctctgggcagaaaaaccagcctgatcaaggccgctgctgcttacggttcaacaaaggcctgctggctgtaaaatctagcaagaacatgcaggctcccaggtgtgcatgagctcggagcaagatgtgaatttcaatcctggctctgccgccctctctggaagaagctcactctcttgcagccttgggggctcacatgtgaaatgggccaaggatgtctcagtcacagcaccgctgacagcgaagaacaccaagagccagcgtggggccgaacacaaggtcagtcctcccatcggtggcgtgatgacaacccaccgcnctcagccaaggctgttattaccactcccatccaaactaagcgtgtttcccccaggccggtagaaatggcaggtgctgatacctttcagctctcagtcgggtcctgggctgaatgctttacttgcattatctcatttcgaccccccaacccggcacggggagtcnnnnnnnnnnnnnnnnnnnnnnnnnnnnnnnnnnnnnnnnnnnnnnnnnnnnnnnnnnnnnnnnnnnnnnnnnnnnnnnntgttcatttaattcattttacactcatttcacagcttgtgtctgctggccactaggcacaagacggtgca

SEQ ID NO: 266462 - DNA, 513 bp, Homo Sapiens
  misc_feature (176)..(176): n is a, c, g, or t
cagctctcttgggctgtgtacccttcatcgtatcttccaggttccttaaaacctacccttgggcacagctgggatgtgcactggctcttcacagctagatccagcatgcactgactctccccgtgcagggacagccccagaggaatagaggtggcgttccggccgctccagcgtgngcccacagcgtttcaagtgcagcaagcacagacaggacgcagggttactagtattttggattgactgcagattttgaactgtctgcctagatgaactataccatgtccctagggccaagtcccatgtgcattttgtggctactagaccctcttcagaaatcaaacacaaaatagctctggcctgtaaagaaaacaaacttcaccagtaaaattgtttcctgttcctatccaccaatgtgcatagcacagtgtgtagtctgggtaatacggtttgcataattttttgataatgttctatttaaaaagggcagcgtatttatatattacttatgtaatt

SEQ ID NO: 266463 - DNA, 452 bp, Homo Sapiens
tcccttgggaaccctgaaaaacaaagacctctgtgggaacacggggaacccgccatgtttaaacagctctcccaggtgagccctaatgaagaagtagcccagatttgaaaatctgtaacctaagtcagggtactaccacattcaccttcaatattcctgctggggaatttgttttgaacgtgtattttcataagaagcacagtgttttcattcgtatattatgtttatgtggcactgctgggcaaaaagagactgttgatggtctagggagtctaaaacacataaagcagcttctcagtgtagcaagcaaccactgataactccttgagtataatataaagtttaatttggggtattaaagtctgtgtgctccttaggtaaacaccttttggtaattaaccacatcttacagattttttcctttaaagttaaaatcatacagcatttttatt

SEQ ID NO: 266464 - DNA, 651 bp, Homo Sapiens
  misc_feature (304)..(345): n is a, c, g, or t
acttcctggtggaaaaccgcgactcttgcaagtgggcaaacttgacgttttcgctatgggcaaacgcgggagccggagccagagccagctactcaacaccctaactaaaaagcagaagaaacatcttcgagatttcggcgaggagcatcccttctatgacagggtttccagaaaggaagcaaagccacagatttgtcaactgtcagagagttcagattcttcagattctgaaagcgactcagagagtgaaccagaacaagtttctggctaccacagactacttgctacattaaagaatgtttcnnnnnnnnnnnnnnnnnnnnnnnnnnnnnnnnnnnnnnnnnncagtattgtagatgatgcagaaatgaacgatgaagatggtggtagcgatgtcagtgtggaagaagagatggcttgcagagtcttactgaaagtccagagaatgtagctttatctgctgaccctgagggaaaagaagatggggaagagccaccgggcacatcacaaacatcccctgaagagttcacagatgcaaaacacgagtcactgttcagcctggaaaccaattttctggaagaggaaagtggagacaactcttctttgaaagcctctcaagatccatttcttcaacatgtgaacaaagaatct

SEQ ID NO: 266465 - DNA, 647 bp, Homo Sapiens
  misc_feature (54)..(54): n is a, c, g, or t
ggggtgatgatgaccagtaaaagtcaggctggctgctgaccaaagactaggaancacttcccatatcaagctttttttcccaacagcaaaattgcctatttaatgccactttttaaaaagctgaaacatttaacctaatttaagatctgaggctccacaggaaagtccattagaaagttaatgacttggcttaactgcaggagataaaactaaagtagactaggcaattttattcctggaaaatttggaagaaaaggcaggggaacagactgaaatgtagaaagaaccaatgaagaggagaaagaggattcagttgaaagtgttttccagatgttggtaccctgctaagccttgattatattattttacttacatctgcaagtttctccttgcagacacagttgtaacaaactgcagattctaaagctaaactaagtattcaaggactgactgtatgatttgtacactacaatattaacttttcatccttctcccccctgacccttggctttgggataccttaagccttaactgaagaggcagggatttcgatttctattttacagcttcagagcaatgaagtggcttattcagggtccacacagggatgaggccaagcttgtataatttaaaagcatgcactgctt

SEQ ID NO: 266466 - DNA, 811 bp, Homo Sapiens
aaatgagagctaagctacgggtcagcccactgaggctggcagagatcaagctacctgcccaggtccacactacaggtggactgagactcacacctcaagtgccctggagtttccataaatctcattaaggatgctggctcatctgctttggggtgattcaggctttgagggtcatagcaagcaacaaacccaggccaggctagatcagcacagaacaagattatagagtccttcccagaattgtggggcctgagactgctgtggcactttctcttaagcctctgcagggaacccttctctggccccagccctctcttcctcagaattctttagttggggggtcctggcctttcagatcccatttctccggatggaggattaaaaatacctatgtcatcaaatacaagacatctttgggagtgagatgcgctatcattttgtgaattaccatggaattcattaatttgatgacactctggatttaaacagtcagggtgacctccaggttgataaactgtgaaaaatggtaatactatagtaataagaacaagtgatatttattacaattaaaacgaaaaaaagacaacgctgggaaatctctgcactacccttccttacgtgcaatgacgggggcaatcttaatcagttcaatcaatgcaagtggaaataactgaagaatgagtggttgaatacttagatttcattttgcttcaaaccgatcatctttacaagtgtttcttaattcaaggctaaaagctggggatatgggacttctgtatgaaaaacagtctttagcatcagagcacctcta

SEQ ID NO: 266467 - DNA, 797 bp, Homo Sapiens
  misc_feature (302)..(302): n is a, c, g, or t
  misc_feature (732)..(732): n is a, c, g, or t
ggttcccagaagagtttgcgacgtggtaaagaaataaggcgagtacacaagcgaagactttccagctcagagagtgaagagagctatttgtccaagaactctgaagatgatgagctagctaaagaatcaaagcggtcagttcgaaagcggggccgaagcacagacgagtattcagaagcagatgaggaggaggaggaagaggaaggcaaaccatcccgcaaacggctacaccggatttgagacggatgaggaggagagttgttgacaatgctcattggagatgcaaatcagcctgcccctgnacagccagcctagggtcctgccctcagaacaagagagcaccaagaagccctaccggatagaaagtgatgaggaagaggactttgaaaatgtaggcaaagtggggagcccattggactatagcttagtggacttaccttcaaccaatggacagagccctggcaaagccattgagaacttgattggcaagcctactgagaagtctcagacccccaaggacaacagcacagccagtgcaagcctagcctccaatgggacaagtggtgggcaggaggcaggagcaccagaagaggaggaagatgagcttttgagagtgactgaccttgttgattatgtctgtaacagtgaacagttataagactttttttccatttttgtgctaatttattccacggtagctctcacaccagcgggccagttattaaaagctgnttaatttttcctagaaaactccactacagaatgacttttagaagaaaaatttcaacaaattcctg

SEQ ID NO: 266468 - DNA, 538 bp, Homo Sapiens
aagtgaagcaaacttaaactcagataaagaaaatataaccacctcaaatctcaaggcgagtcattcccctcctttgaatctacccaacaacagccacggaataacagatttctccagtaactcgtcagcagagcattctttgggcagtctaaaacccacatctaccatttccacaagccctcccttgatccatagctttgtttctaaagtgccttggaatgcacctatagcagatgaagatcttttgcccatctcagcacatcccaatgctacacctgctctgtcttcagaaaacttcacttggtctttgtcaatgacaccgtgaaaactcctgataacagttccattacagttagcatcctctcttcagaaccaacttctccatctgtgacccccttgatagtggaaccaagtggatggcttaccacaaacagtgatagcttcactgggtttaccccttatcaagaaaaaacaactctacagcctaccttaaaattcaccaataattcaaaactctttccaaatacgtcagatcccc

SEQ ID NO: 266469 - DNA, 605 bp, Homo Sapiens
agatacaacctcaaatatgtttccgtgtgttttcatttttcctttcttcccttccttcttcatatgtcagccaaacttggtaagatctttaaaaatggggctcttgcaagcctaatgaccagatcagggcaagatcaggctgaaacatcctttaggtgagccagatctagtgctttgcctcctgcatttggggaatgtgatgatgtatgtgagagcaccactaaactgcaacatgcaacctgtgtgaaagacacacagacaccatcccagactattagacagttttgtggttgttattgttttattctcatgttattgttttattacttaggcagattaacaaattcttcaaactaaattctatcctaatattcctcctaaacttatcctgtagacatgtgggaccactttctcacttatttcttaacagagaggaataagaaatggtcacaatcctctttatacttaatttgacatgataaattttttaagatgaagaaaagtaactccctaaaattatagaaaaggtgagcaaataattgtataaatcagggcagggaagccctttctaagtaacttaatatcaaagacaggagccctaaagg

SEQ ID NO: 266470 - DNA, 590 bp, Homo Sapiens
  misc_feature (52)..(52): n is a, c, g, or t
  misc_feature (129)..(211): n is a, c, g, or t
  misc_feature (300)..(300): n is a, c, g, or t
  misc_feature (324)..(324): n is a, c, g, or t
  misc_feature (335)..(335): n is a, c, g, or t
  misc_feature (423)..(423): n is a, c, g, or t
ttacctccctgaggagctgctagtacctacctgattagaattcatttgtaancaacagaggccttttaaatctaaattacatttcctaataatttgtttctgtttattcagtttacattaagaaactcnnnnnnnnnnnnnnnnnnnnnnnnnnnnnnnnnnnnnnnnnnnnnnnnnnnnnnnnnnnnnnnnnnnnnnnnnnnnnnnnnnnattactccattttcagaaatattttgaataactcctatgtattaagcaggaattttttaaatatactaaaaacagacaaaaatccctgnatcctcatagggctgccagtctgnatggaggaaanggggaaatccatgcaaacaaatacatatatctctaaaatctctaaaataatgtcaataaaggattagaattataaggagaaataaagncagagtgaactggagaaatcctgggtgtgatgtttaagtcacagtggtcaggacacacagtggtttaagtcatctctggaagtgattttggggacacagatttgaataaaagagagattgaactatagaatatttatgggaagagagccaggcgcagtggttcaccc

SEQ ID NO: 266471 - DNA, 721 bp, Homo Sapiens
  misc_feature (22)..(22): n is a, c, g, or t
  misc_feature (380)..(380): n is a, c, g, or t
  misc_feature (415)..(415): n is a, c, g, or t
attcggcacaggcctaatgtgnaaatcatgacctaacgaatataacaaatatttggaaaagtactatgtccgaaatattttaaaataaaatttaaatccctcttcattcagaaaggatttgaggcagctaaatgcagaggtgtaagatggttttttggttaggattgtttctgagctgtgactctgtagtcactttcttactcagccctgccactcagctgtattcctctgtagctctgggcagacgactctgaacacggcttcatattggccttccatgagtgggtgaagggcatagtcatctgggcagttttacctggctgttctatgcatgtctctccagcgcttgcttattttccccttctgcaaacattccattncatgccatgggcattcagtacagtcctgtaagcanagggtaggggcggcacaccaggtggatttaagcgcaaagacaggacgatctgctttgccacaggcgcctttacagccagcagtgaacagttagacatattcaccttcctctaggtggaaaacagtcctcttctcagtagccctctcatgttcttgagacccatttgatataaataacaatgttgcaggaaatttcctgaaggaactgaaatgaaccatagaaacgagatcgttcttttcctaccacacagctgggattagactgcttagtttgtacttgcagcacttttgcagtatgggccgtatt

SEQ ID NO: 266472 - DNA, 678 bp, Homo Sapiens
  misc_feature (57)..(172): n is a, c, g, or t
  misc_feature (253)..(313): n is a, c, g, or t
tctgtacgtaaggttcccctaataaatgctttggactggctgaccatggcagctcannnnnnnnnnnnnnnnnnnnnnnnnnnnnnnnnnnnnnnnnnnnnnnnnnnnnnnnnnnnnnnnnnnnnnnnnnnnnnnnnnnnnnnnnnnnnnnnnnnnnnnnnnnnnnnnnnnngaaattagctgggtgtgggggtgtctgcctgtagtcccagctacctgggagactgaggtgggaggatcgcttgagcccaannnnnnnnnnnnnnnnnnnnnnnnnnnnnnnnnnnnnnnnnnnnnnnnnnnnnnnnnnnnnagcgagaccctgtctaaatgaataaataaatgctttggactgatcaccctgttgtttattttagtgctaagtgctacttcccttggaatcccaactggcccccacctggaaaaggtctggggcactcccttgtggaaactcccctgctaaggcttttggggtgattccaactgtgggttcagcaggatgaaacaagttgacattatcattagaggggacaaatcaacatcataagcttcctgatatgttaaaaaacacaacatcagttcagcagtaatgcagtcatgaggaaacctcagataaacctaaacggagagatgattccacttgtctgtattgctcaaaaatggcaatgtcataaaaga

SEQ ID NO: 266473 - DNA, 718 bp, Homo Sapiens
  misc_feature (204)..(252): n is a, c, g, or t
ataataaaaaatatcaaaaaagtagtgaagtttagctagatatgtaccattttctgtatccagtgattgcaaacttggaacctgttcaatgatttggaaaagaccctctgaaatgggccagtgcataattaggattattatgcaaggacatttttgcttatctgtggtggtagatatataatgaaaactatacacagaccattnnnnnnnnnnnnnnnnnnnnnnnnnnnnnnnnnnnnnnnnnnnnnnnnnattttatgtgtggcccacgacacttcttcttccactgtggcccagggaagacaaaagatttggacacctctgctttaaattcttatcaaaattatggcaggtttgtttgtagacacttacaagcttattctgaatttttatggaaaggcaagggacaagaaaaactaaagccattctgaaaatataaatcaataaagtggaaagaattgccctatatgatgttaagagttactgtacagctactagagtcacacagtgtggtattagtggaggagtaaacaataagaaatagattcacaaaatatactcagctgagttttgacaatatgcctacctttccaaaatggtgttggaacatttggacagccatagtccacagaaaatgaaccttgatctaaatctcataacttatgcaaatattaacacaaaatgggtaatagaggttacattttgtaaagtgttaaac

SEQ ID NO: 266474 - DNA, 480 bp, Homo Sapiens
  misc_feature (341)..(341): n is a, c, g, or t
  misc_feature (393)..(393): n is a, c, g, or t
  misc_feature (408)..(408): n is a, c, g, or t
  misc_feature (421)..(421): n is a, c, g, or t
  misc_feature (447)..(447): n is a, c, g, or t
gaaaattaaatagatcaaagaatgagccaggccggatactcattatatctatgggtaacaacgaagtattagcaattgcacagatttctccctattcatttagtcggtagcaattctatcatatagcattccaggaatgggttaaattaaaacacggacaggtactaactctataaaagagatcactagtacaatttgaacaaacagttgcattagggatattagggatgttgctgaagttacccactaggtggactaaaggatctcaggttttttaaagattcagatttgacataacagattcaacatgctgtcagattactcacaaaaactaaggattntgaaactttaaccatagcccttattctgccaagcgaaagaagttaggcatangcaaggaaaaaattnaagagggggtaangaatatcattaaggaggtcttcgccnggatgggccctggggaaaagctgtccacggcat

SEQ ID NO: 266475 - DNA, 444 bp, Homo Sapiens
ttacagcatgtgccactgtgcccagccaactaaagtttctgtagcgtcaaaagtgtttaaggattccacaaagactaaattctcactaagctatgcaaacaaaggtgctaaaccattccaaccaaaatatgaaagaaacatgtagatgttttataaagctagatttcctaagaaatattaatattaatgaaaacttttctcaatatattaatagaaacaagatgtctgcacatttttccagtttatagatgttaaaaattaagtctcaacaaggtctttaatcatatgtgtataatcctaagtgtataacaacttaggaaatttcagtaattattcctacaataatgaatcacataaaatatatatatgtacacatggcagattatgctaccaagatcagaatgttcaaatcagaaggcagttcatcttgttagaaaatttacc

SEQ ID NO: 266476 - DNA, 1072 bp, Homo Sapiens
  misc_feature (367)..(367): n is a, c, g, or t
  misc_feature (416)..(416): n is a, c, g, or t
tgggggactgttgatcaaaggcaaggggcacacatatgctaaacagaacagtgtgcaggagtacacatttcttcccagaaaccacatccagtgttttatgactggagggaaggggtgtagaggtacagaaagagatgaaggtggcatgagagaaaaaggcagaagccagaatgcgctgtaccaaaataaaagattaaagaagagcattaaagggtatgtatatcaagtcctctgagatttatccagtactggatgggttgtaaagggaagtactttccatgaatgtgatctacaggtgacaaatgctttccccgctccttgctgcagtagttaccaagtcccttaagctcagtcagactattcacanggatagagggggcatttttaaggagaatcttttctgggcagcactgtgngagggacaactatcagttcaatgtgaaaatgaagcacagaatcagggcctgggaggatgggcataagggaatggatggtgtggagggaaaaagaggccctattgagtgtatgagacaagttttccaatattgctcagccttaacattaataacaaagatcatacatgcatctttggcattcttaactcctaaccatcagatgtattctattctagtgttagtataaaaatgcatttcacgtgcatggctttttatagcaatatgcttttaaaaaatgcattctaaagtcatgatcaatttacatatttacccatgcctccattagacagaaaggattatgcttctctcaaatatgttttggcaaattaagacgttagcatacatttgaaggctgtatcagtttaaaatgaatgtttaatggaaggtatttcctcccattaaaaaatgtgaaatcaagtaatataaactgtaccatagtgcatactaagacatgaaattcagctccagaaattcagctgtgcagaacagggccccgagcaacacttgattgggaccagtgcctaactctcctggagagttcagagaagagtgcttcccagttgagcctaccctccattttagaatacaaagagcagaaaggtcggcctccacaactg

SEQ ID NO: 266477 - DNA, 483 bp, Homo Sapiens
ctttaaaataaataaacatgagcacgatgagttgcttattggaaggatatccatgcggggaggccggcgtgtggagtgcgtaggcctccggacgggcaggagttgaaggggcgtggatgtgccgccctctcctccccttgctctttccttggggtcactgcctgagtatccctctttgcaaatggccccaaataatgtctcagcccccacgtctgcatcgcctcctagcttcaggaccctccaccaaaaaacattccaagcttcagactcactcctgggaaaattccaatggcctcactctcccttttgagccagccagatcccatggcctgtggcgggctgcctttgagtcctgagcacctgtgagctagggaagcaggacaggcacacccagggaaggggaagagtcgtcgtcagtcacagtaattgatatctttggaatcgtctaagagatacttagcgtgtgcctaaaacattcatttc

SEQ ID NO: 266478 - DNA, 534 bp, Homo Sapiens
ctctctatgacctctctatgcaatggtgtggcactgccttttcaagagaaaagtaaaagctgtacatggcagtgaccagttctccttgcatttggaatgtaggtcaggatccatctgattgaccttgtgttcagaagcgcgtcagcaaatcctgtttctaggccctccactggtgtcttccctgctgcaaagagagggcttctcaaagctggggggcttgaggcaagaggtcatgtgtttgagcctgagatgtcagcaggcaagagaaggaaaggcagccttgctccttcaattatgcaaggtccatattccttctccatgtctttaccccagtgcacggccacagaagagcccagctgctgagctgatacaaggcatcctctgttgagccttcatctgacctcacttggcagacgtcagcagcagtaaacatggcttgaacatgttgtcactgagctgcatgatgattgttagagacgtaaaagagtttctgtcataaacagtgtacttgggtgatgaatagactctcaaaaa

SEQ ID NO: 266479 - DNA, 662 bp, Homo Sapiens
  misc_feature (283)..(283): n is a, c, g, or t
aagaaatcagtagtttcacatgagtctggcctggctgcagagcagcaagcaccctaaagtggtggagaattagtggccaggcttcccttcactcttccacttctctatcctggcagccccccacaaaggatacctttagggtcataatcatccatattacatgaaaagaatcttagtcattgtgaggaaaagatcagctagaaggggatgaaggtgaagagaaggttctttggagaggttcttagagacatcagatttcctgagaatctgatgaaatcagatnctctattatacagaagccatggatgttacttttttttggagtagagagccatgatgtagaaagccatgttttcttttcattcttggcccctagtattcgagggtatcatctttctcagtcacagcctttcctaacctctgccctcttccaggaagaaagggatttggttacacacagatgatttcccagtcaccttgtttccatgagtgatcttgtcatttttaagctcaattgatgtattaggtttgaatttgtttgccagatacttgaaattcacttttctttggtatactggttttttagcattaacatggattccaaacaaacttggttctgccaaagaaaaccagagctggacagttgttaaaacagtaattta

SEQ ID NO: 266480 - DNA, 519 bp, Homo Sapiens
ttaaaatggccaactttttaagtgcttttatactgtattctctccacaatgatgtgactttccaaaattttccactgaaaaagatgtaaccttgcaatgtggtttagtatggaacttactttgcactgtatctggcggttgaattttgcttttattgtactgtggacttgtgactaaggcaaataaaacttaagctcacttaatttaaatatctcaaaataacatttaggaaaaggtgcagtttttctttgcttcagaatgggtttttatcacaaaggaatgagtgagacatttatttgtgctgggacttctgcacagtcattgaatgctgtgagtgaatgttaagtgaaaattcttgtcaagggaaacaagtttctttcaggatattctaccaaatactactgaaagggagaatgcagagcaaaacacctgttgggagagaaggggaaaagggaagagggaaggaagatgcccctatcagagttttatgctctgcattgttcctttgatagatggcag

SEQ ID NO: 266481 - DNA, 482 bp, Homo Sapiens
  misc_feature (42)..(42): n is a, c, g, or t
cttattgcctgcaaagctgcctgaaaaagtagtttctcaagnaaaagcagtttctcaagaaacatttcagtaataaatgaatgagtgaaatggtgtgtaagccataaccatcttagaaacagctgtgaaatcaagcatgctcgctgggagatgtggctcctctccgcggcacagtgtctatatcactgatcaggtggacagatagtcccagaaggaggccctcaccaacccatttccccagacacagtcagaactggggtcagctgcagagatgggaaccgcaagaggaaggagacccttaacaaggaccagggaaagtggtgtatgcataaagaaaggaagctgttcttgaaatgtgccagtgacctcatccctgtccctgaggccagcatgagtgcttgcagtgcaagtgacccatctgccagggtgacctcaggcctcggactaacagcaaataaagccatgaacacactgttctctgg

SEQ ID NO: 266482 - DNA, 631 bp, Homo Sapiens
  misc_feature (16)..(16): n is a, c, g, or t
  misc_feature (27)..(27): n is a, c, g, or t
  misc_feature (36)..(36): n is a, c, g, or t
caaaatgttgggattncagggcatganccccccccnccaccggcctgaatattttttacataataattttctcatgcacaccaatttgctgaaagatataaaactcataattttacataaaaagtggtggctgctggaattttacaaagtaatgttgcataacacaagagtacacatacatgcatcataagggacacaaccacctagctcaaagagttttagagcacctaagattacattgcctcatctacacttggcacttaataaatggtactggctttgtgatgtaagcacaaatagtgaagaaaacccagacataaattttaaaatgataaatactggcttcattgtctcagatactgaagattaatcctagtaatggaactgcttattttcttgagagctataatgactccaaaaacctacaggaattaatgctcagccatactccattttgtggtcaggagaaaaaacatttacaaagacgaactattgtataatagaagacaatgaaaatattacaaattcaaaactagagaatagatacatataactgtctctagtaaatcctaaattgaaactgaaaaattaaaccttatttcagactaggaaatataattacagtcttctt

SEQ ID NO: 266483 - DNA, 411 bp, Homo Sapiens
tgtgatatattgtctaaggccagggggccgtgaatgggtttgggcaggaaagagttagactcaactctttggctgttggaaggattcctatgggtctcataaatgaaggactggaaccaaaggaatatgaatgcaaggattgcaggtaaaagtgggcaaaagatatgactctggcaaggatataagatcccacatcatgaaccaagtgcccaggctgaggggctggtctttccctagggagtcttcgaagagttttgggaaggggagtgacaccaacatattgctgccctgttttttgtgcctggtcatccccagccttgagagaacttgccagcaggacctttctattcaaggaagagagaccagaaagcactgagcacaacgccctgttccaggacccatgttggttga

SEQ ID NO: 266484 - DNA, 980 bp, Homo Sapiens
  misc_feature (804)..(804): n is a, c, g, or t
  misc_feature (846)..(846): n is a, c, g, or t
attcggcacagttgtactcagcaggtctgcaatgttcaaaccctatgctttccaaaaaaaggtcttttgcaaagaatgctttggctcttgaccagctcttgggagataatctgtaagcccttggaagtatcctgcctgatcagagtgtctttgtttactgtggccttggccaacactggatagtttgtgctaacagtgtgatttgtggtgtgagccttgggctgagagatactagtttaacctctgcatggactagagactgaataactaaggtcaaccacacaggtgctccatgcctatctgactgaaccccaaaaacaactctggggcaccaagggcttgggtgaacttccctggttgacagtatttcatacatgttttcacacatcattgttgggggaattaagcactggccatacaactccattgggagagtacaactgaaaagtcgtgcctggtctctcctgaatttttccctatgcactttttacttttgctgattttaatctgtatcctttcactgtaataaacaatagccataacactttttctgagttctccgaatccttctagcaaatcattgaatccgaggatggtcttcaggagcttgccacactggtaaatccctagatccacattctcttaggctgccaagggcatgtgaagaagtgaatatctggcctttgtggcttttgcacttggaactgttaaggtaagaatatatatgaccttactaaaatggtaaaaatcgaaatacatcctggccccaagggttttcagtaaggatctataacgctatataangaactcccctaaagtcagtaagacagacaacccaaatgaaanacaggtaaaatatacaagcatattacaataaatctaatatgttcattaatgtataaaaatgtgttctaccacattgcttatcagaaatataaattaaaaccataaggagataccaataaatacacataagattt

SEQ ID NO: 266485 - DNA, 869 bp, Homo Sapiens
  misc_feature (521)..(521): n is a, c, g, or t
tcaatatacactacaagaaatagtaaaggaagttctccaggcagaaggaaaatgatatcaaatggaagctggattcacagtaagaaatgaacagcactagaaatgctaaatatgtgagtaaatataaaattttaaaaaattattttaaaacatccttattaagtagttgactatttaaagcaaaccaataagattgtattgtggtgcttatatgtaaaaataaaatgtatttcaactataaataaaatttgtgggaggccattgttttggattgagctcctgcaccaagctccaacagaccagaccaaaccagaatggagttactggtgctaggcacccgtacaaattgaacttaaaaacaggccagttttccaaaaagcaaaagattcatgcaaccaatcaaaagggacccaggcaacctgaaccggcatgataaggaagccccctctgccttaacccacactaggaaagtaatctgaagtaacttgatgttaaccaatctgctgcttctactatattgnttccttgttcctgctcaagcgatttcacaaaaatctactgttctgccattccccagtggggcttatgtctatttatatactagatgctgcctggttcatgaatagctaataaaagtcaattagatcttcaaaaatcaatttttgaaattttgttttttgacatcaccataaccaaaattctaggaagggagaaattaaagtacactgctgtatgcaaagtggtgtattacttgagaatagactataataaattaaaattttgtattataaaccttaaagcaatgactcaaacaaaaaccgaaagaacagttatagcccttaaaccaaaaaggcagagaaaaaaaaggc

SEQ ID NO: 266486 - DNA, 381 bp, Homo Sapiens
cccgtgagctaaggtgaaacaaccaggctgaaggctttgcatgctgcagtgctgggtacaaccatgtcagttcaaaccagattcaatttggttggttaatgtgcccatttcccattgctgccatacaaacttagtagcttcaacagtacaaatcaattacctgtataatcctggaggtcagaagtccaaaatggatctcactgagctaaaatcagtgtcgtcagggcagtgttcccttctggaggctgcagaaaagaaagtgttgtcttgttttttccagcttctagaggccgcccacattccttgactcatgggccccctttctctgtcttcagagccagcaacatcacagctcttccgaccaatcattcttcattggca

SEQ ID NO: 266487 - DNA, 774 bp, Homo Sapiens
  misc_feature (760)..(760): n is a, c, g, or t
aattcggcacgagcggcacgagggagggttctgccctagtgaaggttacaacttaggaggacataggtaattacaatatagtgcataaagtggtaatgtgacaattgaaactagattaatgtttcatttggattttcttacatagatttgtacatgtaagtttcttcaccatatatttattgtatgatgtaaagcaaattgaagtattgaacagcaggtctgaaataacacaaaagagctcatttacctgatcttttgtattgagtaatgagctatcacaattggcatgctgaaatgatgtgtctgtctttatgtgtagtgagccccatgttttggtagatggttttcaaagctgtccaccgtcagggcttctcatccctgtctgtgcatgctgctccacccatcagcagtctaggctgttttcctaatcctagattggactgacctggtgacttacactgactgatgggtagcctggaaggaactgcctgggacttctgggctcaggccttgtctggcagcattcactttctctgtctttggagctagccatcatagtaccctgctgaagagagaggccactgtatgaggcctgaagccatcttggatgtttcagctccactcaagctgaatgcacctgcgtgactgagctcgagacagaccagaagaaaacccacctagctgagttctagccaacccacagaatcatgaggaataataagttattgtttaaggccactacgtttttgggtgggtttgntactcagcaatgga

SEQ ID NO: 266488 - DNA, 711 bp, Homo Sapiens
  misc_feature (19)..(19): n is a, c, g, or t
  misc_feature (21)..(21): n is a, c, g, or t
attggccctcgggcccagnanttcggcacgagtctgggattctccttcccgtgtacctttttcaagtgggcagcactcaactcaatctttcccaccctcattgatgtcaaagtccaattcaatgttacagaaacccactgcctatgtgcggcccatggacggacaggagtccatggaaccaaagctgtcctctgagcactacagcagccaatcccatggcaacagcatgactgagctgaagcccagcagcaaagcacatctcaccaagctgaaaataccttcccaaccactggatgcatcagcttctggtgatgtgagctgtgtggatgaaatcctaaaagagatgacgcattcatggcctccccctcttaacggctattcatacaccatgcaaaacagaaccttccaaatttccttttccaactaaggtaagtaaataaaatgtatctttcataatgtaagaaaactctaaatggcttgactaaaatcatatggattaaaaattgtcttgccattcctattctagtgggagacagacagtaaataagtgaataaatagataaattcagatagtgacaactgttatgaagataattagcagggtaatggaactgagagcatcttggatcaagaggtattaagaaagctttgaaggcaatatgcgagagagatttaaaagacattaatacagccggacacggtggctcactc

SEQ ID NO: 266489 - DNA, 776 bp, Homo Sapiens
  misc_feature (151)..(305): n is a, c, g, or t
aattcggcacgagcggcacgagggatgtgtaaagtctacttgggtttgtaagaccagcctttggttgaagaccttccttgggtcctagcagacagaaaccaggagagacagagacatctatatccggctacatagagaggttatctgtctnnnnnnnnnnnnnnnnnnnnnnnnnnnnnnnnnnnnnnnnnnnnnnnnnnnnnnnnnnnnnnnnnnnnnnnnnnnnnnnnnnnnnnnnnnnnnnnnnnnnnnnnnnnnnnnnnnnnnnnnnnnnnnnnnnnnnnnnnnnnnnnnnnnnnnnnnnnttagaaattgagagatttactttgaggattgacccacatgattgtggggactagccaagtccaaaatctgcaggctggagatttagggagagctgatgttacagtttgagtctgaaggcagtctggaggcagaatttcttccttgagagagacccagtttttttctcacgaggccttcagctgattaaatgaggtgtatgtacccacagtatacaggttaatctactttattcagagtctactgatttaaatgttaatctcatttagaaaatcccttcatacatacatctaaactagtgttagatcaaatatctgggtactgtggctcatccaggctgacccataaaattaaccatcacacctgtgcaagcgcttttccctcctggatggtgtcctagggatgacagaggaggggaaagccaggtctctgcttcaaggagacaaaattatgcatacgaagaaattaagaat

SEQ ID NO: 266490 - DNA, 653 bp, Homo Sapiens
ccttcctgaagtctttcagctgccctctgctgccatgcccttggtctagtagtcaccagaccctcagcatagattttacaatagcttccaggtctttcctctcatccggtttcccaaactgcaggcattcgtcttccatctttacaatttttggggtcatattgacatatcacctgttctacaatttaccttagtatttttcttaaattaactttttaaagaaacttaaatagaccgattttaaaagaaagctttctagagttgaaagcggggagtccagacagatatttgtcccacccctgtaccctagcaagattattccacaatagtcaagaggtaggaacaaccccaagtgtctatcaacaaatgaatggatgaacaaaatatgggatatccacatattagaatactattccgcccatagaaaggaattacacatggcacgacatggatgaacctggaagacattatgctaagtgaaagaagccaggcacaaaaagacaaatatcacgtaattctatttataggcggtgtctagagtagcccaaaacatagagacaggaagttggagttaccacgagctgggtggaaggggcagtggggagttattgcttattgggtagagtttcagtttgggaggatgaaaaagttct

SEQ ID NO: 266491 - DNA, 376 bp, Homo Sapiens
  misc_feature (311)..(311): n is a, c, g, or t
  misc_feature (352)..(352): n is a, c, g, or t
  misc_feature (358)..(358): n is a, c, g, or t
atgagccactgcaccaggcccctttcttaattcttatatctttccttcctgaagtctttcagctgccctctgctgccatgcccttggtctagtagtcaccagaccctcagcatagattttacaatagcttccaggggctttcctctcatccggtttcccaaactgcagggcattcgtcttccatctttacaatttttggggggtcatattgacatatcacctgtttctacaatttaccttagggatttttcttaaattaactttttaaagaaacttaaataggaccgattttaaaaggaaggcttctaggngtttgaagcggggggagtcaggcaggatatttgtccacccntgtacngggcagggttattcccat

SEQ ID NO: 266492 - DNA, 557 bp, Homo Sapiens
agtggggtttggcttattaagaaatcgaggtatgggaaagccaccaaacggacttgttaagaacccagttcaggaattagcgtgcctgggttcaatccgggttctgtggcttccaagctatgtccctttgagcaatttccctccttaaacaagagttttcttccttgtaaattacatctgtcatggtttcttggagggcccacttgtatcctctggttcttcatttattgagcacctactacatgcaaggcactgtactaggcgtgagaagcatatagaggcaagaaagagataccaagatgccatctgtgtcctggttagcagagctggaccagtggtgccttggagggataagccagctgcagctgggctgtgtggttgacttatgggcccagccagccaggctcaggccatggctcccctttttcttcctcaccctgatttcttgcttattcactgaagttctcctgaagaggaactgggcctgttgccctttctgtaccatttatttgctcccaatgtttatgataataaaggcaccgctgatggggacctcc

SEQ ID NO: 266493 - DNA, 322 bp, Homo Sapiens
acagaatgaccaatactgagacatactttagtaaaattgctggattttaaagacaggaaagtcctttgagcatccaagcaaaaaaggtaaagtcatttataaggaaaagaaaataagaatatcatcagacttttcaacagaattttttgtgccaaaggaaaaaatagcttaagatactcaatgatctaaggaaatgtcaaccaaggatttttatatccagccaaactgacttccagatacaaagactggcacaggaaactttaacaactttaacaggaattcagtggactttttcagtccttcctggggagatctccggggg

SEQ ID NO: 266494 - DNA, 696 bp, Homo Sapiens
ctttaaaagacccagggatttcaactagaaaattgtattgaataaatctatttctttcccaaatgaaaagtgacaaagttaaggcccttagttagaaaagtatcacgatggcaatttcttttctaattagtgaaaaatgtgccattggcctttctctgaaatgtaactagtattatttttcgtattcaggagggaccttgtggtggcagcccagaattttttctgtgccggctgtggaactccagtagagcctagtaagtacggataatggatcgcctgcttatggatgtgatgacaaggtccagaatagcaaagtagggcagcgcattgcttgtgtgagagatgcctttgatgagaagttgttataagagcttcagagaagtttgccctccttttcatgaggagtccatcatgactgacaaggctgtgtgatcaactaggaccgaggacgccaggaccagcctcctagttctctccctgttgggcatcagctccagccacgtggcctcctgctgccccttgaaaatgccccaggctcacttctgacatatttgcgtttggtggttttctctccccccaaatgctctctctgcagacacccccatgactaattcctttgcttctttcacattttcactccaaagtcacgaggtcttcccttgctgccctatctaaaatacctgtcttgccccactg

SEQ ID NO: 266495 - DNA, 904 bp, Homo Sapiens
caacggctgggactgaggggctcaggcagggtgtgcccttcctccgcatgcccctccctccccacggccctgccaagcagtctataccagcatgagtactgccccacccctgggggaaacctggctccaaccaacccctcccctgcctccaccatatccactaccaggcaccctttagaacaggggtctgggggtaccccaggggtgttaaggctcaggagtgggcagcagtcagggagagacagaactgggggaaagggatggttgtgggtctttctgttcccaagatcctgaacatggaagcgatggcagggcatagactcaggcagagaggattgtgggaggaatccgtttttgctccacctctttttgagtgaacagaggacaaaccttgggtcacagggcaagtagatcatggaccacagaacagcagatgagaaaagacttgggttggagtgaaattctggtctcagacaccaggagaccagagtctctgaggatgaagtttcctacccctatttgtagggaaaaggacttgagtgcagggaaaactcaaaatcccaggccctgggaaatagtaaaataatcaaagggttttccatttcactccacttgttagtttatcttggcactgaagaggcactttcgagtatctaacttttgccattgggtggggtggggacagctgctcgcggaacagcccctagtcggctgcttccagagtaagcagtctttatgggctttctctgaggcccagtcactgcccctgggacccaagtccctggaggggaggtggaaaatcagtgctacggggccagtctttcccgtggctgccaccagcgaatgaaacttttgtatgatacataaagtgcttgagtctatttttaataaaaagggaaaaagc

SEQ ID NO: 266496 - DNA, 368 bp, Homo Sapiens
  misc_feature (171)..(171): n is a, c, g, or t
gtggaacaaaaaaaggaatcctccccaaaaaccctctctgccctgaattctaatgccctgccatcgcttcccatgttccaggatcttgggaacagaaagacccacaaccatccctttcccccagttctgtctctccctgactgctgcccactcctgagccttaacaccacngggtacccccagacccctgttctaaagggtgccctggtagtggatatggtggaggcaggggaggggttggttggagccaggttgtccccaggggtggggcagtactcatgctggtatagactgcttgcagggccgtggggagggaggggcatgcggaggaaggcacaccctgcctgagcccctcagtcccagccgtt

SEQ ID NO: 266497 - DNA, 726 bp, Homo Sapiens
  misc_feature (23)..(23): n is a, c, g, or t
  misc_feature (64)..(238): n is a, c, g, or t
  misc_feature (248)..(302): n is a, c, g, or t
  misc_feature (327)..(376): n is a, c, g, or t
tcaaaataaaaactctttttttnctttaaaggcttatattggctgggaaccagtggctcacacnnnnnnnnnnnnnnnnnnnnnnnnnnnnnnnnnnnnnnnnnnnnnnnnnnnnnnnnnnnnnnnnnnnnnnnnnnnnnnnnnnnnnnnnnnnnnnnnnnnnnnnnnnnnnnnnnnnnnnnnnnnnnnnnnnnnnnnnnnnnnnnnnnnnnnnnnnnnnnnnnnnnnnnnnnnnnnntgcttgaacnnnnnnnnnnnnnnnnnnnnnnnnnnnnnnnnnnnnnnnnnnnnnnnnnnnnnnnagagagtattacgtagtctcatttnnnnnnnnnnnnnnnnnnnnnnnnnnnnnnnnnnnnnnnnnnnnnnnnnncttatgctgagttttgacagtaattgcatttataatgcttttattaagtactaactctctaatgttgaataagatgtaagcacatattaatggcttttctacattctttatatcagtacaacattttctgaagtataaatgctttcctgtgcaataaggtataggaattaaagttttgccatattcttcacacttctgggagtttctgccagtatgaattatcttacctacaatcaagtgtgacaaccatttaaaggctttgtcacattcttcacatttttataatttcttaccagtatgatttcctttatgtttagaaaaatttgaaggttttgttaaaatcattttca

SEQ ID NO: 266498 - DNA, 607 bp, Homo Sapiens
tcaaaggtatgaataccaggaggcagagatcaatggtgccaccttagaggctgcctatcataccattattgtcagcctctggagcacctggttgaatggcatctatgtaacctctcccaccaagataattggcagacagcatagtaagtagaaaatggaaatgagattttactaaacccttctccttcctcacttcgaaggccttctgggaaagacagcaaagttgagctcatataaaccaaaagctctggccccagctctacctgcatggtggggggaatggcccattcttccttacttctgacaactggctcttcaaatacacttcaaatacctgggaacctattcatatccatcctctgaatgggaagaaaattgcttctccttggcaaacagctttggcctgggcaatggtcccaatctgtcattagtatgagaaactttccagtattttcatttttgtggtcactgttctcttctatttccttttatgtattagttcataagcactatgtttcaaaaggactaagacattctagagtccttgattgttcactcatctttccattcattttttaaataaacatttattaagttcctttatccc

SEQ ID NO: 266499 - DNA, 428 bp, Homo Sapiens
  misc_feature (364)..(364): n is a, c, g, or t
  misc_feature (391)..(391): n is a, c, g, or t
gaagaattgtaaatacttataggtccattaaaaataacaataatgagccaccgcacccagcctgactattgattcttgattgaagaatgtttagtgttgatttttgattcctcaggaggcagtttaattattggcaaattacagtgaacttgtgttggcttgtttttttgccctaatagcaaggatttgaaggaagttcaaagtgtttcccaagcccttctaatttggcaggactcagcttccaaattctgtctcttttgcagatcttgtcagctcttgggttttaggttttgttagggatgagtctataatttttaggggcacagcctttctgtgggtgcctcagtaggagggtgggggcaanttaatgaagggggtttaagggccaatntctcccactccggaccagggcttaaacccctactgtt

SEQ ID NO: 266500 - DNA, 827 bp, Homo Sapiens
ttgattaaggtggattaaactgaaagaagtggtgggcgtctgaattggaattagaattaaatattaatagaaacagtagcatccactgcccttcacacacaccttcctgcccacttaccatcaggtgaagtaagctttagggatggtacatttattcagagagcaccttgcacaagcccagcagagtgcccagtgtggtgccaagagccgaatgaccagagatggttccaggggactgattcttcagacagggttctaagacaaagggcaaaagcctccccggaacacatgctgatgacatgtcagcccctcctgagctcgggtaacgcgaaccaggtagaagtaatgtgtgccagggacaaggagacgcacccaggagcctctggcctttggtcttcctattcctggcttcacaagcacactccaagtttgggactgtgtgttgggcaggtgagacctttataaggttccctggctgtttctgcgtgagttggctgaataggaaatcaaaggacttctgtgctgttccgcagagcagggccctagttaaaattcctcacagatgatgctgactaggatggaatccctttgcctagtgcttaagagtacccaggtctggaattgagcttagtcaggtatgagcctggacaagtaactgtatctctcaaagcctgtttcctcagctgtaaagtgggggtgataatagtaggaaccccaggattggaattgctgtgagaattagagatgatgtgtaaaatgctcagcacagtgtttgggccaaagtaagctaactaccaaaacccagccatttataaaaacccaacctt

SEQ ID NO: 266501 - DNA, 426 bp, Homo Sapiens
  misc_feature (407)..(407): n is a, c, g, or t
tgattaaggtggattaaactgaaagaagtggtgggcgtctgaattggaattagaattaaatattaatagaaacagtagcatccactgcccttcacacacaccttcctgcccacttaccatcaggtgaagtaagctttagggatggtacatttattcagagagcaccttgcacaagcccagcagagtgcccagtgtgggtgccaagagccgaatgaccagagatggttccagggggactgattctttcagacagggttcttaaggacaaaggggcaaaagccttccccgggaacacatgcttggatggacatgttcagcccctccttgaggttcggggttaacggcggaaccaggggtaggaagttatgtgttgcccagggggcaaagaggacggcaccccagaggcnttttgccttttgggttttc

SEQ ID NO: 266502 - DNA, 695 bp, Homo Sapiens
  misc_feature (116)..(182): n is a, c, g, or t
  misc_feature (297)..(341): n is a, c, g, or t
tattagctgcttaagaggttacccaatttaaatgctcacaatggtgtatggagactgccaatcattctatgttctagccaaaagaaaatatcattattatgtggttgtgaggaagnnnnnnnnnnnnnnnnnnnnnnnnnnnnnnnnnnnnnnnnnnnnnnnnnnnnnnnnnnnnnnnnnnnttctctggacattttcctattaggtcatttatcttcttatggatttccaggagctatttatattaaggaaattaggtttttgactatcttgtggttgcaactttccccacttagnnnnnnnnnnnnnnnnnnnnnnnnnnnnnnnnnnnnnnnnnnnnnctgcataagttttaaatgcttatgtcatcaaacttaccgagcctttgctttacagcatttgggttttacatcaggctaaggaaaatcttccatatcccagattaaaaatctaggttgcttttgatacttttgaggcttttgtttttatgcatggtgtttacaaaatggttacacccctcctgttcacctcataaacccatgtttgaaaaattccccgccctttcttcccccatatcttctggaaagcattgatcaaacaggaccagcatttatgtttttaactgtcttaatcaataataaatcttgaaagcaagaatgcgttttatttgtttctatatcctcagcaccatgttc

SEQ ID NO: 266503 - DNA, 702 bp, Homo Sapiens
  misc_feature (26)..(26): n is a, c, g, or t
  misc_feature (28)..(28): n is a, c, g, or t
  misc_feature (75)..(238): n is a, c, g, or t
ttgctctgttgcctgactgcagtgcntnggtttcaattatggctcactgaagccttgtattcctgggctcaagcnnnnnnnnnnnnnnnnnnnnnnnnnnnnnnnnnnnnnnnnnnnnnnnnnnnnnnnnnnnnnnnnnnnnnnnnnnnnnnnnnnnnnnnnnnnnnnnnnnnnnnnnnnnnnnnnnnnnnnnnnnnnnnnnnnnnnnnnnnnnnnnnnnnnnnnnnnnnnnnnnnnntcacaggcaggagcactgcatttggctgcattttaaaaaaatatattgcccaaaggcatacaatagaaggtctactgttacttactggaacaaaattgaggtggtataaaataaacggacagagccaatttccctttaaaaatccagacagggcatgacacatgtaagagatataacttgaaaagaagtcaaaattgctcctaatcctaatcactgcttgatgctttaaaataagtatcaaaatgtacagaaatgaaaggtcttaaagctacttttgacaaaataatttctgtagatcaggttgagcaatataaccatgtgagtaaagacacaaagccaaaacttcagttctgttttccaaaactgcacatctaagcagaaagcgacgagaagtcaagagttttcaaaaaaaagatgtgtaagctcttttcagtcataaccttaactgggcatttcatcttttg

SEQ ID NO: 266504 - DNA, 665 bp, Homo Sapiens
atggctaaatccatttattccgaaataaaaagcaaaataaacaggagtcgcatcaccagggcgccacgaccccatccccgcctccttcctctgtcctatgctatcaataaataagtttcccagccccaaataattattagaacctcctccccatgtgccagctccaacctctgctaggtatgatacagggggcggccctacccctggaatatacaaaatgttacacagatacaatatgtacactggggaagcagggccaccccagcagcccgtgccctcgcctggtctacagttagccccactgtcctgcctcagctgcctctctgtgtaagaagatgggagcccccctgagggaaaaattgctttggtgagagtaaggaggccatgaggcctctttccaaagaggccaattatatgagcctctggctattaaataacaatcatcatcatccagaaatttaaggagtcagccctggccaaggtggctaagggtctacacatttgtctccccccattagacaggggtcttatttgctactgtaagagtaaagggatgactgggaaggggtggcaggcacatgatgggggcggagcctccggccccacttctccaggctttgctgacagtggcctgctttttaaaatttttatcctggactttcttt

SEQ ID NO: 266505 - DNA, 1008 bp, Homo Sapiens
  misc_feature (348)..(348): n is a, c, g, or t
  misc_feature (995)..(995): n is a, c, g, or t
aactggatggtactgaaaaagttacagcagcatttcagaggggaaagttccccttcatcaatctgcataagtagctctgaaaagaaataaagtggccccactgcagaagtagttctgaaaaaaacacaagaaacacctcaaaagccaccggtgctttagtaaagcacctccgcttctgccatctccccacaatgaggaagctccagtaccctgtccacatttctaaatggcactcatcggattcttaatgagttgcaggctttcccaacggacttgtgtgacagagccacgctcttgctcatctgcgtaatccccacactgaagtggagttgttcatgaaaacttacntaaataatcaaatttcatcctctcaagcaggatatgcagtggtactttgctacaaatacatttaccactacgaattttctcacttcaaagcgatctccttgcccaggtgtgtgctctccagaaaattacatctctttctggaattacgctggcaaaggtggacctgttttcccaaaaggaccgtcagcacacccagcacagaccacctggggagctgaagaaaacgacctccctccctcctccccgctgggattccccgggctgagagcgtgagtgagaagcgcaaggcagtttctatcatgggatgactctccgctgggaacttcagggaaaccacaaccatcattactcaggccagacagctgccagaaaagcagcctagcctaagaactgaagctgaaatagaggtgggaggctgtattccattactaagcgcgggagcactcactcccaagtttgtccacatttcaagaatgttaaaaccctgtggtagaaatccctgattatttataacttaaactaccgtgtaaaagcagaaacttgacaaatgaagacataaaaagaactggtgacaggtaggctagtactagaatacaaagcattcatcacactcctcttttgtgggtccttccaaacctccatccccnattccctactgga

SEQ ID NO: 266506 - DNA, 940 bp, Homo Sapiens
ccccattttaaagacaggaaaatgggctcagagaaggatcaacttgcctgagcacaacagggccacagcctgtctcccagcccccagatcaggccattgaccaagctgaggatgcagagctgggatccttgccctttgttctgtgttgtcccctggatgtgatggttccttggaactgaagagggcctggactcagtggcaggcatacactccaggccccagtgccatcagtcacacacaggagctgggttagggacggggctttactctcttctcgagtgagtgtctccagtaggctatgcattgaggggagggtctgttagaaccaagatgaggaagaaagaaagggagagagagcagttccaagccagagttgttgaacaacaaggccaaggttgcagaatgaggcaggggtgaatctgagaccagaacccaggctccaggttccaggcttccacgtgagatgcgcaaatatttgagaatcttgcactgtacaggctccaggctgtatttgtccccagccagcttcaacttgtctatctgatgggctgagtgtctatatgagtgtccttggcagtgatgacccagtggactgcccagccccagaagagctggctgtcacctgtgtgccaggatcccagtggccaaagggcaggggcaccaggaagtgagaggagagccgggacctgggaaatgagtgttgactgtgtctgaaaccgagtgtgggggccgcagccatccttgccccatgtccttctgcagaataagagtaaacaggccttctctagccatgtttgatgcaagatggcccacagctgtgactttttagctttatgtacatagtctttattataaaggtaacatatatttactggaattaacccaaacactacagaaaatatgtaaacatttacaattaaaaatgtgtctactctttgaa

SEQ ID NO: 266507 - DNA, 456 bp, Homo Sapiens
ccaaagtgctgggattacagtcgtgaaccactgtgtccagccctagaatttttaagaactatttttcctccttcccagagtccccaaaactcttcagccaattcccaaggcctccacacccccttcccaatccttcctgctttactctcaggaggctctcctccatgttctggcccagcaacccccttcagccttcctctcaaggtggtacctctctctgtaaacagtagtcttaaccttccccagcccctccaacgtgctagccatgggcaccaattcctataagccatcctgaggatctggccaaaacaaacagttaaatggatgactagtcataaaacaacatgattgtaagctatcataaaataatccaggaccctgctcccagaaaatagccagttaaaagaaagaaggagaaacctgtctgtgggtcctacccacattaattaagcggcc

SEQ ID NO: 266508 - DNA, 439 bp, Homo Sapiens
  misc_feature (394)..(394): n is a, c, g, or t
  misc_feature (425)..(425): n is a, c, g, or t
gtctcccaaagtgctgggattacaggcgtgaaccactgtgtccagcctagaatttttaagaactatttttcctccttcccagagtcccaaaactcttcagccaattcccaaggcctccacacccccttcccaatccttcctgctttactctcaggaggctctcctccatgttctggcccagcaacccccttcagccttcctctcaaggtggtacctctctctgtaaacagtagtcttaaccttccccagcccctccaacgtgctagccatgggcaccaattcctataaggccatcctgagggatctgggccaaaacaaacagttaaatgggatggactagttcataaaaacaacatggatttgtaaggctattcattaaaataattccgggggncctggttcccagaaaatagggccagtttaanaggaaggtgggggg

SEQ ID NO: 266509 - DNA, 297 bp, Homo Sapiens
  misc_feature (32)..(32): n is a, c, g, or t
  misc_feature (43)..(43): n is a, c, g, or t
  misc_feature (149)..(149): n is a, c, g, or t
ccgaagtatgaaaaaacatattccatgagtgnctatactgagncagagtggctatactaataccaggcaaactagactttaagtcaaatttgttacaagggacaaagaaaaacatgaccagtactgattacaaggatctatttaaatangatgtagtaaatagtaaagataataataaaaacttcccaaccaaagaaaagccctaaggacaagatgctttcaatgataaattctactaaagatctaaagaattaacaccacttcctctcaagtttttgcaaaaaatagaataggaga

SEQ ID NO: 266510 - DNA, 772 bp, Homo Sapiens
agctcggcgtgggagagaactgaagaagatatgctcaatatttcattttatttattttttaagtgaatggatagaaacagacccagaggaagcaatggaaactgggaagaaaatgaaatgacagctgtaatactggctaaaagaacattttaatttataactactataataagagatgtgccatactttttttggcttaacaacaatgtaacaatagcatcaatagcatttattgaatgcttattctgtgagagcactgagtagagaactttttgtgtgttacctaatttaaccttcataacaatcctatgagggtaggccctgctactatcatgtccaccttatagatacagaaacctaactggggagtgaagagctctctctaaagccagagagctgatgaactagcaaaagtctgggttctaacccacaagagtctgactctggagttcatacatgatcttacccagtaggctgttacagaaggtcactgttttgataatgctatttttgccaacttgatttgaaaaagcaaatggcagaaatgtgaccaacctgaaaactgccttcttgaggtttttggtatagtactaacaagaccagcaaaaggtattccctatatcttgcacctttggcagacactattattaaatcttggcattattattttctcagcccaaatgtaggcctcacaattttctcaaagctgctaccaatcaaaggatgcaatcactaatagagctggatgtaaataaagatatgtctgttgcag

SEQ ID NO: 266511 - DNA, 783 bp, Homo Sapiens
tcctccaggttctctctccatttctgcctgtgactgctgacaccctgttcaccttctccacgttgcccttctagcctctctgtgcgtgaggtcctctagttcttacagaatgtcttgtcagtgctttcaccgtgacctgccccccaccccgagagctgtccaggtgtcagtcaccctaggatgaaatgacaccaatattggtgacaagctggccttctggttatgctcaggagaatcattaaccatctttaaataaataaatccctgctgctactccccatacaatttaggaacatgtgccttgtaacttttgatgtggggctcttgtttgaagccattgttgttttccctgctgcctgcatcatcatatgttatgtgattcttcaggaccttggtttcaatctctataactgcctatccttcaaaacccccaaacatattattaaatgacgtcacctgtcatttaagccatctccatcccaaacatatcctccaaatgaaaatccactgagagggagagggagagtgtgattataacaaagagacagaaacttatagaggtagcaccttacatttttgttggtctttatatcttgcatgattcattggtataccaatttcaccctttaactaatggctgccactttcaaaattgttttcctcaaactgaattagacgaccctcctcttggcttccttagtgacatttaaaggggacatggatcagtacctggaccccatttaataccagctgccccaccattaaaatagtgattactggaga

SEQ ID NO: 266512 - DNA, 742 bp, Homo Sapiens
  misc_feature (373)..(373): n is a, c, g, or t
  misc_feature (628)..(641): n is a, c, g, or t
cctgtgaactctactgtcccaggacaatgggactaggacttggggttcactctgccacactggtccttcctgttctgtttattgtgcgcagtaaatcaactctcctgtttgcgcagcggttctgtgttctagattatttataagattgaaatccattgtttatttttctcagcaggtttattgagccagtcaagaataaaatactgtcttaagcagtagagtaagccattagccaattgcaacttggcttcaaattaatccctaaagggtgtgcacatgaacacacacactttgtatgtcccacatacatgtgtgtactggaggtgagagccagggggaggtgggaggagctttagtggtgccagatctctgncagctttgtaagcttcctatgactgttgacggatattttttccttttagtctgttagtgagtcatcatcatatgccattttattatcttgaaaacagtctgtggaattttttatcccgtgtctttgctgtatgagtgaaccaccacagagggtgtcgggagcaatattaagctggagactttcttcagtgatgcttcgcttatgtatttgcagctgctgccattgtcgctttgttcccatgtgcaggagttggannnnnnnnnnnnnngtttggcaagaaatattaatagtaacttttgtgtgtttgattattttcggggccggagcagcatctatccagcacctttgggattttggtgggtattgact

SEQ ID NO: 266513 - DNA, 735 bp, Homo Sapiens
  misc_feature (282)..(282): n is a, c, g, or t
  misc_feature (334)..(334): n is a, c, g, or t
  misc_feature (346)..(346): n is a, c, g, or t
agggacctcttggtaaggaagtgagagtagtctctaggagcttagagctggtcccagctgatagccagcagggaaaacagggattttgatgccacaactgcaaagacctaaattatcccagtgacaacaacgaattaggaaaagaacactcaactccatgtgaaaacgcagctggctgacaccctgatgttaacctgagcagaatccagccttgaattgcctggacttctgacccacagaactgagctaaatggatgttgttacatgttgctcaatttgtangtcatccattacctagcagtagaaaatgaatacacctccaaatgtggccaanacaaatcccttntcagtgcacttgggaaagcatgggttgaccagaacatagaggagtttttgggcacagattgtcccaatagaagtcataccgtaccctgaacaactcctgtgggttcacaaagtattcagatttacggagtactgaggttttatcattcagctttagtatgttaaaagcatgtatagtgtccaaactcatcaagcacatttgatctgggcaaaactccaagaattctatgagtttgaagctcagttcctctcagcatttgggtccataatcatgtttgtaagcagatggtaatccaagacattgtatgatagaaaaaccctacctcaatattttctctctaaatccaaatcacttccctaagatgtgtaatagtcaaataaaatggtata

SEQ ID NO: 266514 - DNA, 992 bp, Homo Sapiens
attaaataaagcactctcaaaaactgttgtttctgtgcacagcagagaatcaagaattttacagtgactacaataaggtcctagtgatacttaggagactaaaacttgtctgacatgtatgcatgggaaatgtttcaagtactaaggcattgctaatatcaatcaacactgaaattttaaaaatgtataaatccagttttccacaagtagtaaaacatttataacaattatggatgccttttccattagctatttgcaatgctgttaaaatatactcttgaaaagtcataaattccattcctatgatgtaatgttatctgccttcatcattaggtgttccaccaggtcctgcctatgggaagctgaaaaatggaatttctgttgttctggaaaatggggttacaatttctcccccaagatgtcttaaaaaagcctattgttggaagaaaaatctgcatattgggtgactgctctggggttgtgggtgatggaggagtaaaactgtgctttgaagcagacctgttgatccacgaagcaaccctggatgatgcccagatggacaaagcaaaggagcatggccacagcacaccacagatggcagcaacatttgcaaagttgtgccgtgcaaagaggctggttctgactcacttcagtcagaggtacaaaccagttgccttggccagagaaggagaaacagatggcattgcagaactaaaaaagcaagctgaatcagtgttagatctccaagaagtgactctagcagaagattttatggtgataagcattccaatcaagaaatgaaaccagtgttcctgagtgcacactgacatgtctgtgaatatgttactgaacctatagtccagtttttttatttcttgttttagtctgaaattatttgggccctaataatcctaaaaagaatggagctgcattgatgaattggctcagtatttaaagggagcaaactttttgataataaatctttttaagag

SEQ ID NO: 266515 - DNA, 505 bp, Homo Sapiens
tgctggaccacagggtgacaaaactgaagctgtctgtcacatccgggagcaggtgctatgaggataagcagccagagaagacccctaacttgatctgtgcccatcaaagaaggcacccaaagcaggatgcctccctgaatcctaaagccaattagcagtcagccaggacagctgctagagggggtctaagggggagtggagaggatgttccaggcagagggaacagcagacaggaaggctcagaggtgagtgtgagcaggcagtctcagggaccccagacagttggtgaggctgcagtgctcaggggaggtgtgccaacaggtaagctggcagggccgggtccctgggggctggcttgtcctttctgccattgtctgagagagtgggtggctggtatctggtggcccagatgaagataatggagatgcaattgtgttcttctttctgctcagtgcctctcagttaaggacatttgcaaaaattaataacagcatatgcttttatg

SEQ ID NO: 266516 - DNA, 859 bp, Homo Sapiens
aagaacaaacattccttcttgggaaaaaggccacagagatgctgaattgggggtggggaattgacaacctttcttttcttactgtcttctgtagccctgatggcagttacgtggcggcaggctctgctgagggctctctgtatatctggagtgtgctcacagggaaagtggaaaaggttctttcaaagcagcacaggtaagatgaaccctgtctcagccccccgttgcgttgtgagcaaggcctttgacttcatctcaggggtcatccggtttagacctcagtcggcgctgtgagggcactgtccgcccacctgctcggctggctgagctaggtcagtggagagaagctggggccactcacacagcacagcaggccacagtctacagagtacgccaggtagagcggttagagtggcagccgctggagaaagggttatagaaacacatccctgactctttggttatgtcccacgtcctctgtgtctccttccccttccctactctccttcctttctgcctccctgtctcccttggaagtccctgttgtcagtgcatttcagtgcattgacgtgtcctaaacactgatctccacacaccttcttttatcttccacctgataggcaggccccagacccccttttttcctagctttgttctgcccacacaagcccacctgctagttggaacccagataccattttccttcagaacctctctccctgtccttgggcagcagcaactgctcccagacctaaccagtgctgaccaccactgcccggctcttcagaggcatgtgtactgtctttccagctcactcagagctcctctcttagggagagtgtgataaggcctgactgcc

SEQ ID NO: 266517 - DNA, 421 bp, Homo Sapiens
caaacctgagtgctttgaacaaaggatattgaaagacctcagaagagggcctcagaactcacatgtctctctgaccttctcctgtctctccttcacttccaaagcatgatctttggccaggggatctctctgggattcccttatctgcctgagggatgtacttccaaaagaaatgtgactggcatgacctcctccctaggaatctcttcaaacagccgggaaagactggtcacctgagaggagattggaagtcctcactgcactcagaaaggctgttgtccattcttctagagactttatctgaataacaaggcaacttttgtttaccattcagttcctcccctttcctttctaacttgtcaccacctcccccaaaagcctcaagcctccactcctacaagctataaagacttcaaccatc

SEQ ID NO: 266518 - DNA, 527 bp, Homo Sapiens
  misc_feature (202)..(248): n is a, c, g, or t
  misc_feature (296)..(437): n is a, c, g, or t
agacaaacttgcagggagagaattatgtggcatgaggaggattgagaatgttgttcattttatctaattactgcctattaagaaaagcttcacatttatttcagctattctattgaatacttttacctaagataatgaaaccgttaagtagagatttttctaatagtataaaaatcagtgtaggcccagcacagtggttcannnnnnnnnnnnnnnnnnnnnnnnnnnnnnnnnnnnnnnnnnnnnnntgagctcaggagtttgagaccaacctgggcaacatggtgagaactcannnnnnnnnnnnnnnnnnnnnnnnnnnnnnnnnnnnnnnnnnnnnnnnnnnnnnnnnnnnnnnnnnnnnnnnnnnnnnnnnnnnnnnnnnnnnnnnnnnnnnnnnnnnnnnnnnnnnnnnnnnnnnnnnnnnnnnnnnnnnntgacagagtgagaccctgtctcaaaaacaacaaaaatctcagtgtgacaaattcctaacagctcaaatactacttgtcttatttgttaac

SEQ ID NO: 266519 - DNA, 183 bp, Homo Sapiens
  misc_feature (163)..(163): n is a, c, g, or t
gttaacaaataagacaagtagtatttgagctgttagggaatttgtcacactgagatttttgttgtttttgagacagggtctcactctgtcacccgggctgggagtgcagtggccgcgatccatttaggctcactggaagcctcaatcttcaggggatcctccngcctcagcctcctgagtaac

SEQ ID NO: 266520 - DNA, 682 bp, Homo Sapiens
ggaagattcagtggctggtccagagacagcattcctgagtgctatgggcaggcctgaatcaggggtcccatactgcctgcagacctgttgtcttcaacaccaaggaactgcctgtgagactgaccacagatacccaagcattctgaagtgaatatgtgaaacccgaagaaaagggtaaaatttctaaagcaatgaacatattttaagactttctcaatcttcctctttggagacactctttgtggaatatgaagtgatgagcattcctgaggtttcagggggcagacccagtccctcacatccccaccctagtgcctgagtccacgatccagtatctcctaaccaacagctttattattatattgtcattggaaggagtctttgaaacaactgttgacttgaataatcaatcaattcttgtcagaggtgttttgcaacctctccacaagaatcagaaagtaattccaatcaccttaaatcatgccatttcacccagagacctttactgtgaattagggaaggggggagatcagaagcagagagataaaataccttttgcatattttaaccataatcagtcactttatttcatgactgaatggtgtttgctatcatttcattatagtgaatcatctccaagagaagattccaaattgaagcaattccttggaaacaaacaaac

SEQ ID NO: 266521 - DNA, 752 bp, Homo Sapiens
  misc_feature (614)..(614): n is a, c, g, or t
ggacgtttgaagttcaggggagtgggctggactggaaatgtgaatttgatagttactagcataactgcttagagccgtaagactgaatgagaccaccaatgggataagtggagataaagcagagaaggggtccaagggctgagttgttgaaatccaagaccatcagctataaaatttttgaacttcataagagcaagaattttttctcatggcacggcctgctagatgcttgttcagatttctcccctttctttctaagaagatcctgcctggagaaggagcaacgacgtggctaatggatgtgaacatgaccaattacgtgtaggcaaaagtcataggatggaattctaggaaagttagaaagtgtggggagcacaggcagctcagctatcatgcttttcttaacctttgtccttgcccctccttcctgcttggaatgcagatagaatgctgaaggtgctggagattacatcagaaagactgaaaatttccaaatttatcttgacattatggagtaaccaaaatagccccaaactgcctgcattggacttcatattttgttagaaaaaaacaaaactcctcattcatttaagctgaggggagcggggtggggnttacagcaaagtgtattccttaatatacatttatgttgttccctactttatcccctatatctagaaaaatgcccagcatgtgacaattactcaataaatattgattgggtgaataaatgaacatctaagaattccaaa

SEQ ID NO: 266522 - DNA, 701 bp, Homo Sapiens
  misc_feature (619)..(619): n is a, c, g, or t
  misc_feature (676)..(676): n is a, c, g, or t
aatttttcagttttttctttaagatttattgtaagacatttgtataggaaatgtggagaataaaaagtttgacatttataacctcaccaaccagcatggttgctaatattttgggtgtgttttcttgggagtgatgtttaaacatattcaagatcttgctgtttaatgaatgtgtatcatgcttctttcactttatcataaacaaccgtgttcctagaagccattcacgaggatggctgagaatgggctgcaggaatatttcatcagatcaatataaggcagggccaccaaataatgggtctgcattggggactctgttgctagtgacaagaaacctaagtcaaagtctgtttaaacaaaaagagttcattgatcttatattattcagaacttggctttcatttcctggctcctctttctgccgtgttagttttcattgcagccagcaatcttaccaccaagaggatgtgtccttcctagctgggccctagccattcccgaataatcactgtgtctgggaatggggtgccctctttggccgaacttgagtagtgtggcttctcctggagttgcgggttcactcagcaccatcagaatcacagagactgggagaatgtanaagggggactcctgcaatgaaaagagtgcttatgcgaactgaaggaacactgagcangcaaaaaccaaaggctattagcatt

SEQ ID NO: 266523 - DNA, 762 bp, Homo Sapiens
accctccctaggtttcacaactagtaagctgagattcggactccaacgtgcatgttcctttcccagtagcacactgcttctcctgaagccgaagttccccttcagagaattatgtagatctcataattccctaggcaaaactggagctctttgaatcccagcctagccatccacactataccagtttaaggtgcaatcttgtgattattgccgctgatcacgattcttgataaggcatccacaactgataagtctgacgcttctgttttacaccaattgccagttgtctcagagtcactgtggaaaggaggggaaaagcttattctcttataaagttggttagcttcaaaatacagtgatgtattttgggatatttctgtggaaaggttacaagggtcaaatgcatcattaatgtgaacttaatatacccacttgatggattgattcctgtgggaaaactaatgggttcccaaagttcctcgggggagggctgaagtgctcctccgagtataaatttgttctttctgactgcatgtaagctcataaagcataggccaccctttggggctggcctgcagctcagtagtgcctctcgtacctgctccagaccctaagtaaatcacaagagtgcttcatttcaaatatgaatgaatccttgatgggaccaactaaccaacccaagccccacacgaaggaacaggagaagggtctgccgcagctaaggggtacgataggtataaacaaagcttgtaacctgacctc

SEQ ID NO: 266524 - DNA, 476 bp, Homo Sapiens
  misc_feature (343)..(343): n is a, c, g, or t
  misc_feature (367)..(367): n is a, c, g, or t
  misc_feature (376)..(376): n is a, c, g, or t
gaatggggcttgctcttgtctcaacaaaaccaaaacaaaaaccagaaccagaaccagaacaaggcgatcttcaataaacacactagagcagcaagttctgttggaatctttcctccctgggttagaagaatgaccaaatgagatccaaatgtaaacagttatttagggtacaagaaattgttatcacttagtgaggttttctgggttgtgtgtatttctgtttggggatagcaagtctatctttagccatgcactgtgctgttgatttgcaagagggtcagggttacaagctttgtttatacctatcgtacccccttagctgcggcagacccttctcctgttnccttcgtgtgggggcttggggttnggttagttnggccccatcaagggtttcattcatatttggaaatgaaagcactcttgtgaatttacttaggggtctggagcaggtccgagaggcactacttgagctgcag

SEQ ID NO: 266525 - DNA, 655 bp, Homo Sapiens
gcctctgataaatcacaataggaaagtgtgttttcatgaaagcaaggcagctatacctttgaggagaaaaagttagactatcataataaagacaggaaaatgagtgtaaggaaagaagtataacagaaaattagattccacagactctcaggtggtatggtggacatgcactgctgtggggaaagagggagaaatgaaaagaaggagcgtcatgggtcaaacgagtgggattcatctattggcaagctacccgaggatggctggagccggaactgaaaacaaagttcagtttacaaaactcttcacgtagaaaagaatgtgcctgtgctctgatgagctgaggaaactacagacctcaaagaatgaatgcacctttttcttccaaggcaaaggcattctcctggggaaccaagagcctaatgcatgcccgtaacccacacagttctgccgtttctcaaataatagatgcagccttcatgtttttaccacagttatgttaaatctttcattatgctagaaatctttcaatgagctagattttgtgttttaatcagaggttcccctctttctttgtgtgtgttttcaaagtaaataagatgccacaaaagcctgaaggtcttatttatagaaatagaaaaatattctccagtatagg

SEQ ID NO: 266526 - DNA, 521 bp, Homo Sapiens
  misc_feature (359)..(359): n is a, c, g, or t
  misc_feature (409)..(409): n is a, c, g, or t
  misc_feature (419)..(419): n is a, c, g, or t
aaatttataaatagctaatgttaacctagatctaaagcttcctattctgaaatccaaacatgaagactaagaaaaatatgtacattttgaaacaaagcagaaaaatgaaacttcaacaatgtaaaagagggtaaaatgccagtagacagccactttcagcagtttctgtttacagtgcttttgctggctaccattgttgctgtaaataatatatgtatactgtgatttctttaacattagacaatactgttaactccccattatgaaagatgaggaatctaagatacttttattactttctgtctcttgtttctcatcctctctccatttactaatttctgtaaattgtattatcattntttgggctcctctagtagttatctttaaagctctaaataatatggtgtcntcaacctgtncaactttaggctctccactgtataaaagtacaccattcacctgtcctcctgcctttactttgctggtatgtaacctcattatgtttataatatcagggtttg

SEQ ID NO: 266527 - DNA, 304 bp, Homo Sapiens
  misc_feature (54)..(54): n is a, c, g, or t
  misc_feature (76)..(134): n is a, c, g, or t
caactaattttatattttgtagagatggggtctcattacgttgccctgactggnctcaaactcctgggctcaagcnnnnnnnnnnnnnnnnnnnnnnnnnnnnnnnnnnnnnnnnnnnnnnnnnnnnnnnnnnncccacaaaccctgatattataaacataatgagggttacataccagcaaagtaaagggcaggagggacagggtgaatgggtgtactttttatacaggtgggagagctaaaggttgacagggttgaggacacatattattttaggagcctttaaaggtaactacttggaggg

SEQ ID NO: 266528 - DNA, 628 bp, Homo Sapiens
tgcatcctgaagcaaaccatggagagctggtggggacttccctgtcttgcgttcctgtgttttctaatgcacgcccgaggtcaaagagactttgatttggcagatgcccttgatgaccctgaacccaccaagaagccaaactcagatatctacccaaagccaaaaccaccttacttacccacagcccgaggaatcccgacagcggtggaaatatctacccaaggccaaagccacgccctcaaccccagcctggcaattccggcaacagtggaggttacttcaatgatgtggaccgtgatgacggacgctacccgcccaggcccaggccacggccgcctgcaggaggtggcggcggtggctactccagttatggcaactcccgacaacacgcacggtggagatcacccattcaacgtatggcaatcccagaaggcaatatgggtagcaaaaatccgtgtctccccatccgtatcccgtggtggtggtgacactgctgggagcagcagccagttatttcaaactaaacaataggagaaattgtttcaggacccatgaaccagaaaatgtctgaagatgttaagatcccctgattactttgagaaaaacaactaaaacaagaaccgtgttt

SEQ ID NO: 266529 - DNA, 796 bp, Homo Sapiens
  misc_feature (55)..(55): n is a, c, g, or t
cggcgtcgaggctggagctaaacctggtgcggctgctatcccgctgcgaggcgantggcagcggagaaacgggacccggacgagtggcgcctggagaagtacgtcggagccctagaggacatgttgcaggccctgaaggtccacgcgagcaaaccggcctctgaggtgatcaatgaatattcctggaaggtggattttctgaaggggatgctgcaagccgagaagctgacctcctcctcagagaaagcactggccaaccagttcctggcccctggccgtgtgccaaccacagccagagagcgagtgcccgccacaaagacggtgcatctgcagtcacgggcgcggtacaccagcgagatgcggagtgagctactaggcacggactctgcagagcctgagatggaccgtaaggaagagaactggagtggcagggtccccagccagtgagtgagaagcagtcggcagctgagctagacctcgtcctgcagcgacatcagaacctccaggaaaagctggcggaagagatgctaggactggcccggagcctcaagaccaataccctggccgcccagagtgtcatcaagaaggacaaccagaccctgtcacactcactgaaaatggcggaccagaacctggagaaactgaagacggagtcagagcgtctggagcagcacacgcagaagtcagtcaactggctgctctgggccatgctcattatcgtctgcttcatcttcattagcatgatcctcttcattcgaatcatgcctaaactcaaataaagacccccgcccaccta

SEQ ID NO: 266530 - DNA, 916 bp, Homo Sapiens
  misc_feature (438)..(454): n is a, c, g, or t
  misc_feature (595)..(609): n is a, c, g, or t
  misc_feature (860)..(871): n is a, c, g, or t
ccggcttgtgaggattacagctcccatgtccatagtctggcagatctctactatgtgttcagattatcttaaacgtgtagaggatgtataaagtagttccttgggccttttcagagatctcttttggttcaaaggggacacctaaagtattttaccaagttggataattattgaggttttcccaaactgatcagagccactgaggtgggtaatgttctagcactaaccccttacaggcctggagttgctgctagattgctactagccctattgggggaccccggtggtttctggacacgttggagtcatacgtggtgtccagcaacaacaccatatatgggaacacagagttggcaccaaacttgagatgtttgtaaagtaacttaagagagtaattcatgctcaatacagaaagtttgggaaacatgggaagtaccnnnnnnnnnnnnnnnnntcacctgtagtctcattatccaaaaataaacactactatattttggagtattcttttttaataaaacgatagcccaatgtacatacttatatgtggctttttttcttcccatttgttaatgtaagtattcttttatggtannnnnnnnnnnnnnnacataactgcacagttagtctagcccttaaagtgccaagggcttatcacattcctagaactcactaacatatgttttcagattttgaccatggcttctacagtacacatttggaacaatgagggaacactaaggggtaagagaccttattccttggattttccatgacccattgtttgagaaacctggctttgtttctacagtgagtatcagtggtcctattagagtgtctaatttcttgcatcaagtacnnnnnnnnnnnncttgacaccaagttttgctcttgttgcccaagccggagtgcaatg

SEQ ID NO: 266531 - DNA, 640 bp, Homo Sapiens
aaaaaatgatgagaaaaacactccaacaattaagagagtgttataaaatctaaggaacaaggaactaacaaagttctaatgatgtggtaaaaataagaaagatagctttaactattagattatccatcaataactttggaaaaacagtttcggtggaatactatgggtagaatacaaatttctgtgggtagtgtagtggatagaattgggagttgaagacatggagatgcagtattgatagttgtgtccctgagagcacgtagcctggacgctggatgtcctggatcctcagcttgccactggccatggcaaatgttgtagtgagatatattaaaaagcagccaaatggttacgcattattattgggctaaaacttttaccccaaactccaatgtattcatctactgaaataaaccaaattgatgatgcaactcctcaaacgcagacctgcctgtaaaaagagttgggtcagtgaattgtggtgagaaagtggttattaacttcaggagttgcacctgtgatgaaagaataagtgtggaaaaaaagtcatatatcaacacattaagtccaagtgtggaataaagttatatatcaacagattaagaccaagcaggtgggctttctttttgtggaaggtggg

SEQ ID NO: 266532 - DNA, 545 bp, Homo Sapiens
ctaggctacgtggaagccgataaggagaatggcgagaatgtgtgggtggcgccctccgctccgggcccaggtcctgcaccctgcacaggtggccccaagccgctgtcacctgcgtctagccaggacaagctgcccccactgcccccactaccgaaccaggaagagaactacgtgacccccattggagatggcccagctgttgactatgagaaccaagatgtggcttcctctagttggccagtcatcctgaagccaaagaagttgccaaagcctcctgccaagcttccaaagccacccgttggacccaagccagagcccaaagtctttaatggtggcttgggcaggaagctgccagtcagttcagcccagcctctcttccccacagccgggctggcagacatgacggcagagctacagaagaagctggagaagaggcgggcactggagcactgattcggacacaccagggaccagcgggctagtcccagggcatggcccagcggccagattctttttcccaggattaaaactctgaccccaggaaa

SEQ ID NO: 266533 - DNA, 543 bp, Homo Sapiens
tcaaacctaaacagcgctcttcatcctggacgtgcgatgggggaggagtcggcctgctcagtccccacgacatagcaggactaggttgacaaacaaccgagatgggacacatcttgagaccctcacagtccttggaggaaggcagacgagaaaaagacaagaaaagtgttgattggctgcccttcttattaaacatcgacgcgttcactgacgaggacgtaaacaccgatctggcgtaccacgagcgtgtgtattttcgtttcacaaatactgcttcattttgagcatcaattctgaggtgggacgttatcaccactttttccactgagaggtgacaggttcagaggttgtttgtccacgtttgcacagcgtgtgaaggggaactgaaattgggatctactttccatacctttattctaagcaattatcaaatgcaaaaaagggaggagaggaggagaaacagaaaaaaatgaagataaacctcatcccctcctcaaggttatatataattctcctttgaagataaaatagcatttgttacag

SEQ ID NO: 266534 - DNA, 769 bp, Homo Sapiens
  misc_feature (435)..(435): n is a, c, g, or t
gcaatagaaaataaaaatagaaaatgccgatgttagaaggttagaaggtaagtactatgaaaaaaacagaagcaaggaagggaggattctggggaaggggcaatattttaaatgagatgattagggtaggcttctttgaaaaaagatgacttttaagcaaagattggacagaagtggaagatctagccatgcaggtatttggtggaaagatctttgcagatagaaactatacacagtgtaagggcctcagggcaagaagatgctttggtgttacagaagcagggagcaggtctgtgtaactggaacaaagtgcttagcagaaatgaggtcagaggggtggaggtgaggtaggacttgggaggccagctagcataggatttttaggttgcagaaaagactcaggctgagaaaattaggaagccattggaagagcgnactacttttggtttccttgtaagtctgtagacaaacttctgaaagataaaggcatattcatgtcatatcacagattggttcaatactcaagtgtcaacacttaatgccttgcttctagaaaagataaaaagatgtagtaaataaaactgaatactcaagccagacaactacattgctgttttaatttactagctggtatcttaaatattaatgaacctccttctctgttttcttatttacaggttggaacactatctttttccaggttccttgttgtctctagtatctcttggtatcctttgatacctcagtccaggtaggatttccatgctca

SEQ ID NO: 266535 - DNA, 957 bp, Homo Sapiens
taagtataagcaccttcccccatcattacctacagcattcacacacagatgtgaaattgtttcatttctgacccagattctggctttgagtattaagtctttccaaactccatatttcttcatatttcactaggaagattataaacttatctgaaatggcagaaattcattttgctttcaatttctcattctgctgtatactgccggaaaggggtacataatgagaagtgagagcagcagcctggcctgctccccagctggaagcaggaagttcacctgataaggacttgatgcttcaaattctaaaaactggaaagggagctagaagtgggggaaggaagatctggaaacatgcccaggggtagtaatgaagaaagtgaattcagcctgagggtgggaccttctgcccagcctctgtcaacttgatgcctcgttatcttctccatcttccctaaccccagggcagtaaattaaggagcaggtggaaaaagcgcctaagaaagcaaggcaagataaaaactcttttgagggtgaagttatgaacaagggcgaggagggagttagaacatttgggtagaccaggttcattggctagaaatgtgggggtttgggtaaacagataatatacctgtaactttacagtaaggaacatacaatcttaatcaatatcagccccaccttcaactgttcctcatcatccacttaatcttgggcaagctttttttctactctcttatcctccctccatgcactctacactctaaccacctggaattatgctctattctccaaacataccacattttctagcctccaagcacctaaacatgctggtcccctacgtggtatgtccttccctgactcctccacacagaaaatccctagtgtttcttcatgactcaggtcaaatgcaaccttccgatatcttctctaatgctccagtcagcatagtcacta

SEQ ID NO: 266536 - DNA, 774 bp, Homo Sapiens
  misc_feature (608)..(608): n is a, c, g, or t
  misc_feature (611)..(659): n is a, c, g, or t
  misc_feature (713)..(713): n is a, c, g, or t
gaatttcacattagcagagtcagaatataaaaatgtaactttacctctctatacatgatcataacttcactctctagccattgtttttcactaaaggcagtgaagagtctttggggatgagggttctggccccgtcactgatgctttcattggccatgaaggctttgctggttgttggtgccatccatttctctgtgttcccttttctctttatgttagtcccactgggccccctccgttctgactgtgagagttctccaggcttgcaggcttgtgctcagctgtttcagtgcctctctggagcatgcaccttgggaagtgctatgtgggtctcagacccaccctcctggtgcaggggcctgcttagggctgagcctctttaggaggactgcactctgggaagaaccaatgatgtgtctgggatttctgttagctagatctctcataaattccaagtcttagtttgggatggaaagaggtagaggatctggacttttcagagacttagtagcatctttaaaagaaaaatacttagttcttccagtggaaagctgtgggttccaagagatatctgctgtgcatttatgggcctattttagagcagaatnccnnnnnnnnnnnnnnnnnnnnnnnnnnnnnnnnnnnnnnnnnnnnnnnnnggtacagcctgccaggagctcagtgtgcaatggtgacatccacctgtgaggccncctggtgcggcttgggaacccgcagaagcctgcactgaagcccagcaaacccctcaaacct

SEQ ID NO: 266537 - DNA, 726 bp, Homo Sapiens
  misc_feature (13)..(13): n is a, c, g, or t
  misc_feature (294)..(294): n is a, c, g, or t
agcctgatcctancctaaaaaacccatggatatgtcttttctaatttcagattcttgggagtagagcttatgttttatgcagttctgtgtactgagcttttagtacagtgcctacaataccagaaacaattaacaggcagtaatggaggagtatactcagagatctgtccctgggtggcccctgaacatcaaaattcttactgtaaatgccccatcacagttacttttccaagtgccaatggaagtccctggtgtaacttgtgaaattccctagtaagctgattttaagtacangaaagttatccctcttgttgcacagaaagttattctaaagcctttattttccagtggtgggtgggctgaaatggggcctctgctatgttaggatgagaaatcattaagatttgattggaatatgaatcctatcagtgtctaaaaaatatgaacttagatcagatcctttattttaaatatctactttaatatacataggtaactagagaatatttatgaatagcttttttagatttaaattgcaattctgacaaatatttaggcagcttttaactagtatagtttattttaactggtgtggttcattacaaagtaaagatttttttaaagcagttttaacctaagcataacttacaagttttaacttatagcaagcataactacacataaaggttattcagattttcttaatgtcactgggaaaaaaagatc

SEQ ID NO: 266538 - DNA, 530 bp, Homo Sapiens
  misc_feature (144)..(175): n is a, c, g, or t
  misc_feature (196)..(454): n is a, c, g, or t
cgtgaattccagaagttcacatttctgagcaccattaatttgagatcacttaacagctccttcacatcatactctcattacacttactatttttaagttggtctttttgtctctccttctagttacaagctagaaatgtattgnnnnnnnnnnnnnnnnnnnnnnnnnnnnnnnngaaatagagccttgctctctnnnnnnnnnnnnnnnnnnnnnnnnnnnnnnnnnnnnnnnnnnnnnnnnnnnnnnnnnnnnnnnnnnnnnnnnnnnnnnnnnnnnnnnnnnnnnnnnnnnnnnnnnnnnnnnnnnnnnnnnnnnnnnnnnnnnnnnnnnnnnnnnnnnnnnnnnnnnnnnnnnnnnnnnnnnnnnnnnnnnnnnnnnnnnnnnnnnnnnnnnnnnnnnnnnnnnnnnnnnnnnnnnnnnnnnnnnnnnnnnnnnnnnnnnnnnnnnnnnnttggccagaaatacattggttttttaaaatggtctattattaaaacaattttttcttgcttaaatttggacttgtt

SEQ ID NO: 266539 - DNA, 1161 bp, Homo Sapiens
cagctgtgatgttccagagttacccgaccctcagtggaatgggctgctgagggtcaggagtgcagggagctggctggggaaaatttggaagaagagcgtaacaaaggtcaaagtcatcagacctagtctagttttctataggattgaaaattaccaattattctcaagtttctgctattagcgaccaatgttttccatctgaaacagacccctccttttttaaaaaaggaaatgcacaaaaaggaagcaaactcttcgaaaattctgattgttttgcatcccagcagcaaataaaaatcatcaatagaactcactcttagccttgagcaatattttctaaaacaaaacacaaagaacctgtgggtatttaactattctgttattgatttactgtggtttccaaggtaatgttgaagaaaattaaatgtacagaagcctgaaatgcgtttttgatggtggtgactggtgtgacctgcattttccaaggtggtgtcactggtcatgggcagaatgaatgactgagggagcacactttggttacaaataagctggccaccttcactgcagagcctcatgaaaccaaagtctatttccactgttaagaaagacaagttattcaggttgcaagctcccttctaatggtagctgtgtctatttttaccaagggtctttaattcaataagattcactatggatgtgtggagcggtttctatgtgcctagatcttaagtctggttttagaacataaggactttccctggcacattcatgactctttggtcctctcagaaaataaaacctcaacagtttgaagtccaccttaattactgattcaagatcaaaataatcatattgcttcaaacttggacatttatatacaacgtgatcaaagagtatattttctatacagtgaaatggccagtttccaaatctaggggcactttacaatctatagaccactatactttgacacccttatctcagactaagaatatggaagttaaactagaacttgaacattttaattttaggtagtgcctcaagcttttccttaagccagctttcttgtattttagacttgattataacaagcttagtatctgatttcccaattaaaagcacaagagaaacagccaaatagaaggagaagacgaaggtgtg

SEQ ID NO: 266540 - DNA, 966 bp, Homo Sapiens
aaatcgatggtctggaggttggcaggccagttcttcctcatgaggtcatctagggcctgaggctctttcatctggtggcttgtggatcttctgaggttgttcctcatctgcatagtggcagatggcctaccacaccacgtctgcatttaagccattaggaaagaggggatgagagggaagggcacatttctttccagttgagggcatgacccaaaaattgcacacatcacttttgctcccaaaagttgcagggttgcacggacatctaactgcaagtgagtctaagaaacgtcgtctgtaagtgccagtatgtctattcttgtggaaaaaggagaaaagagagattgtgggacaaataggcagcctttgccataccttctttcctgtcccaatctttgataaacctacaaataagaaagatccaaaactgcagtagcagaaaagggaaggaaatgaatcatggaaactaggtaattcagaaattgaaggtctcctttctccttaacctcttccagtgcatatgctaaaagaatcaacagttcgtttctgccattaaattgctttaaaataacctataactattaaatcagtattcgttgaataaaatgattgcaatgaattgagaatatttgaacaaagactagatgttaaatcatattaaatgattagaattaattttgttaggtttgacatgtgattaaattacaaagcaaaacctcatctggtagagacatttactaagatatacataagtgaaatgatatgatgtctgaatttgctttaaaatactcaagcaaaagatgggggggtgatgaatagttgaaattaaatcgggaaaaatgttagttgttgaagctggatgatgggttcatgggggtttattatgctattctttctacttttatgtgtatttgaaatattccataataaaaagttaaataaatacttgttccaagaaacaaaaat

SEQ ID NO: 266541 - DNA, 892 bp, Homo Sapiens
tgccaggaatcttggaagcaaatgcagcagatgagggaaaagcctgtagggatcctgccccctgccccctcccccacatagtttagatctgtgtcttctttgcatcctgaacagtggctgtactcttcatctggagcaaaggacctgctgtgaggcagtttcatttcctctgaggtgattggtaggttggtttattgtttggaccatcccttgagacactgaaagatttcttcctcattatgagagacttttaatttaaaaaaaatggatttggttgaggttctctgaagtggacagattaggagattaaaagactccttttatatgatttgactctgatagcttagtttgtgtttgtcaatgaaaactcttctccttaggccactgactgctctcaactgattctcaacacactttctcttattattaaaaatattattaccaagattttttattaaagtggttctcagcatactttctcttattatagctgccagtctccaaaagtacaccgtagtggataaacaaagtatggtatatcccttacaatcagtacattcctgtccctaaaaaggaatgaagtcctgcctgtataccttcagccatagatgaaccctggaaaacttgtccccaagtaaaagaatttagacacaaaagactgcatattatatgattccatttatacagaatttttatagggatctataggtggttgatggtttccaggggctagaggtaggggaagttgggaaaaagaagtgactgcttcatggatatagtttcttttcagtgaattggataagcatgatgttgcacagcattgtgaatatactaaaatccactgaactggtacaccttaaaatgattgagatggtggatttcatgttacata

SEQ ID NO: 266542 - DNA, 796 bp, Homo Sapiens
agaaccccagctatcaaaaggtcaatcttagaaagctctccaagaactcctacaccattcaaacatgcacttgcagctcaagaaattaaatacggtcccctgaagatgctacctcagacaccctctcatctagtagaagatctgcaggatgtgatcaaacaggaatctgatgaatctggaattgttgctgagtttcaagaaaatggaccacccttactgaagaaaatcaaacaagaggtggaatctccaactgataaatcaggaaacttcttctgctcacaccactgggaaggggacagtctgaatacccaactgttcacgcagacctcgcctgtggcagatgcaccgaatattcttacaagctccgttttaatggcaccagcatcagaagatgaagacaatgttctcaaagcatttacagtacctaaaaacaggtccctggcgagccccttgcagccttgtagcagtacctgggaacctgcatcctgtggaaagatggaggagcagatgacatcttccagtcaagctcgtaaatacgtgaatgcattctcagcccggacgctggtcatgtgagacatttccagaaaagcattatggttttcagaacacttcaagttgacttgggatatatcattcctcaacatgaaacttttcatgaatgggagaagaacctatttttgttgtggtacaacagttgagagcagcaccaagtgcatttagttgaatgaagtcttcttggatttcacccaactaaaaggatttttaaaaataaataacagtcttacctaaattatta

SEQ ID NO: 266543 - DNA, 840 bp, Homo Sapiens
  misc_feature (506)..(602): n is a, c, g, or t
  misc_feature (604)..(646): n is a, c, g, or t
aagaagctgtaatgatagtaacaaagaagtccaacctttatattgcacaaatatttactaaccatgtagcatctatgtgcctgaccagccctgacagatgaggattcaggagcaaacaagactcgtccctgtgctttcagagcacacagggtagcaaagccactgacaagtacaggtgggattacagtgaggcataagagatggctcgggggagtacaggggccaggcagagcaccctgggcacagccctgaggctttccaaatgaaatgatcccaaaactcagacctgaagaataaacaggagctaagaagcaaaggagggggagataaacaggtatgaatcagtgggtgctcagggttgagaggcaagagaagacatgaaacagaatatgtgaactattattttttaaaaaactaaagtaacttctatatttgatggtagaatttttggtaaaatttatcttgtataaaatatgatactaggctggggcacagtggctcacacnnnnnnnnnnnnnnnnnnnnnnnnnnnnnnnnnnnnnnnnnnnnnnnnnnnnnnnnnnnnnnnnnnnnnnnnnnnnnnnnnnnnnnnnnnnnnnnnncnnnnnnnnnnnnnnnnnnnnnnnnnnnnnnnnnnnnnnnnnnngagagatactaaatgaaagccaaatactttaccaaccactctggcttctcaaagcttatctgtcctgtggctactacctctctttccttcagcctaacctactatctgaccaaacacgagcagtggcaggaagcaattttaacacgtcacacagatgcacacataactctttatcaggactgaccaatacactt

SEQ ID NO: 266544 - DNA, 755 bp, Homo Sapiens
  misc_feature (12)..(12): n is a, c, g, or t
  misc_feature (164)..(180): n is a, c, g, or t
  misc_feature (200)..(248): n is a, c, g, or t
  misc_feature (363)..(424): n is a, c, g, or t
  misc_feature (643)..(643): n is a, c, g, or t
tcgaggcccagnaattcggcacgagcggcacgagagatctttcataaaaattttttgagtgaattaatgaattcataaactattcattaaatgattactctgtgataactaatgacagtatcagttaacatatattgacattaccacacaccagggattcttcnnnnnnnnnnnnnnnnnggagagtctccctctgtcannnnnnnnnnnnnnnnnnnnnnnnnnnnnnnnnnnnnnnnnnnnnnnnntgctcaagcaatcctcagcctcctgagtggctgggactacaggcacataccaccacacctggctaatttttgtatagatggtgtttcgtcacattgcccaggctggccttgaatnnnnnnnnnnnnnnnnnnnnnnnnnnnnnnnnnnnnnnnnnnnnnnnnnnnnnnnnnnnnnntgggggggttattctaataacttgataggtactattatcattttttctcacaataaccctatgggataacatcctcagaaactgacaaattcagaaatgtgtcagttcctgaaaaaggaaactttgggatggttggctgtacttttaaccactactctgtcttgtctctgcatgtgtgggcatgaactttgttaggttctgaggaggaggatggggggnttgggaaggagctgcatatgttctctgccccagaagaatcatggcccaggggaagaggtagcaaaaggaacaactattccagtatgacttgatcagtttcttgatggacatg

SEQ ID NO: 266545 - DNA, 741 bp, Homo Sapiens
  misc_feature (202)..(218): n is a, c, g, or t
aggcttccatctccaggctacatcttaactgactaagagggcagtttagctgtccaggaagaactcgattgctaactctcactgataattttgcaacagtgacaataaagaatgaattttaaaaagaaaaacttgtctccctgaactattgaactccagaaaaagtagtacttacagtctttgctttaagagaaaccagttnnnnnnnnnnnnnnnnngccgtgcaaataaatgagtagtgtccctttgaatgagaatattttcctacttgcaaaataatataatgaaaatatttttgtttctatgactttgtcttaacactttgtgtagcatcagcttctgagagataatcgagctgaaagaggacacaagaaaaattgttctgtgagaacagccagcaggcaaacaagcatgcatttaggatccttatgcacgggagatatcaaacggagaagaaaagctgcacctttgcctggacctactactgcaggatttgtaggtgaaaatgcccagccaatcctagaaaataatattggaaaccgaatgcttcagaatatgggctggacgcctgggtcaggccttggacgagatggcaaggggatctctgagccaattcaagccatgcagaggccaaagggattaggactttggatttcctctaccaaaaagtacttccgcaactactacccccaatgcaggaaaatccgcctaagaaaagcaaagaagaaatggtttacagac

SEQ ID NO: 266546 - DNA, 784 bp, Homo Sapiens
ccgcttaattaatttagttaaatgatattgggctgtaaaacccggcttaggatcttcctttgactttttgcttcatgttacatttctaaggtctgtgttcctgtacatacctctagttcattgctgcatggtgcgcctccatcacactttatccatttcctcagggatggatatacccaggttgcctccaactctcatgaccataaacaatgccccaaggaactgtttcctttgagaactgctctgggtcacaggctcaggcagactcttctccagggactagcctcacaacggtgcacaagggaggagagccctttccctattcatgaggcatgacttctaatccatcctagggcaggcagctccctctttatggaaaataggggtcgttgggaaaaaagtgaaacccacagggaaggatggagactaaaaccaccccaactcctcctacacatttcctaaaggaagatccagagctccataataaattgaaaggtcttttccaacttgggcattttaggattccagaacattgcaatgcaaatacaagcataattggaaaccacacatggcagggtaaaaagagagcaagagccccagttcctgagggcaacaggagcatcgctgtcacaccagccctagtgacctgtggcttttttgtcagacagaatagcaagcacatggctaagagcagactctgaagccaggctgcagagctcaagtcctggctctgtcattcagtagctatggactttgcacaaaggctttactttctgtgtctcaa

SEQ ID NO: 266547 - DNA, 679 bp, Homo Sapiens
  misc_feature (334)..(334): n is a, c, g, or t
gaacggaaacaaacttataatacgtaatacaacagagtgtaaacaatgttggtaaaaattgaaagctacgagagatatgtgtagcatgcacacaaagaactagcaatgcccactttcactgttggcctcccccctccgtcttccatccgccaaatcaagaaagtgtgttctctttgccgcaagcgcggaataacaccgctgcagccaggcctcactgtgtgtggggtggctggggctgtctcagaaggagtcccattgatttgcatgctgcatgggtcattgctgcagagagtcctcatactggaaagcaagtgctgaagtgtgaagaacttgncctgtttgtgtctcttcgcctcagtccacaggccctgtgtcttctccctggcttggggctagctgttttttagaaggtttaaatctgaccttacactgccatctaatggaaaacatatctgttcagggtggcaggaattgtccgtgactgaaactgtgtgtttcgattcctcgatgaaaacatttcgtgagtttacacagtagggtctctgtcactttcagtcctaactctgtgctagtggatttaaaatgcaggcttggtttgaattactcagagcgtatgttgctttttctgatgtgtctgagccgggacttcacttggaaatgtagaatccgaaatccagtt

SEQ ID NO: 266548 - DNA, 439 bp, Homo Sapiens
tgtataataaataggtttcattgttatattatttaccacatgaatcaccttcctcctaaccattataggagccatgtgttcacatgtcatgtggaccagtatttaactgtggaaaccgcgggtggcatggagaaggaggcagtgtccgtgactgtgctgctctccgcagccccctgcctgctgtcctgtttcctcggctcctcggtgtctggactggcgttctgggtttcccagcagaaaactaaagggccagagaggtgtaaaaacacacaccacttgggcaggtgatttgaagatattaaagctagaaattgggaactaggaaaatcaaaagaattcaaggcatcttaacgtgacagttgaactcatttgattatacttaaaaaagttttcagtgatagtttttttagatgaaaattaacatgataaagaagtgaca

SEQ ID NO: 266549 - DNA, 386 bp, Homo Sapiens
  misc_feature (33)..(33): n is a, c, g, or t
  misc_feature (74)..(74): n is a, c, g, or t
ttaactgtggaaaaccgcgggtggccatggaanaaggaggccagtgtcccgtgacctggtcggctctcccgcancccccctgccctgcctgtccctgtttccctcggcctccctcggtgtcctggacctggccgttcctgggtttccccagcagaaaacctaaagggcccagagaggtgtaaaaacacacacccacttggcaggtgatttgaagatattaaagctagaaattggaactagaaaatcaaaagaattcaaggcatcttaacgtgacagttgaactcatttgattatacttaaaaaagttttcagtgatagtttttttagatgaaaattaacatgataaagaagtgacaggccaggtgtggtggttgacgcttttaaca

SEQ ID NO: 266550 - DNA, 564 bp, Homo Sapiens
  misc_feature (303)..(351): n is a, c, g, or t
tgctcataaattttatttgtaatagctaaaaacaagacacaactcaaatacctattaaatgtttatctaggacacaatccaaatgtaatacagtcatgctctgcacaatcatgggtcccatggaaattataagggaaggaaaaattcctatcacccaagtggcacactgtttataaagtccacagcggtgtacaataacatcctaggccttcacattcactcaccacccactcactgactcacccagagcaacttccagtcctgcaagctccattcatggtaagtgccctgtacaggcgtgcnnnnnnnnnnnnnnnnnnnnnnnnnnnnnnnnnnnnnnnnnnnnnnnnnggtatgtttggatacatgaatatttaccattgtgttacaattgccaacagtattcagtacaataacatgcagcaaacgtttgtagcctaggagcaataggccttacagcctgggtatgcagtaggctgcaaagtgtagaattgtgtaagtacactctatgatgttcacacaacacaaaattacctaatgacgcatttctcagaatgtatcctt

SEQ ID NO: 266551 - DNA, 559 bp, Homo Sapiens
  misc_feature (21)..(21): n is a, c, g, or t
  misc_feature (43)..(43): n is a, c, g, or t
  misc_feature (49)..(49): n is a, c, g, or t
  misc_feature (127)..(127): n is a, c, g, or t
  misc_feature (537)..(537): n is a, c, g, or t
aatctggacccaaaccccaanactacggcctaatccaaggtanttccanagaaggaaaaaggcctgaaaattgaaagcccaaggaagcttgtgattggcctacgggccaactggtttccccccagtnatgcacagctttatgaagatttcctgttccccatcgatatttccttggtcaagagagagcatgattttttggacagagatgccattgaggctctatgcaggcgtctaaatactttaaacaaatgtgcagtgatgaagctagaaattagtcctcatcggaaacgaagtaacgattcagacgaggatgagccttgtgccatcagtggcaaatggactttccaaagggacagcaagaggtggtcccggcttgaagagtttgatgtcttttctccaaaacaagacctgggtccctggggtccccagacgactcccacccgaaggacgggccccagccccggaggcacgcttgatgggaccttcagcgagcgccagggaggtgtttttcccttccgcaggccttcagcagcattnggcagctttccccagccacggg

SEQ ID NO: 266552 - DNA, 774 bp, Homo Sapiens
  misc_feature (28)..(28): n is a, c, g, or t
ggacaccgcagtccccctttccactcancaagggacccagcccactgccactgccatcacagccaggataaggatctcatccaggggcaggctttcagcgcaccttgcgcactgctcccaggccctcgaaatctccaaactggcgttacataatggcattgggttggattaacaggcttttatatccattttatgagaaataattaagtagaaaaaataaagatacagcaactgggtacgccaccaacttcatttccatgtaacaaatgctttccaatcctttaaattaggcagttatttgttaaaaggctaccattacaatggctaatgccctgggtcaaactatcctatgattcagaagccaggaaaaaatggtaccatcttacaaatgaagtgttacaaaactgcaaaaattaagtacacagaaaactacacaataattatcaaactatatatactcctctcttttctggcaaagagtatctactaaatttgctggagagtattaaccctacctaccttaagaatgacataagaactgttcttaataaacaaacttcgttcgaggcagtaatggccacgaaggtaattcacctgcattatttggtctccactgaacctgtgcctccagccgagggaactcgagacctcaaggagagctaacgtggatttctcttttaaagaaggatgcctaagaagccaattacaaaataagtcctaatagaaagctgatgaagtttatgctcttaagtgaaaactttaacagtaggaagg

SEQ ID NO: 266553 - DNA, 509 bp, Homo Sapiens
  misc_feature (29)..(29): n is a, c, g, or t
taccctgtgctcatcctcatcactgcacntgaagttcctggtcaatgtggactgtggtgatgctactgtgtgcctctgacaaaggagaggcaagagccttctggttggggcgggaaataccatccatagttggctatttcttgagaaggaaggaaactgacctaggaccaaggtaaacctgacactgtgtctctctagtgcagattcctaactgctaccccaggctccatctctgttctacttcctgattgggtcaaattttaggagggacaacccactcatgcctcagaaaaatctgtcatatgggaaatgcctttaaaagccaatcccttgatgccttcttttaaaaagtagatttcacacttattcatttatccttacatggtatttgttaaggatccactgagccccaggcattatgctgacgttgaaagagagccatcattatgactagaataataagtggcaaacgatgttgtgagaatggtgaacacgacctctgatgcagc

SEQ ID NO: 266554 - DNA, 520 bp, Homo Sapiens
  misc_feature (48)..(48): n is a, c, g, or t
tgggaaccctaaacaaaatacccatgttaaggaataaaatgaaataantgtgaaaatcctacttttttaaaaagaaggccatccaagggattggccttttaaaaggcaatttccccatatgaacagatttttcctgaggcatgagtgggttgtccctccctaaaatttgacccaatcaggaagtagaacagagatggagccctggggtagcagttaggaatctgcactagagagacacagtgtcaggtttaccttggtcctaggtcagtttccttccttctcaagaaatagccaactatggatggtatttcccgccccaaccagaagctcttgcctctcctttgtcagaggcacacagtagcatcaccacagtccacattgaccaggaacttcacgtgcagtgatgaggatgagcacagggtgttccctacctttgcttcacgtgctaacattatgcaatggagaacagtcatagagacaaatcctggatgaaaaccaccacccctggggattaaagttg

SEQ ID NO: 266555 - DNA, 500 bp, Homo Sapiens
gagagctagcaccattaccctggcttataaattatcttcagaaaatatttgaaagtggtaactattagtacagactgttttgttcatttgtttgtttgtttgcagctgatacattcctcaatggcaaaacctttacctccacctcggtttttattctccctaatgtgttccacttcccaaaggtaactaacaaagacaccctatattccgaaatctccctcctcccccatctgccaactggatgctgagacccagggttgccttgcggctgatgtgttaaggacagcagtgcctctgtcagcctacatccctgaatgactccatggacccaaacacccactcaccactcccactttggccagctaggtacaaatacatggaactttctatgagcaggtaacaaacatcctttatgttaagtcactgagattctgggatgcctctattaaagagctaatgtcaccttaattacaattgtaaattaaattaattaagcggcc

SEQ ID NO: 266556 - DNA, 672 bp, Homo Sapiens
  misc_feature (316)..(344): n is a, c, g, or t
  misc_feature (347)..(481): n is a, c, g, or t
  misc_feature (492)..(521): n is a, c, g, or t
tgttttaaagtaagccctttgtccattgttgactgtgaataattggcagcaggtgctaattcaggcctctctgctttttctctcagggcacaacacaatcactggaaacaatagaaactcattaagtgtttactaaagtgaatgaataaatggccatattgaagtgaaacaggtgcatttcaaaaccactaatgtaggccaggcatggtggtttacacctgttaatcccagcactttggggtctgaggcaggaggattgtttgaggtcaggagtttgaggctggcctgggcaacatagtgagactccatctctacnnnnnnnnnnnnnnnnnnnnnnnnnnnnnttnnnnnnnnnnnnnnnnnnnnnnnnnnnnnnnnnnnnnnnnnnnnnnnnnnnnnnnnnnnnnnnnnnnnnnnnnnnnnnnnnnnnnnnnnnnnnnnnnnnnnnnnnnnnnnnnnnnnnnnnnnnnnnnnnnnnnnncctgtctcttnnnnnnnnnnnnnnnnnnnnnnnnnnnnnncactaatgctatgaattgaattgcgtccctccgaatttatatgttgaagccttaactctcactgtgctggcatttggagttgaggcctttgggagactttgagagataattagggttagataaacgcatgagggaagggtggagccctcac

SEQ ID NO: 266557 - DNA, 787 bp, Homo Sapiens
  misc_feature (450)..(450): n is a, c, g, or t
gaaggacggggaaagagagaacagaagggaggactggtcgaagggccagtggagcaggggtctgggagggacaggccatgaacttgcaagggggctgaggggagccgcagagtcggggagggttgaaaggctggaaatgcatgaggaggaggaacagaacatgtgtgtctggacaggtgcggcagccctggcagagcccactgtccccattcttatggaccgcctcctggctgctgacccagggactgttctcctaggactggagacttggacacttgggtttgggagtgaacgagaaaaaagcttcatggggtgcctctgggtggctgtggagggagagcaggggcagctctgaggccaagggaacatgtgatgggggccgggccttgcgcccacctgcacccttgggagccagggagaggcggtgatggggcatcgaagctggggtcnagggaacccgaaggtggggggctgggttggacgcagctgggccctggcttagcttcccggctctgcctccccatcaggatgtctggctgtgttccccagagacccccactgaggccccgcggtggctgcagctgcctctactttttgtagttgccaaactggatggccaggcggtcagtgacgcagcggaaagtggccggctgcaacccccagtagggcacggggttgttgaagaggctgatgccgttgtagtaggcccgcttcaccccgaagcccatgggacagaagtcgttgacacccactttggtgatgttgttggagtgcagctgtgccgaat

SEQ ID NO: 266558 - DNA, 728 bp, Homo Sapiens
ccgtgttggaaagtggcccaggtagattccttgaaggacaaagcacggaagctgtacaccatcatgaactcgttctgcaggagagatttggtattcctgttggatgactgcaatgccttggaatacccaatcccagtgactacggtcctgccagatcgtcagcgctaagggaactgagaccagagaaagaacccaagagaactaaagttatgtcagctacccagacttaatgggccagagccatgaccctcacaggtcttgtgttagttgtatctgaaactgttatgtatctctctaccttctggaaaacagggctggtattcctacccaggaacctcctttgagcatagagttagcaaccatgcttctcattcccttgactcatgtcttgccaggatggttagatacacagcatgttgatttggtcactaaaaagaagaaaaggactaacaagcttcacttttatgaacaactattttgagaacatgcacaatagtatgtttttattactggtttaatggagtaatggtacttttattctttcttgatagaaacctgcttacatttaaccaagcttctattatgcctttttctaacacagactttcttcactgtctttcatttaaaaagaaattaatgctcttaagatatatattttatgtagtgctgacaggacccactctttcattgaaaggtgatgaaaatcaaataaagaatctcttcacatg

SEQ ID NO: 266559 - DNA, 511 bp, Homo Sapiens
  misc_feature (53)..(151): n is a, c, g, or t
tcaagcgatcctccaacctcagccataggcatgcaccaccatgctaggccttnnnnnnnnnnnnnnnnnnnnnnnnnnnnnnnnnnnnnnnnnnnnnnnnnnnnnnnnnnnnnnnnnnnnnnnnnnnnnnnnnnnnnnnnnnnnnnnnnnnagtgttatccaccatgctggacaggaatatttttaaataatgaaacccaagttcctttcgctttgtaagttaatgcatgtattgatggtgagtagagaacaatgacacaatctctagagagacataggtgttcggcctggctcaatcactagccttatagtctcacaggaaaatatgaacttcatcaaaatagctaattattaccacatcatggatctttatggtcattttcaaatagacaaaattacaaagttcaatatataaatccattggcctaatatcccattttataggattaactatttttcaaggagtcatgaacacaatttcaaattctccattcagattaattaagcggcc

SEQ ID NO: 266560 - DNA, 709 bp, Homo Sapiens
  misc_feature (672)..(672): n is a, c, g, or t
aaactgagatgtaaggaggttaagtgacttgtccaaggtcacacaggaagaggctgagcaagattcaaagtctgacttcacagtactggttctgctctatcatgggaagtgtctcctcactgcacacacttccaggttcagacaaaccggaaaggaaacccaccatgcaggactgtccatgtgatggctcttcccgtggctccatttctaagcgcctccgaggacctcatcgtggcccaggaccgcaagccaaggccaccccagtgtccttaccatcctgggaatgggaggagtcaggcccagccttgtcctgtctgcccccctgggaagccttccctgagcactggcctcttatttacccgtctttgtctctggcttgttggtatctgtcccttgtctgattagggaacgcctgaggtcaggatctttgcctccccaatcagattgtcaggcaggagtgggggtagtgcagatgctgggtcatttctacatgtgagaccaaatagtggtcctgtttaagttgatccccttgaaagaaaattctggaaaagctcctcagatgcacagatacacagaatcagaccttgggcaaagtgtgtagttgtgcttttgaagctgtgcaaccttggacaaactacttgacttctctgtgcctcagtttccttatttgtnaaatgaggggtagtcatgataccttccccatgaggtt

SEQ ID NO: 266561 - DNA, 354 bp, Homo Sapiens
gagttacttctatttttaccggcaaactttatttttgctgttttccagccttctgtttctttggcacattttctttttttgtggcgaccttgattcctttaggatcccagtgctcttggatcactcccttcttgcttctagcaaagcccactctcgggaaggggtcttacgttgtagccgcatcggatttcaagggcagaaccttcaaggtcgttggggccagtgcccgtgtggtatttgtttttgctgagcggctctttgctgtgctgcatctcctcgcctcctttgacggggtacacacgctctacctgctgagacagtctcctccatcttttcattttctccacttttggg

SEQ ID NO: 266562 - DNA, 575 bp, Homo Sapiens
  misc_feature (346)..(346): n is a, c, g, or t
ccctcacatgcgcatttcacaatagggtttgtactcctatgagaatcgaatgctattgttgatctgacaggagccggagctcaggtggtaatgcttgctcaccctcccaacgcctgccgtgcacctggttcctaacaggccatagactgataccagtccgtgtcctgggctttggggactcctgacttaacttgtttctttatctcctctccaatatttcctgtggaatatcaaaggctttatcataattatattgtatcacttcagatggcatgtattgtctagctgtttcactgttagtgactagaaattaaggtaaatccctggattaaggtagtgacatctngattccttcattgtaaagttaatattttatacttgagataggcaagaacttcgtagagagatagtttggtactatgtaactgtccagatactcatcattctttcacttaatgagctcagtgtccattgatgatttcttcctgaatcggttatgtcaccgagagctacaaattggtgattttcctattctgttatttcatctgcatttatttcctggcatcttcttaaag

SEQ ID NO: 266563 - DNA, 857 bp, Homo Sapiens
ccctttctcaaacctgctgtggttcctgccacttcaagataatctcttaacaatctattccttctgcctggaatgctcttcctcccacccaaccccgctctgcccagctaactccattctttggcccctgcatcactttcccaaggaagccatttctggacttccctgacccctgccttccatcttcactggcccagagttccctaccctatggtctcattgctccctcccaggcactgctgcctcccaggactcttccctgtcggtaatatagttctgtttgattgttcagttaattttgcctcccctgaagaccataagccatgttggcaatgatggttttgctcaccattgcacctccagtgtctaaaaaccatgggcaggtcaattcatttttgttgagtaaaggaattgttcaataagtgcacaaataaattcacattaaaacttgtccaaaaacaaaggagtttttcttgtgagaagcagctgctcattctggggcattcaagtgcagtgagatgacaacgatgaccattggagatgctttcaaagtgatgccggcgctagacagatggctggagtgtgtaccctttaaggactcacctatctcagaagtcatgtgtgtttctgtatgtgtaaatgcacaaacagactggaaggatatgtgttcagcgtcttttcagactgtgaaggtccctgcaaccagaaggagagctgtcttcaggaaaggatgaagggaacgagcatctgtctgtgactctggtggttgtgcaggcaggtcacctcaaggtggagtgacactgtggtgggacaggtggagcaccagtgaggaagctctcatgggcctgagccaactg

SEQ ID NO: 266564 - DNA, 569 bp, Homo Sapiens
ccctaacgcaggtttccccgcaaatgactggtcacgcgggactgaacaccgcacaggcaggaggcatggcaaaggtaagtgaactgaagcactttcaatacttcctacctaaccgcgggctttccctccgagtaatgcgtaaaatgggaccacgtggcccactcctgtttttcctcttgggctctccacgtgccactcatgcttggaagagacagatttctttctaggataaagatctctgccccatttctgtcttttaaaatggagaattctttaaagaagtagggacagcttgcaggtcaggcagttggaaagtacagggcctaatgtgtccgtgaacctggtagaggttgctttctgcctgtgtactgcccactgaggaggtgatcactggtctgtatgctcctctgtggccatccagtgaagtatctgttggcacagtatccatttcactgaatgagaaagctgtgttccagggttgtcagctcactccctgctatgttaacaaggaagaggtggcagagccggggagaagcacaggcattcgggtcccagaggaaacaccagtg

SEQ ID NO: 266565 - DNA, 1035 bp, Homo Sapiens
  misc_feature (70)..(160): n is a, c, g, or t
  misc_feature (1013)..(1013): n is a, c, g, or t
aacggagacttgctctgtcacccaggctggagtgcaatgacactactatgtttactatgtctcattgcannnnnnnnnnnnnnnnnnnnnnnnnnnnnnnnnnnnnnnnnnnnnnnnnnnnnnnnnnnnnnnnnnnnnnnnnnnnnnnnnnnnnnnnnnnttttcttttcgacattggcacaagtcagagaagatgtcttgatccttcaccactgcatgtatacccccaatacaaagaacagccacaaagaagtctttgttgaaagtatttaaaactgatttaagacagaagtgtttagcatttcacaggtcagcctgctcttccttacaactgaattaatgtaggaagtccataagatgagctttgactcaattaggggaaggctggaaatcacaaattaagtgcaaaattctgtggaactatgttttctaagcagatgtccagtgcgtgcagcagaatctcaacggaatcaacagcccaaaagagacagactaataaattctgtcttcattatttaatgagacagaccccaaattcaacacctggctaattcttgaaacaaaatgcagaagagatgtagtattcttaattttaaaaagcctaagtcttagaatttatcaaatctcaatgaaatctggtatacagtttaacttccattagacaaatttcttacacagagggaaaagatgagtgaagatgcatctataataggaaaggctacagaaaataaaacctatataagggaaaacatcagaaatgacaagtcttatcacccatttcaaattctcacgaccttgaagaactaagcacccatggatttatgaccctttcatcagtttcctcttgtatatatctcctctttgtattcctcaaagaatgtcaaataatcctgttccagtgtcaagatagtggagcaactaaccacaagactttgtgctacttttaaaggggtgtggctggaatagattagccgctcctacacaaagatactctcatttgagtcagaaatcanaaaacccaatcccatagctata

SEQ ID NO: 266566 - DNA, 780 bp, Homo Sapiens
tgaatcatgaaaattgaaactcctgctccccggaaaccaccccaagcactggcaaagcaggggtccttgtaccatgagatggctattgagccgctggatgacatcgcagcggtgacagacatcctgacccagcggagggcgcaaggctggagacacccccaccctggctggcaatgtttacagaccagcctgccctgcctaacccctgctcgcctgcctcagtggccccagccccagactggacccaccccctgccctgggggagaccccgaaccttttccctggatgctgtccccccagaccacttcccctagggctcgctcggttgcccccctcccacctcagcgatccccacggaccagaggcctctgcagcaaaggccaacctcgcacttggctccagtcaccagtgtgagagagaaaggtgctggcataggatctgccccagaagagaaaatgacccatgcgcagttgggctctggatacggcgctgtctatagcaagttggccagtctggcctcctgttcctctgctggacctggggtaggctgcaggggtgggcagaagcccctcttaaattgtggttgccatggtaccgagggactcattcctggggctcgctgggacctccctaaacccttcctggaagaaaactggaaccaactctgccctacctccctgcactaaccagctttgaggatggcactgaagaacccttggagcaaacatacctcccttgtgactcccacatcaaccattaaagttatttaacagcaaatta

SEQ ID NO: 266567 - DNA, 737 bp, Homo Sapiens
  misc_feature (69)..(332): n is a, c, g, or t
  misc_feature (340)..(372): n is a, c, g, or t
  misc_feature (708)..(708): n is a, c, g, or t
tgattctattagtatcaaagggcaagcttcctgatgtccatgttgtgctttctatatgaaaatgggggnnnnnnnnnnnnnnnnnnnnnnnnnnnnnnnnnnnnnnnnnnnnnnnnnnnnnnnnnnnnnnnnnnnnnnnnnnnnnnnnnnnnnnnnnnnnnnnnnnnnnnnnnnnnnnnnnnnnnnnnnnnnnnnnnnnnnnnnnnnnnnnnnnnnnnnnnnnnnnnnnnnnnnnnnnnnnnnnnnnnnnnnnnnnnnnnnnnnnnnnnnnnnnnnnnnnnnnnnnnnnnnnnnnnnnnnnnnnnnnnnnnnnnnnnnnnnnnnnnnnnnnncctgtctnnnnnnnnnnnnnnnnnnnnnnnnnnnnnnnnntggggctcagggatatagcacaaatatatctccataaatcatcatatcttttctgtggcttacccatagaaacatatatttctcattcctgctctcctattttcattcctaagattctttctgttttctctcatttcctccataatttgtcatgtgtgtctcttacaatcctgtagggctcaacagtctaagcaggtaggaggtcagaaatttgcttacaggatccctgagcaacttaactaccctaaatctgactttcaccattaaacattttttgcaacaaaagaaaattacatttaaaaggaaaagaaaaacattacagaatgcttaggcttnattaaaagtgttctgaatgctgcaataat

SEQ ID NO: 266568 - DNA, 586 bp, Homo Sapiens
  misc_feature (32)..(32): n is a, c, g, or t
cccagtaattcggcacgagtggcttttctgtnaatttctgcagctttttcttattctccaaaaaccagaaagtggtaatatttgttagtgatcaaatcaaagatgatatttaaaaacacatgttgacaggaggacctagaggcattatgagtattagaaagtctgcaaattaggttgtttgctttgtggtgaggtgtgaaacaggatatgcatttttgaaaatgtatctttggatttgctgaactgggctcaaatgtggtcaaattgagagagcttatgatgccagttttactgcattctttttagttgtgttccccaaaatcctgccccatgacctttaccagaacaagtaaacacatcctaaaaacaaagttatgttctagtatggttttaaaagtcttcccttttggttatttggaaaatagtgcaaacgtgcggtctagtggttatggccaaaggcagagcaaagggagtgcggccttagccagccccagccagctgccattgctcccacgctctgtgtggtcttgacccaatgcccagaaaagcaaggttccccactttctacctctttatttttaaaagt

SEQ ID NO: 266569 - DNA, 662 bp, Homo Sapiens
  misc_feature (287)..(287): n is a, c, g, or t
gcccgcttaattaaaaagcaaactttatccgatctcatccatttactcgtgagcagtggatgagtttactttaaataattatgttacagatattttccaaaagttgtttttccttatgtcctatcttttcattctgcacctaaagaatagaggaagaggaggaggaggagagggagcctagagtcctttaaagaaatgaaagagaagcgtgaattgtgtttaatgtttggtaattgtttttaagtatttaagtccccatctcccacaacaagtagcaatacctaaangtgatttataagaaatcctccaaaagagagctctgcaaagggggtcctttcctgaagctctgtgaggactgtgactggaggggctggatgctgccgacaactgggggaaaagaagacagagagagggaaagaaaaaaagatctagaatgacagaacatgaaagcagaaaatgtatgaaagaagaagtggttttggttttgtcatctttaataaatataagggcagtctttgtagaaaatggattgttaagacaaaagtttcagtcatatgtcaagttaaaaggtatgcaatggcatgtgtttttcagaaaacaaactcgtgcttctaagtttcaaaggaataatgtcttttacccaaaaggtcgatataagctga

SEQ ID NO: 266570 - DNA, 976 bp, Homo Sapiens
  misc_feature (739)..(739): n is a, c, g, or t
cagttcttcttaggccacttaaacgccaccgtctccacgaagtcctgtcggatcaccctcataggaagtgacaagaccacgttttgaacccctctccccacccagcaagcccctagcccgcgagcataggatttcctttctagaacacctgttctgtgaagggccagaggcaatatttgaggcctcgtgggccacatgctgtccctgttgcatatccttttttttgtttggtttggaaaactgcttaagctggcagaacaacagaacccgcacattctccacgcagcccagcgcccttggccatgcagggctgtgccttctgccagctctggaggcccaggggctggcatgggcctcccgtcctgagccccccatgtacattgcacccatactgggaacgcccccaggatctgctgcgagacccccaaggaccagcttctgcagtcctggaagggctctcctgacccccaagtccgccatcttctgatggtggcaggtgggcacagtcactggctgagcgaccaagggtcagtgagattactaggccggcgctgcacccaactgaaatgaactcacgtgtcctcacaactcctagcagcagatgctgtcagcctcgcatcctacaggaaaggaaccatcgcccaaaagacgctgaggaacatcccgagggtcacagggacagtgcagagccaggaccagcccggcccatggtcccccagcgtgcaccacctggcccggnactgtgtgctcagccatgaggactgggaagagtcctgcccacagctcaagtgtctacaccgcactgccatccaggctgtgagccgctgctgagcatggggaatgtggctgctgcagagacgttatgaaacacttctaaaagaatgtaaaagatctcattaataattttgagtacctgttaaaatgatagtaattttggatctagtagattaaataaaacatattattaaaattaaaa

SEQ ID NO: 266571 - DNA, 624 bp, Homo Sapiens
atgacccaccacgcccagccagctttcaatttaaaatacatcatatgactgacaacttacatcacaaatctttctattccaagaattccttaccctccaaatctctaattacatatgtaaataaaccagagaaagaattcttacaattttcagaagagagctgcagctttaccttaaatatgatgacaatgggtatatcttctgacaaagtattatgcctcaaataaaatcgtccttgtttcacagccatattggttctgctttttttctcatgggtagagctatgagtaaatacaagttggttaaactgcatccccacttagtttcaagcttagtaacatgcaataatagcaatgatcattaatcaataagggtcaactgatcaacaacaatcacaaggtcctttctaataaggactttaaaaagacaattcctttcctgccctgctgccacttcagtgaacatttaaaaacactataaatttttctttgactttgagattatgatggaagttctgtgtgtgaatgagtgacaattactttctgaccaacttcactttgactctaccttgaattactttgatccagtgtagagcatatatacaaggccaattttataatatgg

SEQ ID NO: 266572 - DNA, 905 bp, Homo Sapiens
  misc_feature (861)..(861): n is a, c, g, or t
  misc_feature (870)..(870): n is a, c, g, or t
tcggcacagcaagtccccaggtgagtctgatgcacaaagaaacgtgagctgctgtattagatggtgttgagttcatgccaccgaatcactgacacacacatctgctcactgcttgctcttcgcacaggcccctggatcctcctggaatccctgatccctgttgctcccttgcggagttttctagtccctcttatttgaagcatgtctttcagagcctcgcaccacccagcttgggtatctggtgaattctgtggtctgcatgtccatgtttttgacattctgggaagggtggcccaggctgtgatttgccatctactgctgcaggctatggatggtattcagaagggaggggagatgctgtgtgcgtgttctgaagggtttcccactaaatggagagactgactctctccataagtatttgatttttactttatctcctcgttgacttcacagtgtaagtgcagtttgtctctactgggtgatgcatgcagataaatgtttatgtgaacataagaagtctgcatgtgtgggtgaactctccacatcatgtcatttattgtccatcattacgtatctgtggtgtctagcacattcctctaccttattttctgtcattgtacctacttctacctgaacacgtattaaatatcttattaaaaatacacaaatattatgtttcctcagtggttttttccccctcacattggggccctcctcttcagtgggactacagtgtgggtacctgcaggtcttcagggccttctggggagggttccagcttttccggggatggctctctctctctgggccagcttcaggctggaaggcagtggggtgttgggtgcccatcccgttggctantagggtgantaaaccggggttgtgtttttgaacccctagttttt

SEQ ID NO: 266573 - DNA, 623 bp, Homo Sapiens
  misc_feature (232)..(290): n is a, c, g, or t
tattcggcacgaaggtctgagcaccccagaagatggagcggtcctgatggaagatgcctcagcacataccttgcttggaaaaaggacccctctggaaagactgcagggtcgtatcagcatttgacagaacctatgtggtcgtctctgcctgccctgcctgccctccctctctatcccgcattctccctgcactgcagccatctggagccacaggcaggctgccccctgcccnnnnnnnnnnnnnnnnnnnnnnnnnnnnnnnnnnnnnnnnnnnnnnnnnnnnnnnnnnngcttcatggtctcagcctttgcatgtgctatttcccctcttgcaacaaccacccttattcatccatttgaggtgtggcttctcatcttcaaaaagtcagctcatactgcatcttgagactttcttagaaacagcccgcccctctgggctcccacagccccctagattaactcctagtgtatccccacccccaccccattacaatggccatggttggtcagtcctcctaacatcagggactgcttcaaagacaagaaccttgtttctatcacctgtatccaaacacacagcctgacagtgggtcagcactcaataaatgcttgtatttttcatg

SEQ ID NO: 266574 - DNA, 370 bp, Homo Sapiens
  misc_feature (20)..(20): n is a, c, g, or t
  misc_feature (167)..(167): n is a, c, g, or t
acataaatacacacacacanacaggcttcaagggtctcaggcctttggcatggggctatttccccctcttggcaaaaaccacccttattcatcccatttgaggtgtggcttctcatcttcaaaaagtcagctcatactgcatcttgagactttcttagaaacagccncgccctctgggctcccacagccccctagattaactcctagtgtatccccacccccaccccattacaatggccatggttggtcagtcctcctaacatcagggactgcttcaaagacaagaaccttgtttctatcacctgtatccaaacacacagcctgacatgtgggtcagcactcaataaatgcttgtatttttccaaccaaa

SEQ ID NO: 266575 - DNA, 597 bp, Homo Sapiens
  misc_feature (282)..(310): n is a, c, g, or t
ggccgcttaattaattaagaagtagattctgctattaagaccaagacccaaagtacctgtgacttcaataaaacaagagtttgtttttcagttatgtgactgcccaagcataagcattacagaactggaataatgggtctgtggtgcgagggactcaggacccttctatattgttactcacctatctctaaggcattgtgctcattggagtggttgagggtcactcattaccacttaccaccaggtatagattgcagctgctaagtaatagggaaggggaannnnnnnnnnnnnnnnnnnnnnnnnnnnnatgtccattcctcatcatggtacattccagaagttacacacatcatttctgcaaatatctcatgggccagaactgtgcttcgcccggttgcaggaaagcctgagaagcatggtgtgtattctgagcaggactccatcactaatattggaagtgcaccggtagcctctgccaaccttttacctgctcagagtttcctgagagaacaacataagtgacttttcttattgcccatcacaggcctacccagtacaggtatccccaggtgaatgttgatttagtttctcggg

SEQ ID NO: 266576 - DNA, 729 bp, Homo Sapiens
gtagagatggggtctcactctgttgcccaggctggtggggatggtttttattattaaattactaggctgataaccaatagtcattatgaaaacataattcctcaaaactcttaggagcagcataattcgttagggtttaccattttgttatgccctaatttgtagagactcttaaacagatatcttatgtctgatccatactggcaaccagccagttgtccctggttttgggtcccccaggaaatgtatccagctgatcctgggaaatactcaaggctcaaatgcacatggtcagttcttaaggcccctggaagtagccagacaaacagtggcctgaccactgcccccagccgtcagtctgtccttttgtgaccccttcttttagggctcctttgatgttcattttaatctgataatacccccagatggaaatgccgggcagggaagtttacattgtgatttacctataacccacaccttttaaggaccccagtccaagcgatgaggcaagaacagagtcatggttaccgcccaagcagctctgcccactgtctggaggagaaagaaaaggtgagaccagagaagactgatacatgcaggtgaggggacggcattaccccagagtggagaaggaaagtagtacctactttaataaaggggcgttgttgcagtaaacatagttattaattgtggtatgtaacaatatatttgcaaacaagattgcccaga

SEQ ID NO: 266577 - DNA, 354 bp, Homo Sapiens
  misc_feature (272)..(272): n is a, c, g, or t
  misc_feature (282)..(282): n is a, c, g, or t
  misc_feature (328)..(328): n is a, c, g, or t
gaatgaggaaggggagaaactaatgtgtattagctattgtgtgctaagcattcaactagattatttacaaaccttgtatcatctcaactctttaaggactgtattgcaatgttttgaatattcagagagaaaaaagtcgttgctaaaacattttccaaggttctgcttattctgatttgttcagtcgtggctgtgatagttcaggaccatctagaccaggtaaataaaatatgctagaggcattcttgagattgtatggaggatggaaaatnaacaaaattnggttggggagtgggccagtctgagttcctttttgtctattatagcntcaggtgtccccatccccgggggcta

SEQ ID NO: 266578 - DNA, 863 bp, Homo Sapiens
  misc_feature (836)..(836): n is a, c, g, or t
agtatgagttcattgtgctgcccaacgcctacatgatccacatgcctcatgcccccagcttcgacattaccaagttccgttccaacaagcaataccgcatctgtctcaaaaccctcaaggaagagtttcagcaggacatgtcccgccgctacggctttgctgccctgaaatatctcacagccgagaacaacagctagcaccaagaagcccaccactagggggagacatgctgtaggggaagtgccactcgctgtttggggcccggccttcaaattcaaaattgagccatgctttttcggtttgtttttatttatctctttggcccagccaagctgccctcactacagagaccttggacaaggatccagccagtccctctctgccccacaaccctgcattcccagaggttagctatgcagcccacctagatgagtctcttcaagaatgggaaatcaaggggtgacagggagtaaaagggttatcatcttactgcaaagccacaagatcagggcagggctttaggatgttctggatgctttttaataattatgcttcccatcataactggggagaaagggaagtcagggttctaggggttattcgtcccaggaaatagaagtgaaattgtctttattaagtgaaaactttcccctttgccctgcaatgtagctgggcattcaaacggagggcaaaccgatgatctaaaccaaccacttggaaaaacccaatggggacattgtaaccagagggtcctggaggtggggttgatgggtttccttatccccaaagtcactcctggtttggtttggttttctttgggggttttggttggttanttttggggctggcaatccaaatagaaa

SEQ ID NO: 266579 - DNA, 823 bp, Homo Sapiens
  misc_feature (188)..(221): n is a, c, g, or t
  misc_feature (237)..(294): n is a, c, g, or t
  misc_feature (345)..(446): n is a, c, g, or t
tccggcacactggacgtcctgtgattttcatcaccccagcttctttcttggagctgctgttgcactaatagacaataggccatgtcttccgcttagcagcctgtcttggtttctagttttccctgggctttagtggtatcttcctaacaataagcatagatagacaggggccaatgagtcctgaagtnnnnnnnnnnnnnnnnnnnnnnnnnnnnnnnnnngacagggtctcactcnnnnnnnnnnnnnnnnnnnnnnnnnnnnnnnnnnnnnnnnnnnnnnnnnnnnnnnnnngaggctcaggtgatcttcctgcaggctcacgccatcacacccagttaattnnnnnnnnnnnnnnnnnnnnnnnnnnnnnnnnnnnnnnnnnnnnnnnnnnnnnnnnnnnnnnnnnnnnnnnnnnnnnnnnnnnnnnnnnnnnnnnnnnnnnnatgagccactgcgcctggctctagtcattttaatagcaagtatcctggtataatcatgtcccagcggccttttctcactggccttcaggtttcaggttccccatctgttaaataagggagctttgccctagttatctgtaagggacacttcatcttgaaaatgcaaatgcccttggcctatttttgtaggcctgggagctaaggatgttttttacatttttaaagcattgtttggaggggaaaaagagaacatgtgacagagacctcatctagctgactcctgtgttagaccttaagaacagcctgaaatggggtggaggaggtttctcagtggatatatttagtttgcagagtccttccttcccctgagggctacc

SEQ ID NO: 266580 - DNA, 714 bp, Homo Sapiens
  misc_feature (348)..(348): n is a, c, g, or t
  misc_feature (492)..(635): n is a, c, g, or t
gaaaacaaacacactctgctgagaaaataacattttaagaaatcaacacttcaccatgttgtttcccgggctgttccatcaaattgggaggaaatgatctcaattgaaacaaaatgaaaaatgttactaaagtgaaatttgtcagattatataatcattttgatgaataattattaaatctacagtcgatccctgtctccttcttcctatccccttggaatgggtagtacacaatgtggtaagaggaagggcataaataagatcggtggatttcatccctgtgttccctggtactttctaaatacttctattattataacgctgattttattatctaatacataatgnccatgtgttgttgtatctctttccatgatcactttctggtgaagctatgaaatggagaactgaaatatcccaaaaatggcaaaaataagcataactattcttgcacactgagctcttcctttacagtgtgtggccaaaattatnnnnnnnnnnnnnnnnnnnnnnnnnnnnnnnnnnnnnnnnnnnnnnnnnnnnnnnnnnnnnnnnnnnnnnnnnnnnnnnnnnnnnnnnnnnnnnnnnnnnnnnnnnnnnnnnnnnnnnnnnnnnnnnnnnnnnnnnnnnnnnnncatgtttatctgccacactcttattaaacattaaactatcctgccaatcccaaacctatgtgacagaaactgaaagtaa

SEQ ID NO: 266581 - DNA, 915 bp, Homo Sapiens
  misc_feature (423)..(423): n is a, c, g, or t
  misc_feature (693)..(693): n is a, c, g, or t
  misc_feature (713)..(713): n is a, c, g, or t
  misc_feature (835)..(835): n is a, c, g, or t
  misc_feature (870)..(870): n is a, c, g, or t
  misc_feature (877)..(877): n is a, c, g, or t
ctttttttcccccaacctgatgttagtcaaccaacagggattctgtacttacacctgatttgcaaagtggaactggtagctgcctgtgatgatcttctaacaatctatcatgctgacttaacagccttacctatcattcaatgcatcaagtcaatagatgactagtaccatactgatctttcagtattgataaatatcatcttgtatatgttgcagatgcctcagtcaagcatttgtcacagtctttattctgtaaaacactctccatatgctcttcataatccttaaacgattattgcagttcagccacttctgtaagtgtttattagcattggcatgttggtagtagtcctgttcttcagaccatagctttgaaccagaatagtgctcttcatctccagagacaaacttccatgcactaancccagcagtaaaggatttggcccctacatgggaaaacagcagtgttggagatattgttgtagagattaaaggagagagttgtgctacaaatacaccaaaggaattagaaaattctgtttaaaattccatttaaaaagcttttataagaataaagatagaaaaatagatatgattatcttgatcattgacatttggaaaacacacaaattcattgctgaggtaaacaatctattatgggacagaatatacattcaataggtggtaaactgngtatttctcattctaggggngatttaaaattacctgaggctatgcaacgtttctgtcataattcttcctcatatttacaaagaagaaagagattaaatgttgaaagggctgcgtaagttaagtaaagaaagtaatttggaangaagaaaatgtggttaccaactcctttaagaatanggagatnagagaaagattttcccgaaatatttccataaaccccct

SEQ ID NO: 266582 - DNA, 1344 bp, Homo Sapiens
  misc_feature (369)..(389): n is a, c, g, or t
taagtgaagcacacagcgaacttgcaaagttgttaacggaaaaagaactccgagatgctctgctcctgatttttgctaacaaacaggatgttgctggagcactgtcagtagaagaaatcactgaactactcagtctccataaattatgctgtggccgtagctggtatattcagggctgtgatgctcgaagtggtatgggactgtatgaagggttggactggctctcacggcaacttgtagctgctggagtattggatgttgcttgattttaaaggcagcagttgtttgaagttttgtggttaaaagtaactttgcacatagtatgttttaagaaattatacatctcaaaagatggtaatttaggatgcnnnnnnnnnnnnnnnnnnnnnaaggaatcttggattgggaattcagtactttgctttaaaaaaattttgtggcagaattaaatttctaatggagcagattagattgaattaaatagaaacttattgaatatacattctttaaaaaagtaaatttgttatttaagtttttcagataataatgtgaccaattatactgggaaagagggtagtcacagagaaagggtaagtgaaggtttattctttcagtgaaaaaagaatagccaattgagtgcctaatgagacctctgtgtgaagcaagtgaagtatagctgcttctttaaacctgccttttcactgaatgttggcagcatttagtagtagaaatgacagttgcttaatgaaatagaatccaaactacatatttggataataggattactttatgtttatgttcagagttaacagaacacctttaatgctaagaactataaggtacagaaaattaatactttatatagtgttttattaactttctcctacagcattttgtataaaacacaatgagggagtgaaatgttacccaattaggcttgtcaggttagtaataaactgaacagtaataaaactgtggaagtaattggatctgaatttatgaaagacccatttccaggactgaacctaggtcagagctctaaattggtccttctatttttcaacaaatttaaagtaatatttctttctaatataatattgcatcctttgtgggaatgactataggtaaaatgtagtaagtaacgcagaaccagggttggctttatttaaaagctagtgacctaaatagaaagcgaacttcaagagaagttgtaagtacagtggcaaatgcttattacttacttcaaactgtttcccaaaataagtgcatttattttgacaataaaacttaaggctgttcatgagaaggccttgaaaagttactctagaggaaaaatgtctaaag

SEQ ID NO: 266583 - DNA, 840 bp, Homo Sapiens
  misc_feature (717)..(725): n is a, c, g, or t
  misc_feature (772)..(772): n is a, c, g, or t
  misc_feature (798)..(798): n is a, c, g, or t
  misc_feature (808)..(808): n is a, c, g, or t
ccggtaccccggctggagggcgtttctcgggagcagttcatgcagcacctctacccacagagaaaacctcttgtgttggaagggattgatttggggccatgtacaagcaaatggacagtggattacctaagccaagttggagggaagaaagaagtaaagattcatgttgctgcagttgcacagatggacttcattaaactttaccttttgaccagttggtccagagggcagctgaagagaaacataaagaattctttgtttcagaggatgagaaatactacttacggtcacttggagaagaccctagaaaggatgttgcagatatcagaaagcagtttcctttgttgaaaggagatattaagtttccagaattcttcaaagaggaacagttcttttccagtgtttttcgaattagttcaccaggattacaactatggactcattatgatgtatgctacataaatgagaaatttaaagctacaatagatctttagcattatagatttaacagtcacagtttcaacttcctataggttaccctaaacatctgtgtaatttgctgaaacatgacttttgaaaataggtgctgtgcatagcagtgatacaggaatgaattattttgctaatggcaaagctagttggttcctcacatttgtatttccctgtggtcctattcttgattcatcatcatatatataccaagttttgtgaagtgannnnnnnnnccatgtgaaaaatggccaccagataatgggggataattgtattgganaaagtgataagcctttagtataaggnggtatcaaangatacacatgactctggctacccagaggatcc

SEQ ID NO: 266584 - DNA, 462 bp, Homo Sapiens
  misc_feature (21)..(21): n is a, c, g, or t
  misc_feature (47)..(47): n is a, c, g, or t
  misc_feature (64)..(64): n is a, c, g, or t
caaggtggtaaaccccccggntgaaactaaatcggaaaaaaaacacngggaaaaagaaactgtnccctctttggaaaagaaatctgggaaaaacttaaatatctccctttccaaaacaaaagggaaaatgctttcctggataatcctgcaaaacaccctttccaagggtccttcctcccaagtgaccgtaaagtagtatttcctcaccctctgaaaacaaagaattctttatgtttctcttcagctgccctctggaccaactggtcaaaaggtaaagtttaatgaagtcccatctgtgcaactgcagcaacatgaatctttacttctttcttccctccaacttggcttaggtaatccactgtccatttgcttgtacatggccccaaatcaatcccttccaacacaagaggttttctctgtgggtagaggtgctgcatgaactgctcccgagaaacgcccttc

SEQ ID NO: 266585 - DNA, 357 bp, Homo Sapiens
gtggctcatctgtaagacctctgagccaccagtatccacggggcttgtcctataacagctcctgtgcaatccagtaaccttgaacactggaagccactgagcccttctgtgagtagatgcacacctctgaggctaagattactggtgtactcattgggaccagtttggtctcagtgactgaaaactcaacccaaacttgttcatttgggaaagggaaaagtcaaccaggcacagtgggcttcatgcctgtagttccaggcactttggggaggcttgagggtgggacagatcgctttgagcccagggggtttcagggacccaacctgggggcaacatggggccaaaacccctggcctt

SEQ ID NO: 266586 - DNA, 832 bp, Homo Sapiens
  misc_feature (730)..(730): n is a, c, g, or t
  misc_feature (778)..(778): n is a, c, g, or t
ggtaatttaaacagagaaataaatcttcttccaagcacagagagcttcatgtttaaaattttagatgattgtaataatcccagtaacagaatataatgaagtgtttcccagcacactttagagaagacatactgagtattatggttctgttcagattttattttctgggactctattttaaagtgctccatctgtatttaagaaaacacatgcatgcacatacatcctgtggcactctcttctagggcaggtgttggtgggtaggtccctgtgcatttgtttgtgggacacgttttgacccagtgggtgtaatagtttgttacaagaggattctctggaggaaggctgctgctgcagaggaggaagtcacatttgtcttctcccaaaacatcaactcattgtcttcctagcttgcaaaaatgaatatttctccccagttgatttgttaatttcttgcatcattcaaatgccagatgattggactctacacaattgaccgaaggaacagaatttccaagagtgtcagttgcctttctgagtaaaataatcagacacttcactcacattctatgaataaataacacctccagtgtaaaatggattatgagatgttttatcttaattttctatatttcttgaatttgcactgaaaaaaatcttgtgaacaatctttaatataacacagaataatgattttaaacagcctctcccctgctatgactagtaaagntgtggactaaaaatattcaaacatatttttctcattaatgatgagttncatattattttatgaatttctgaaagataaattttaagaaatataaaacactcc

SEQ ID NO: 266587 - DNA, 550 bp, Homo Sapiens
  misc_feature (162)..(162): n is a, c, g, or t
aaaaatgatagatacctacagtttttcatcctttggatagctgagaaatttgttatgagaccacctgtcagcatgaatacctaaaaggtccaattttctttccattgattctgggataggagccactaaaaagcaacatttgtgaaagaaagctcccttttncactggaattacaggtcccactttccccacaggtcttttgttttcatacagagaacacagacttatggacctgacactctcaggaggttatagccatatgtgaatatgtagttagcatctgggtaactcagttggcttacaagggtccacaaacaggagccaagtaattttttaaaaagtgactaaaaatacagattctgaacaaacaccaacagaagcaccatcagctttaagctgaaccttaatttggtaaatcctgaactgcactccaatgtttttaagatttttcaagcaaagggaaccattttgaactaagactctgcattcttttaaaactgctgggttgaacaaaagtggaacaaacaagttgcctaatcaaacttggctg

SEQ ID NO: 266588 - DNA, 513 bp, Homo Sapiens
caaggtggctggccggcaggccaatggcggccaacgccacttccggccgccctccgagcatcgctcttcggcaacccgaagccacaggatggaggagggggatcccagcaaagatcccagtttctgacctgcagcatagtccctctctctgaagaacttcctgtaatattttttgctaggaagagtttgaagtttgaaatcccagaatgaggaaattcatccagcttggagacttccaatcccttcattgtgcagaaggttgctaatgctctcaggagaagcccttcaccaagagaatacttccacatagagtcctctccattgagactaaggaaacatgctatgtcatgtaggccacagcagcctttgcagctgttgaaggcagcaagacttgcatggcaatcagaagacacagaaccaagactcatatccagttataagatggcagatgggacacacactcatcaggcttagtgagcagccaatccagagggaaccatactcagccctagg

SEQ ID NO: 266589 - DNA, 771 bp, Homo Sapiens
  misc_feature (315)..(315): n is a, c, g, or t
agcagacaggttgaggggaaatatttgaagtcaggaaatgtttcttaaatatgggctttgttagccctggatgcagagtttcagaagcttaaaagatccaaaatgttttaacacttggaatatttctacttcaatacaaacatctatactaccataaagaactgtaaaaactaaaaagtgaaatctgcccctccaccacccctacccccaacaacaaattcccgcttcccataggtaaccatggttaaaagtttagtgtgactcctttcagacttttttacagtgtgtaatgtatttttccatgttatttattantacagcttatatgatttttacttttcagtgatcatgttagctgataaaatctttaggttgaaggttttttcttgatactcgactaatttttgcattctttgttttctaaagacttcacatgtatcattctccgagcctgatattccgtcctcaaaaagtactgagttacctgtggactggagtattaaaacgcgactccttttcacctcttctcaaccctttacctgggcagatcatttgaaagcacaggaagaagctcaaggtcttgtccagcattgtagggcaacagaagttactttgcctaaaagtatacaggtaactctgaaataaaatagttatgtgttaaagtaacaaattaagtgtgaaatgctctcctttgcaaaatagcagatgctgccttccattaagtttttctttggaaatttaaagatacaaagacaggaaggttttgtcttt

SEQ ID NO: 266590 - DNA, 650 bp, Homo Sapiens
  misc_feature (26)..(26): n is a, c, g, or t
aatgctcgtaagtgccgacagggtgntgtttcagtgaatgtttgcagtgtgcaccggtctggctgaaggcctcttcccttccccaacaccctcccatcgtgcaaaattaccctgcccagcagagagtgacttgtgtgtctcagaagattttgttgctgtgctctgagttctcactcctcatctcctttgaccagtttcttctaatactccccttgttcacaacacagaacatgagtgctctttcctattcattttgacacttaataaacgggacagtgattctcagtgtggaaatgagaatgaagttttttttaaagacaggctacaataattcccatgcagagaaccacatgcgatgacactggattccagacagcaagaacgtatggtgaagatgaggccaacagtgagctgagagaggccagccagggtgtgtttcagtgaagatgagaaacaatcagataacacctgtttcctccaggaaagaaaatgtggccagggaaaagagatgggaggaaggccggtcattgcctattccactgtgcacagtttgaatttggagccatgaaaagtattgcttggttaaattaaaatcattcaaaagataaaacataaatatttaacaccagcacaatatgctgggaaacaaa

SEQ ID NO: 266591 - DNA, 780 bp, Homo Sapiens
caactctttgtcctttttttaccaaatatttagacagatgtggggaaccaccctaccatcatcttgttcctttacataatcttgatgcaaaagtcctgtaaccaaatcacagataatttaatttactattatagtaacaagacttactgacaccctgatgtcccaccaaatgaaaatgatgacattattgccatgggacaacacaaggaataaaataacaacaaaagtggccttattgctccaccgtgagccagcaatcttgctgggaggctcattaaacttgtctttcaaagaagccagaaatgtccagaaaacttttctgtccaaatgttctgttctccattaagcccaacagactatctcttgctcatctgattgttttgttaacttgattccctaactcaggcagatccactaggatttacactcttcatccatctgccgacacaggattaccccctgagccccaagacacttggatgtacaaataggaatagctactacttgtaggaattcttaaagtaataaataaaatagcttcaatatttataaaccactccctgccagtactcatgccctcatggaggttgtcaggttataaccctgcaacatagcaaaacacactcctcagcctcccacagcaggtctttgataacttgccgtgggcacattccttaacatgacaggtatatgttttatgacggcttaaaatacatatgctagaaactctggcttggtaaaatatattaacatttctaaatcactttatgttggcagagt

SEQ ID NO: 266592 - DNA, 832 bp, Homo Sapiens
  misc_feature (13)..(13): n is a, c, g, or t
  misc_feature (278)..(278): n is a, c, g, or t
  misc_feature (655)..(655): n is a, c, g, or t
ctcaaccacaagnaacaaagctgtgcagaagcctgaacctggagcttctgcaagatgaggtggggaatgagctaacccagctggaaagcagcctgctgatccctgggagagacggcgcttgggccaacccaccctccccaaggtggtcccctgcctcagctccacccgcttccccagatgaacttctttctctccctccagcgcttcagaggatgcacagctgtgtgtacttgaccctgagcctgggctagtgctggggacatagccagtctggctgnatacccatatcagtacagaaagctgtcctcacccacttcatgcactagttgcattggtatgaagcattagctttataactatcccatttactgcaggcataaacctatatcaattggtggggatggaggttaaatgagagaagacatcaaagatgcatagaactattgggcccctttcaattaataaataaaatttgtaggaggccattagtttgtactgtgctcctgtaatggacccaacagaccaaacaaatatggagtcactcatgcccaaatgcaattaacttgggagtatactcccaagttgcaaaaagtggtaacaaatagctgagttttggggcagttacagcagctgagcatctgtcaatgtaggtggncccaggtgattcaattaaggatgctgtaacccaattaagctgtatctacacctcacttctgttttctatctacaaatactgcgtgatcatgttgctggttggagttctttgaataagctgtggttcggagggatgcccaattctagaatcatgaataaaagcctattaagattttta

SEQ ID NO: 266593 - DNA, 616 bp, Homo Sapiens
  misc_feature (60)..(93): n is a, c, g, or t
  misc_feature (479)..(487): n is a, c, g, or t
aagggttggacaagctagccttaggtcatgtccagaatgcaatttaacaggaatttcaannnnnnnnnnnnnnnnnnnnnnnnnnnnnnnnnntatcatttggtaaatgcactgtctcacacactttactactaagtcccattcaaaccatgacgaccctttacataaaattagggcattctcaccaagtgtctaaagatgatttctaaacattaccaaggtctaagtgctaattccccacaaaccatttcttatcttgtttaaatgagactggctttagatatcatgactcatatttatgtgtttaaggaattaaacgtgaaggagatgtataaggcaaccacaaatgtagaaaacaaatgtatgtattagtaatattctcccatgtattaactagaacaagaatgtgagatttttacatttcttctagtgtgccttagcaaatctgctggaaagagtctagttgttttgagaattgnnnnnnnnntgtgtctctcaatttgtcaattctaagcctgtaaaggcagaaactatccacagtaatgagtttggtagtgcctggagagaggcaaatgatcattggatgtaacaaaagctacaagagaatagactaaaa

SEQ ID NO: 266594 - DNA, 193 bp, Homo Sapiens
  misc_feature (113)..(113): n is a, c, g, or t
  misc_feature (134)..(134): n is a, c, g, or t
  misc_feature (148)..(148): n is a, c, g, or t
  misc_feature (162)..(162): n is a, c, g, or t
aagggttggacaagctagccttaggtcatgtccagaatgcaatttaacaggaatttcaagcaaaactaaccaaaaattaaatccacaaaaaaatatcctttgggtaaatgcantgttttcacacattttattantaagtccctttcanacctgacgaccttntacttaaattggggcttttcaccaggttttt

SEQ ID NO: 266595 - DNA, 1398 bp, Homo Sapiens
  misc_feature (807)..(877): n is a, c, g, or t
  misc_feature (1099)..(1099): n is a, c, g, or t
  misc_feature (1202)..(1202): n is a, c, g, or t
  misc_feature (1328)..(1328): n is a, c, g, or t
tgaactttttggctctcatattcttagaaaattataggttgaaacagtcactgaattgccaagagacggatttgcttgtctgtctggtgcccagctccaactgggcttacatggctagggaaaagaagggaaatttcacgtagtctaggattttattttagtcagataaatactggatggagtatttagtcagataaatacagtggatggagatacattggaccaccccaccaaatctccgttttaagtgtaagttttctaagttttgtacatttgtcattccagagggtccagatatttcatacgatgaagcccagggtgggctttgctttgcactgaaactagcaagaaaggacacaaaagactgcagagaatgttgggggcagatttgctggctgcgtatgccaaggtcccttgaggagcaagaacatccagtgccaaataggacactagtttggtctttctccaaaccataaactcttggaaccaagagctggtctttggtgtgttgcaggagagtcctcatcccagcgtagacatcccagctggagctcccagtcagagcctaggctgggccagtagaccatgctgtggcctttcttgcttgccccaagctctgcaaagcatcaggcagggccaggcctgcaccatgaccgccaggtgcttccatcctggtggccgacccctgatagcatgcagaacagaatgagagcggcttgcttaagggccagagtcttacttgttccctggagtgagtagaaaagtaggaaatctcgtcagaacatgagacctttttgcgttcttccnnnnnnnnnnnnnnnnnnnnnnnnnnnnnnnnnnnnnnnnnnnnnnnnnnnnnnnnnnnnnnnnnnnnnnngttcacaaaccacacttggagagcaagggtagaggagcagaacagtttgttctctattgcttctagaagttcagaaagcagtagttgcagatgagccagaactcaggcagagaagggttctgtctcttcatactcagtctcctgggcccgtggaaatggtgtgtttcagacctggtctgtggtacgctggagtttttccatgggacttttcacatcagtaantacagactgtcacatgttttcctgtgctgatgttttcataagtccctctaatcagtcctctgaagggataaagacaaaaagtttattagccgagtttcccttngagggaattactgatgcgtgttaaacggtcggaaccggtccaataccttgtggccctctcccctgggttaagggcgcgccccattcgggaggggccccctgaaagggtgtgagctatctccgggtnctttttgggcgcaaacggggtttccccaagggtgccgtttggttagtacattatgggataactcctccgc

SEQ ID NO: 266596 - DNA, 650 bp, Homo Sapiens
aactattgccatggaatttgtaagcagttatcctaatccatctggactctgaaaatgcatcctttatgagagggagtgaatgcaaagataagggtggggaaacactaatcatgaaaagaatgaaaatcagtgttcagttttaagagcaggttgtattgaaggaagggattaaaggaattatccagatttgaggtggcacatcttccaccactccctgcaccatcagcatgcacggagcgcataaaacaagccctgctcctaatggcagtgaaacctcggatggcctccatcaggtcaatacaactgaattgctgggctgacttaagattgaaggactccattttagtaagtagagaagtgtgacctttctcaacccaggttgtgaatgtggattcacacttatctcaaaaaggcacctggagttttaactttatgtcatgtctcagtactggttgcaaggtatgaccaaaagtgttccttgaatggcacctttttgaatattaatttagaagaaaacatgccagactgacatacttaccccctccgcactgttactacttccttaccagccctatgtactgcatcaatgtctacaagaaagcactcttcattaaaatgaaatatatatattcaaatatgatagtccaaaa

SEQ ID NO: 266597 - DNA, 604 bp, Homo Sapiens
ttcctgttaatgtgttacaggggtctgttccaactaagagcttaggagagttggaagaaaaactgtttttcttcctctacactggcattaggcccaaacaatggtagcgttcctgccatggcccagctaacctgctgacgtcctgacagctccctggatgccccagtcccccaaaattcagtgagctgagccagcaggaaggtggactccagggagaccgcagcaacatggcaccccagctcagagtggggctgcagaagactgttttccttcagtgtcattgaaactctggcccattccagctcctgggaggaatgagtgaggaagggagggaggaaggagaagaaccagcaggcagcaggctggggccagcaccctccgatctgtggtggctgtggttaagctggtgtctccagaaaaacatgagcagggtggtgaaaactgccagctggccctggctcttgctgtggtagagaggcccaggaaggggcaggaacctcactggaggacgctcctttctttgaagctcaactactacaactccattaaagtgagaagagggggcatcaggttcccaatttgagtaatccatttctgcctcttg

SEQ ID NO: 266598 - DNA, 306 bp, Homo Sapiens
ctatgcaaggtcttcaataaaagtgtatcctcagcatagcaaattcctttaaaattacagctgggtttttacctactagcaagggaaggtgctagcccccagcacagtaccctggccccatgaaagcattcaataaatactaataataccttcttctatgccccctttctggaagttccccttctaggacacagaggtgctgatcagcttttccctgtcagcatcaagagaccctcctttcagacacagtcagtctccagcagctacaacgggaaaggccaattgagggcatttctaacaaagttc

SEQ ID NO: 266599 - DNA, 755 bp, Homo Sapiens
gcctcctcagcttgcgctttcccccacctcagcttgcgattcaatggccgcctaggagtcctgctgtagtccattctccacacaaatcccgctcagtaaagctgtattgtggaagaattggttcaaagctcttacacaggctgcattctgagtgtttgccattactgaccttgttctgccactgaatattctgatgggctcctaaatagtctgagtgaaactgctcaagaagccagacgtgtcgtttgtggcaaggcccctgtctcataggaagtgtgcctctgctttgtaagtcttcagttccatctcactgcaattggatattacatttgtaacagactctgtggacttcccaaaggacatccttgattctgttctgtacttctttgtccactagcacatcactgcacaatgtcatgcttcaatttaaggactcagtgacagcttccaggctgtgtaaacaataaaggtcctcaaggcttccttttaactagtctctctgtaaaaatagactttaagtaggattacatagcatccttgacctctgctctaatggtcaaacagactgacacagtactagcttacggcacttcaaatttagagaataactggttagatctgcaggtgaaagacaaaaatatctgtgctgtgttcaattctcctatttgagatttccctataggaataagaaatatgccttattctatcacatgcaaataagcctcatctccttcgaaatccaatacttcctcttt

SEQ ID NO: 266600 - DNA, 409 bp, Homo Sapiens
  misc_feature (28)..(28): n is a, c, g, or t
  misc_feature (87)..(87): n is a, c, g, or t
  misc_feature (117)..(117): n is a, c, g, or t
  misc_feature (168)..(168): n is a, c, g, or t
  misc_feature (223)..(223): n is a, c, g, or t
  misc_feature (226)..(308): n is a, c, g, or t
accatcctaagggtgtggttaacaaatnaatgcccctttaaccagttgccttttcctggaaggccctaattcccactcaatgggaanaatccagggtgaacagccctttttaaaatnctgcctcctccttggtaatcccgtcctttgtcctggccatcctaaggaaanaatccaggtccacatcaaacctgaaaggaatagtgaaaggtggggattttactgnagnnnnnnnnnnnnnnnnnnnnnnnnnnnnnnnnnnnnnnnnnnnnnnnnnnnnnnnnnnnnnnnnnnnnnnnnnnnnnnnnnnncatccccggcttatctgctttccaaccgtcctcagccgaactcctcctgacattcagatgctccttctcttctctcctctgccatgccattttgctactct

SEQ ID NO: 266601 - DNA, 489 bp, Homo Sapiens
  misc_feature (326)..(347): n is a, c, g, or t
tcatgtattgatttgattttcttatcttaaaatgtaggcaataaaacctctcttctagctttccaggtttccaaatgctttaaggtcagttaaaatttaatagtcataattggcttttgtggaaaacttcatgacctcagacttttattgtttaccttttaatgtgtttcatatgatacaggtttccttatgaatattcaaaaagatatccaaagttggcagttccagtgattttaagagtggatatagtatataaaaatggattgagaaagtgctacaaattagaaaaccctttggaatgctatagctgtgggacaattttcttnnnnnnnnnnnnnnnnnnnnnnccccctttctcacaaatgattataaaaataggcaatattctagtgctattagtagttccatgctttcgtaaatgattgtgcatgtttttgctaactgcaaacactagacaagaaataaaatttccgtctaaaccacaggcca

SEQ ID NO: 266602 - DNA, 775 bp, Homo Sapiens
tgtgtccattgtggaaattaccaactgataatttccatttgtcactttcatttattgattttatttccactctgcaacccacaccaagttcatgaaagctccacgtgagcagggtccttgtctgtgtagttcaccgccataccttctgcttctttaagtttccagtgcatagtcaggcaaatatttgactgaacttctgatggattgcacatacaagcatttgttttttgaatgctattttgccaacaaaactggaataaatgcatcttgcactcagcatctctgaagcaccaaagcctaacatttcactctgctatttgcgggttggattgacggcttgggttacaccctcccacctaatccgcaggaaaccaagttgctctccagagtgcccacgattcccatggtccagaaaaggccctgctaaagaccatatacagcagataaacaaaaataaatgaaactttacaaccataaactgtaagagtgaagtcacccagagtttggagacagagtgggacagaagtgattttggtaactgtttttatcactgaaagatgtggttttacccttttaaagttttttgtgctgacttaatgtaattccccagaaatggccaagtctcaaatttcacaattgtcataaaatattagaaccaaaaaaaaccttagtgatcactcacttcagattactccatttatcatctggcttaattttaattggaaacctcttagggtctcaccgatgtctggtgtgggcttagaatttagaagtt

SEQ ID NO: 266603 - DNA, 463 bp, Homo Sapiens
  misc_feature (12)..(12): n is a, c, g, or t
  misc_feature (26)..(26): n is a, c, g, or t
  misc_feature (44)..(44): n is a, c, g, or t
  misc_feature (191)..(248): n is a, c, g, or t
acccaccccgcnaaatgccagagtgnaaatgttggcctttggtncctccagagatgcctgaagtgccaagatgcattttatcccagttttgttggcaaaatagcattcaaaaaacaaatgcttgtatgtgcaatcccatcagaagttcagtcaaatatttgcctgacctatgcactggaaacttaaagaannnnnnnnnnnnnnnnnnnnnnnnnnnnnnnnnnnnnnnnnnnnnnnnnnnnnnnnnngaacttggtgtgggttgcagagtggaaataaaatcaataaatgaaagtgacaaatggaaattatcagttggtaatttccacaatggacacaatacaatataagctaacgtgttgggactgaagggctgtaacagtccagagaggctaggtatgctatggtaacaatctgaaagtctcagcaaattaaaacagcaaagatttctttcttgctcaat

SEQ ID NO: 266604 - DNA, 883 bp, Homo Sapiens
  misc_feature (369)..(369): n is a, c, g, or t
catttctcaagaacataatttacaaagtctgctaacaaaacctatattgacaattaaactttgcctctctcctcttcaactttccaagcaattgtctacgtagtttacattctttttctctctgtaccacctttagtggctattccactttagacaaattctgccaggtacggttggtggcaggggtgcctgatccctctgaagttgaaagcagatcagcagcagcctggctattggtggagctgccagtgaaaagcacccagacgacctacctgatggacccatcatcaggctcaaacagcaccaccagaaaaacacaagaaacctcttacctaaaacattaaccaacagtaaaagtaggaacttatnaaaaagaagtctctaaaattccacagggggaaaaaacaaagagattaagtaaaatccttactgatacattaggaaataacttgctagtagcctttggatttctgacttgtaaaacctcagaattggagattcaatagcctttgtttttatagaggactgtattggaataagttagattattggaaaactttgcatccccaaaatcattgttataagactatagcacttacatctcttcaggagttctaaaaattaagctgaatttcccataagattctcttattaatcacccacaaaagagaaagacagaaaaacccactaaaaatgatgtgcatttgatccagtaaaatgttttaaaaaccataatacagaccacccttgttaatacattttgccccattcctcagttgaactcaggggaaagttcaagatttttaggtcctacctgtaaaaataaaaaatttttctaattaccaaatataaatttcactgtaggatatataggaaaacagaa

SEQ ID NO: 266605 - DNA, 730 bp, Homo Sapiens
  misc_feature (450)..(574): n is a, c, g, or t
gcagtttcagaattcttagattaagtcaagtcccataacatcatacatgtcaatatggtaagggagggttttcatttcatttggggaacttgacaggcttggaaatattagtactttaggggaagataaaatgccaagcagattttccacatattttcagattggcataattttcctgttcataagcattggtttgatacttacctgactcttgaaataacatggctgtggttttgttgttttttcattgagatgagggtctcgcagtggcatgatcatggctcactgtagccttgaactcctggggcccaagtggtcctcctgcctcaacctctgcattagctgggaactagaggcagcttgaggtgttgcaccaccgcgcccggccccatatgacgtttattaagattctcaaaatgttaacattttaccacatttgctttatcattnnnnnnnnnnnnnnnnnnnnnnnnnnnnnnnnnnnnnnnnnnnnnnnnnnnnnnnnnnnnnnnnnnnnnnnnnnnnnnnnnnnnnnnnnnnnnnnnnnnnnnnnnnnnnnnnnnnnnnnnnnnnngaaattatttttccagaaccattggagaataaattgcaaacaggatgaaattgtatctctaaatacttaagtatgtgtttcctaaaacaagaatattgtattctcttgtataacagtagcacaattataaaataaaaataataacattgatataat

SEQ ID NO: 266606 - DNA, 355 bp, Homo Sapiens
  misc_feature (316)..(316): n is a, c, g, or t
  misc_feature (322)..(322): n is a, c, g, or t
agctataacatggcagcctcgcatcccttcctgcttaccaccttactagatattaaggcttacttagttcttactgaattaaatggagagtgacttgacaactcttggccagccattcttaatgatatttgtgttcctaagatatagcagtatctgcaaatcctaaatctgtctcatgaagattttatgatcttttagatcagtgattaatgggaaggacaatgtcctttatttttttaaataaaaaataatgacctggaactttctctgtaggccaataaagggtgagtgtggatggggctatcacccttgggtngtgttngggagtttaacatttctctaggtttaaaaccat

SEQ ID NO: 266607 - DNA, 787 bp, Homo Sapiens
  misc_feature (27)..(27): n is a, c, g, or t
  misc_feature (460)..(468): n is a, c, g, or t
  misc_feature (767)..(767): n is a, c, g, or t
  misc_feature (770)..(770): n is a, c, g, or t
ctggaagttgtgttgtggccccctagnatacccctgtagacagtttctctcgcagagggatggtgatgagggaagaataaatcatggaagcgggggaagaatgcagaatttgaagtaatctgcgaaagggagatttaggagaaattggcctgagttggtctccttcctttctctttcctgctccgttgtagttttcatcattctctgctctgggtaacttgcagtgcagaggaaggattgcctctcactcttagctgaattagcccttggacatcattttccagtctgtcttggttcttaacaagcgctgccattttgtactctgtggtgtcagctgccctaagggctctacaagataaagggtcttcacaagggagctcagagtggcttattactccacgtattttcttttctttccagttggatagaggttccttgaagctgaaattaattgtttagnnnnnnnnnccccttccaaatcagtcttccatgtgagtaataagatttaaaggaagcattctttctttcctcctctcttctgtgtagtatccctagcccctgactttccattaattatacacacatttggattagaaagcagttggctttttgaggagttaacaggaagagacagttaattatttacatattagtgtggcttgattacctcagttttctttctttacacttggctgatcctccctaaaaataatgaaattagaggagggatatggcatgtgttagcttttgagcatgggaccttttgntgnatttgggatttttgaat

SEQ ID NO: 266608 - DNA, 607 bp, Homo Sapiens
tcgtctgatattagggaagattgaattgcgttaatctcttagccatgtgtggggaggccagatggacctgctactttgtagccacagccacacttgacctctttgaggttccttttctccaccagcctggctgcagcgtggtgaggaaaagcatgtggtttgaagttgcagccctgagttcaagtcctagtttcttcccttacaatgtaaccctggccctgctccccttactgcagattctgccaagagccttaccctctctaagcttcattcagtcctgtatcgtgggcatggtaatagtactgaatgcagagttgctgaggattaaatgcacgttaagtacatagtacagttccccagcacacagtgatcatatatgtgatagccctttttgcagttatttttatcaaatggcaatcagagaagccttcccaggacaactttatctaaaatagcactccctcctctgctttatttttatacaaaattttatatagcattcccttagtctgctttatccttcctcatagtatttatcaccagctgacatatatattcctgtcagccccactaaaatgtcagttcagtggccgggtgtggtagctca

SEQ ID NO: 266609 - DNA, 756 bp, Homo Sapiens
ccagaacttccccttctcccctgttccttaaaacaaagtctgagcggaaaaaacaaacttttttcctctgctctcacaccacaataaagacagaaaacttctctgaccaaatgtgtggagttttttccccaccaccaagcaagcaatcaattttgcagcagataccagctaggtgtcctccagtttcccatgctatcccctagagatggcatttgatcccacagattgagggcccagtcccacaagactgctgcccacttccagtgccaagttcaaaccccaggtggttttacctgtgcttctgaccaaacctataaatcagggttccccatgacccctccttgagtttaatttgctagtaaagctccacagaactccagggaaacacttaggttcactggtttattataaaggacagtacaaaggatagagatgaagaaatggatagagcaaggcatgtgggaagggacagggagctcctataccctctaccctcttcaggtacagcaccctctagggacctccatatgttcagttacctggaaatgctccaaaatctgttcttctggagttttatggaggcttcattatgaaggtatgattaccactggtcactggtgatcaacttaaccttcagcccttctcccaagagtttgggggaggactgaaagtcccaactctaatcatgcatttgtctttccagtgaccagcccctaggggctgccagccagcagtcaactcattagatacaaaaag

SEQ ID NO: 266610 - DNA, 304 bp, Homo Sapiens
  misc_feature (148)..(181): n is a, c, g, or t
ggccgcttaattaaaaatcttaatggaggaggaaaaatgaggcttttattctcagattctttaaaataaaattcatctcccttcctttcatacacaaggaaactacaggatgatgttaaatgtacctaccactcatccatctttcctnnnnnnnnnnnnnnnnnnnnnnnnnnnnnnnnnnaaaacaaataatgaaagtcacctacactgcccctagaagtattcataatcctaatatgggcagaaaaaactataacaaataactaaaatgtgtcataagaggtacaaaggaattatggtaatg

SEQ ID NO: 266611 - DNA, 675 bp, Homo Sapiens
  misc_feature (591)..(591): n is a, c, g, or t
cttactagaacttgaataatgcacctttggaatagggcttttgtcatttctcttccagaaggagagtcatgctatgtggtgccaagaggaaatttgatggctcagctcactaataaatcttgtggacaaacttaatttcttcattccatagataaagaactgtgaatcctattgaagggtctttttatgttctttctggcttcccaagtcagtaaggtacctcaaaccagggagataaaagtgcctgctttgagcattgctacccaggtgctgaaggtgaacatgggtgggaatctagggattttgggaagcagacaatgggcttttagcttaagcgcattcttcaagcttcagtggacatctaggtctcagatagacttgagcccttgtcatgagactggtctggtttatggcatggtctgtgagcctacttttttgcttctttgagtccaggcccagtatctttgtgctgtcctttgcaatgctgagatgtggcattcccaaactttcttatagaagtttataaaaatagctagaaataaatatattgccttctatttccaaatattagacagataatccttgaaaagntgtaaatttgaattacattggcttagtttccccttttctgcctttcttgtcccctctaaaagcttaatgtgataaactgcagta

SEQ ID NO: 266612 - DNA, 510 bp, Homo Sapiens
aagtaccacaaagcaaactaaggtcaaattttaatttaaaaaacctaattgtattttttggggtagttgaagttacagttaagtaaaccgtattattcctgtgtgatatagatgttaaatatccaggggcagtggctttgttttggcattttagctaagggtgaagttttgggacaactcagccataggtgttgctcattgactgttatttatttatttttttctccctctctgttttttaaagttaatgaaattatattaaatgtttcattttggaaacccaatggaaatttaaatgaattgttatttagataataagtaaaaatgaatattagattatttagataacaagtaaaagtgaatattaaatagaggaagaaagactagaatgattcatttactattagaaaaaaatgaagttttataattcacactgaaaacttgttctgagtaacaaccttagaagtaaagctgtcttctaaggaaacgtagttatttcaattttgtgta

SEQ ID NO: 266613 - DNA, 771 bp, Homo Sapiens
  misc_feature (216)..(216): n is a, c, g, or t
  misc_feature (219)..(219): n is a, c, g, or t
ctatagctgacccttgagaaattagcaatttaaggtggggacagacacatagatggctaattgtaattcagtatggtgagtactcttaacagagaattgttttttaaaatcctactggctcaaaaatcagaaaaatatcatttctgcccaaagagatgtcagggaagaatatggagaggaggaagacctggaaggctgagttaggaaggaaagaantanttataactagatttgaatgtggtcaaaaataggacgtttatttccaggccccttatgtgaggtgtggtttgagcaggagcttgagattccagtggcagggtcccctcaggctattgggaacatttatttttccttgaaacatgaagcctcctaggaggcctgcgtgtgctgtttggtggatacgtgaccatggagcttgggaggccgcaggtttttctgcacccagcctcactggagctgttttctctgtctgtttccccagctcggagtccagtgttttcccacttgtcatcttctctccaggggctctggaccatccgggcatacaaagcagaagagaggtgtcaggaactgtttgatgcacaccaggatttacattcaggtctgtctatttctggaaatggtttcaaaggacaggatctgctgctttttctggcttaacctccctggtcagatgagcttgttggcaggcacctcagggcccagccccacatcctgctttttttgcgcatcttcgtctcctttcccatccccttcttctgggcttggact

SEQ ID NO: 266614 - DNA, 512 bp, Homo Sapiens
  misc_feature (125)..(283): n is a, c, g, or t
accaggcatgagccactgcgcccagccttgccataagtctttctaccatctttcccagggaaagtatctccttcttcccagagtgcatatgcaaagaaaggtggaaactctgaaaaaaggctaannnnnnnnnnnnnnnnnnnnnnnnnnnnnnnnnnnnnnnnnnnnnnnnnnnnnnnnnnnnnnnnnnnnnnnnnnnnnnnnnnnnnnnnnnnnnnnnnnnnnnnnnnnnnnnnnnnnnnnnnnnnnnnnnnnnnnnnnnnnnnnnnnnnnnnnnnnnnnnaggcaaactcttccaccaagctaacattcctgagcttttggcgccaaaagaacttcttttttagtgaggtattttttcacgtttgtactctagatttagatcagagattggattttaaaatgaaataacaaaatatacagcaataactgacagaaaaatattttgcgaagaaaaagatgaggaggaaaagcctctcgtttgggaaaacctatgaagtgttatggggtgg

SEQ ID NO: 266615 - DNA, 463 bp, Homo Sapiens
  misc_feature (31)..(31): n is a, c, g, or t
cggatgtgttcaaaacagtccccagaatttnatgtcggcctccaaatacacaccccctaatgaaacccccaatactttgttctacccaggtccctgtgggttaatacttcaaaaaaacagagggtaaatggacatgtgtagtttaatgtatattagtatccctggagaaataaactcttctgtaaaagtctaaaaatgtaaaaggtagtgctgaggtcaggacagttatgttttattgtgacatttatctcaaaatgtattctgagagagatcagaagtaacaaacttcaatttcttgacctgtatcaaagaggaagtcagtctcagattcattgtacagcacttccattctatagattcctaggcataacaccagcttcatccggtgaggcctttagaaaaaaccttccagccactcagttgaattatctattacatttaatgaggaatcttctgtgccgaa

SEQ ID NO: 266616 - DNA, 834 bp, Homo Sapiens
  misc_feature (477)..(492): n is a, c, g, or t
  misc_feature (520)..(563): n is a, c, g, or t
  misc_feature (584)..(785): n is a, c, g, or t
attttaaatattactactcaccctacagatatctgcctaagaatcatttccatctgcaagtctcctctggcccttctaatagtatgcttacatcctaaatgtgcaacatctatgtgccctgacatatttcatgttgtgttacaattgtgggtttacttatctgtatactcccttcactcgtctgtaacatcactgagaaatggttctctttttatctcatataataactatcaaaaagagaaaaataaagatgatatgcaaaaaacaacatgcattgtggcatgccagaagatgatacgggctatagactaatccctatctaaattgtttgagggccgccaatttagtttttgaaagatgaagtgaaaaacatttatggtgattaaaaagaaaggccaaaatgctatcaaaaaaactgggtgaaaagcacccgaaattataaagattgagtatacatatatatacatttggagaagnnnnnnnnnnnnnnnnttcagttacagtggcatattcacaaacnnnnnnnnnnnnnnnnnnnnnnnnnnnnnnnnnnnnnnnnnnnntaggtatggattagatagaannnnnnnnnnnnnnnnnnnnnnnnnnnnnnnnnnnnnnnnnnnnnnnnnnnnnnnnnnnnnnnnnnnnnnnnnnnnnnnnnnnnnnnnnnnnnnnnnnnnnnnnnnnnnnnnnnnnnnnnnnnnnnnnnnnnnnnnnnnnnnnnnnnnnnnnnnnnnnnnnnnnnnnnnnnnnnnnnnnnnnnnnnnnnnnnnnnnnnnnnntaatctgctggcccaataccttgtccttcagaagacatctgtctttttt

SEQ ID NO: 266617 - DNA, 918 bp, Homo Sapiens
tgggaaagggggatccccaaggtctgaggtggactaggaaggctttctgaagaacctgggtctgttagggcatcagccaatcaaggtacaagtaaatagaggcaaaatgagggtttgaactgtgagcagttggtcctggaaaagaaagaaaccaagagattatggggactcaatgggcttcttaagagagaataagttgaaatcaatgaccagaagaccctgatggaagtggaggagaatcatctcaggcaaactttttgtgtgccagtaacagaaaccctctttgtgtgatcacatgcaaagtataggatatttgcaatatagccatggggaggagtgcagggcccaagggtagattttagccaggcctcccaggaacagaactcggatccgaaaagcccagagaagctagagctgcccctccaacactctcggatccacatggtctgtgttctctagacccccctgcatgttagcggtgttctctctctgtggactgactgtccttctcagtgaacatgtccacccgacagctcctgagtttatatcatctcaaccctcacaaccccacagaggctgtgtctcctagtcacagctttaaattactggaaaaataaatgactggccaaacttggagcaggtgtccatcccagccctgtgtagttagagcaggaatcaagatctcaacacaaatgtggctgccaagcactcagccccggggcgaggggtcaagttcttctcagagaaagaggaataagttggttctcagaagacatcacaagatacgtgtgtacccaacaatctctgatctctgctgatcttttgcttagacgttaacttgatgcatcattggaaaggtgtttctctcatctctgtcctaaggcttgataaagtcattaaaattgtgttcttttgact

SEQ ID NO: 266618 - DNA, 583 bp, Homo Sapiens
  misc_feature (421)..(522): n is a, c, g, or t
caacaacaacaacaaaaaggtgtgttaatgagggaaggagagtggggaggaataatgtaagccacaaagaggagagagataaaagagagtggattcacccactctgaaaagtgtcccagcctgtgggaggaagggatgtccacaggcttccctggtcctctccttttccccggggaggcacaggctagagcaggcatgtgaggaagatgtcctcaggaggccaaggccctttctgagcattccaacagcaatgggcaggaacattccaatcaaaaagcaagaactaactggagaactggactctcagttagcatgcctgcccatatcaaaatgctaaaatgttttcggccagtcacaggcaggcaccttggtgcttctgcaagcctcaagaaaggtgtcaggttgggcgagggggctcaannnnnnnnnnnnnnnnnnnnnnnnnnnnnnnnnnnnnnnnnnnnnnnnnnnnnnnnnnnnnnnnnnnnnnnnnnnnnnnnnnnnnnnnnnnnnnnnnnnnnnaattttttaaaattaggtgggcatggtagcaggcacctgtaattccatctactctggaggc

SEQ ID NO: 266619 - DNA, 394 bp, Homo Sapiens
  misc_feature (341)..(341): n is a, c, g, or t
  misc_feature (355)..(355): n is a, c, g, or t
  misc_feature (363)..(363): n is a, c, g, or t
tgctgattagaggtgatgctgtagaggtaaacagaggcaacccggtcaagacatctgggcttcctgaaaacagcaaggaaccactgaaggatcttaagcaggatttgtcatgtatctttttcaccaaactgcaaattccaggagcccagtagcagtgtctcttttttcttcttcacattatttatccagggcctaacccagtgcatgatacatagaaaatgctcggtaaacatctgaagaataaatgggatgatcagatatgcagaaacatcacttgtcaataatgtgaaaaacgtgtgaggaaataaatgctggaaaaaattaaaacagtaggccacggnggaaagggcacagntttaaagngggttctgtttttaaggggtggtggcctttg

SEQ ID NO: 266620 - DNA, 965 bp, Homo Sapiens
  misc_feature (456)..(456): n is a, c, g, or t
  misc_feature (469)..(469): n is a, c, g, or t
  misc_feature (561)..(561): n is a, c, g, or t
aatgactctcacaacttttctcataatgtttaaatttgagcataatgcctttattctgggtgcaagcagagctcctgaccacttggtgcctggttaacacttgtacacaaactcttgttttcttggtcttaccgtttggacctctgaatcatttccttcttgctgataggcttgttcttctggacagccaggaagactaaggaagagaagaaagggttttcagtggacagtgacttaacccagaggtgtggggtgcaagagctgggagagggagctgctaggacttgggtgcccctaccctgagctggcaagactgagtgggggagcaatgaccaaggcaagccaggggttagactaggggtaacaggacagcagcctaaggcccctaagggaccctaacacttctgtaggcaaagactagggcttttgaatttaaaaaacttggccagtttccangggtaaggcttgnatgaaagaattaggatagtactttgtagtttttcacagctttcattattttatcaagatcctgcttaccataattgttaagaatgcagactnccagagcagcacacctgagtatgtcaccttgggagaggtagttaatctccctttgattcagttttctcactataaagtagatatattaatagtacctactgagagtgctgtaagcgcctaatgtgaacagtgccctgggcaagatgtaaggactatgtgtttattattatcattattaccatcctaagaggtaagcaagccctggaatcagccccatcttttcaggaaaaatcaatatacttttggaactaacttgctcacagacagagctggtttaagatgcagtgacagggctagagtaactgggcttacttggatcatgaatgtgctgacggctaaggtggggaggttctgttagctaagaaggtttgagtcttggcaagcaaaaggttgctgtctgccca

SEQ ID NO: 266621 - DNA, 456 bp, Homo Sapiens
gagtgagaaatgactctcacaactttctcataatgtttaaatttgagcataatgcctttattctgggtgcaagccagagctcctgaccacttggtggcctggttaacacttgtacacaaactcttgttttcttggtcttaccgtttggacctctgaatcatttccttcttgctgataggcttgttcttctggacagccagggaagactaaggaagagaaggaaagggttttcagtgggacagtgactttaacccagagggtgttgggtgcaagagctggggagaggggagctgctagggcttgggtgcccctacccctgagctgggcaagacttgagtggggggagcaatggacccaaggcaagccagggggttagacttagggggtaaccagggacagcagccctaaggccccttaaggacccttaacacttcttttaggcaaagacttagggct

SEQ ID NO: 266622 - DNA, 444 bp, Homo Sapiens
ggttgaaccaataaccaagaccagaccctggagggagccactgcgggagcagaactgtcaggggcagcacctggacggtcggggctacctggcaggacccaggcagagaggctggcagagacctactgaggccatttgtgagagcaacccttcaggaatcgcttcaatttcacagacctgacttcatctcccgctctggggagcggataaagcgcttgaagttaatagtccaggagaggaagctgcagagcatgttacagaccgagcgggatgcactattcaacattgacagggaacggcagggccaccagaatcgcatgtgcccgctgcccaagagagtcttcctggctatccagaagaacaagcctatcagcaagaaggaaatgattcagaggtccaaacggatttatgagcagcttccagaagtacagaaaaagagaaaag

SEQ ID NO: 266623 - DNA, 686 bp, Homo Sapiens
tgaaaaagtcatggatcttctagaacttcttattctagcttttcatctcccacagccagcctacgtgtatgaatgtgagagtcaaatgtgtagcttttaaccatctctgtgtcagagaatcagcttcgaaaacttaatgggctacgtgatcttgggcaagacacttcacaagtcagtaaatcaaagcatccagaaggtagaacaaaaagagacatttaaatcacctagtccaaaagcagctcagatacctctcgtatgctttcactctccactcccatggcgatattcctaagtgatcattagctgagtcaggatgcagcctcagagtccttctcagcacagcacctcaaggaaccactaccaacacatcatttggccatgtgaaataaaatccaaaccactcattcctcagctgagaaaaactgaaccacaaagatgagccatgactgactgcccgggtctcactattaggagcagaccgggaactatcaaaaccccttaccccgattcctctaagtcatttctcctccctaactctgacagtctgtgaatagcccttggagcaggggtgggggtttgctattacactaagttccataagagtacagataacgggtttctaacaaggggaaggagcaacacaggaggcttaaaggaagatgtgcatttgagcaggctacagaagg

SEQ ID NO: 266624 - DNA, 982 bp, Homo Sapiens
ggtatccttgatctttaggagatggtttcacatttatttgttcattagcgtgtccattagagaattcctagcctataaatatctcatcttccttttaaatcctgagttggtctgggggtaaatatgtcatagcatgccccatgaggaacctgatattggcatgaatataatgagtggcaggtagttttgctataaaggaagccaatttaggcttatctagctgaaatgtttcaaacaccacaaaaatgccacgttcttgtgggtgacttgactgtgtcacactgcctcatctgttccgcacagcctgccaagtgtaaccatgtagtcttcctggatggggttgctgctgttcacaactggctttgaagaatagtttttcagttacattttccaggtcctcctagcctggggctgtttttctgcccctgtgtatgcccagcctttttctgcatcatctcctgctagcactgaccttggcttgggatcagaaatgtcgtcatcttgctgtaaagaagaaagatcttgcctgagatgtcaaggttgccttctgagtcaattctcaagagttgccaaacaagtgctatatttcttttctgcaaagtattccttttggaaatgcatgcagtataaaatatcaggtaaggggaaagcttcatgaaaacagagtgacttgagaatccatctgtttacttcccttattcaagaaatgatattatttaagaaaaaaattttgtggttatataaataagtgtaataaaggtgtgaatattaagtaattacttaccttatgctattgcccattatttgctcttgtggcttataggtgagagtataaagttacatgaaatacaaagaaaaagccctctggcattcaggctttagattttatgttttcaattaatttctttaggttttaaggagcacctacgtaattgtgtatgtttgatatagtatttttccaggtcccccaccatggctccag

SEQ ID NO: 266625 - DNA, 1059 bp, Homo Sapiens
  misc_feature (681)..(681): n is a, c, g, or t
gcaaatatagacatcatatgtagtttgtacatgtttcagaaacttgttttttctttgctctgtgtaacctatttcctattgctagttcagttggctttcttattcacttctgtgaccctgaaccagttctcagaccctagagtgtaagagcattgattttctacgctgtgtaatctagctcaatccctctgtcccctccgcctcaccgtcccccagccaccacattgtatagcaaaagcattacattcaatcctagaacaaaggtaaatacaacaaatcatctttgcagctggacaactaataatactttgcagcattaagagatcttctgtgttaccagtcactctgttgaaatgaactttccgaatctctttattcaggaaaacatggggttttgaaattcttgggccaagagacataactgaggggttcgcagagctaggcaagggtgcactaggaaagggccacattggtgggtggggggtaacagagaacagatggtgtcaggaagtttctctggagtaaataatgtggatattcttggtttccctctcctccgccagctgaagctgtgttagtgctgttgacactaatataaaatgtttggtccatttgaaatccttgtcattgccttatatgggggaaactcaatcccccagcctgtgttggaaatatcaccanactgaatgtaaatgtgcggctgtacagacattttagtgtggtggtgtgcaccatttggccctacacctgcagcctggctactacagttgttggtccgattttcgccatcttggtggctacttgtgcatttcacatgcacagagtgcgtcgagaagatcgtcttacttgaccttcaggagtgtgcaatccgcatgctgctactgatcaaaattggaaggagtcatttaatgcggggaatgctcctaccgaccctgaaagggcgggatcactcatatgggggagaaacctggcgctttataccgcctgcagccggggcagcatcttccgctttaaacaattataagagctttcgataactgtggcccgtcgccggaacgg

SEQ ID NO: 266626 - DNA, 459 bp, Homo Sapiens
  misc_feature (277)..(328): n is a, c, g, or t
  misc_feature (384)..(384): n is a, c, g, or t
  misc_feature (409)..(409): n is a, c, g, or t
  misc_feature (423)..(423): n is a, c, g, or t
  misc_feature (433)..(433): n is a, c, g, or t
cagccatatggtatctgtttagaactggaagtgcagaatctgttttcaaaaatagacctacaaaaagactgaacacaaaccaaaaacccttccaccttaataaaaataattcatggttaatttttttaaagatgtatgaatttaaaacttttacagctagtacattaaatttggcaagtagaaattctgaggaagaatgaatttgattccgtcaggtgggttctcaaagattcttttattgtgaactttctaagtagaagaaagaattgtaaggccnnnnnnnnnnnnnnnnnnnnnnnnnnnnnnnnnnnnnnnnnnnnnnnnnnnngaagatcactggaaggtctggggttttccctcccaaatatccccacttccaggganctgccagggagtttttgagacccgncccggggccaaccntggttgggancccctgttcttcttaccaaaaaattt

SEQ ID NO: 266627 - DNA, 974 bp, Homo Sapiens
  misc_feature (716)..(724): n is a, c, g, or t
  misc_feature (752)..(797): n is a, c, g, or t
aatggtactgacctcaaaacaaatggtaaattttcattaaatcaagtgagatgcaattaacatatctgacctgactgtgtacctatttatactaggcactttttacctgaacaattttccggcaatactaaattacaagtaaactcttggttaaaacaaacaaacaaaggcattaagttgagtgaggcgttttctcccactctctcacctcacaggactcacataaaccaggactcgacccacctcccgtgactgcgtgccgggcactgccggccactcctgccgccaccgtgcgttctagtgaggcacattcgctttctgacgtgctcacaagtccgccggcggaagctacggttccgttctcaccttaactgcatatatacctctttcctcactctgaatgctgaactgaaaagggcattttcaggttaactcattttactgttagttttcctcaatgacaaaaaaaattaagcaaatactgaggattttataccataaaactacagtaagaaatgggggcaaaggacaccacacaaacatcactcacagtctacttttggaaggaaaaaggtaacatatttcattttcggatttaaaaatgttttctttatactacagggtggaagaatatacgtgcgtgtgcgtgcgtctgtgtgtttgtttgtttgtttttctaacaattcaaaagaaaatttcctgaagctggtgaggcnnnnnnnnngtttctaactagtaagttttaaatcatnnnnnnnnnnnnnnnnnnnnnnnnnnnnnnnnnnnnnnnnnnnnnnttaaccactacctcagaacaatagttttaaaatggtttaattgtaaaaacttggtggcagctcagaatttgaatttcgagttcttctgtaaagtcctgcatgaactggcaaggtaaacgtcacaattttgaaaatagtgaagtaagggaaataaggaagtctgaacgttaaacaatc

SEQ ID NO: 266628 - DNA, 659 bp, Homo Sapiens
ttttgagacgaattatgtttctgtcacccaggctggaggaaagatagtgcatggagaatgcaatgcacattcttcttaaccagttattatgttatacatctttacttgtctgactcaggtagttccttccaaagtacagtagaagctctctaaatggagcaccacttaccctgatcacccaacaactaaccctttccttttccctctgtcaaacacatgaatgatgtccacggcacactcagtgctatggccaatgactgctactcaccagcacaaatgggcgcttgtgctcccaacagttgtgctctacttcctaaagtcagccatgtttcttcccaagcctgtgtgtgctgcttacataaacgtaattccatgtttgctgaattcagaagtatgattgttaaaaaaagagttgctgattctatgaaaacgcagtggagtgatttagaagcattcaacaaagctgaatttccaccccccaacacaaaaagtttgtccaattaggtgtgcctgaaataaatgtaaaagatttggtgggcaagggccattaaaatagcaaattctgcatgaaggctgtttcccaagtgtctttatgtcctcacttagtttggagaaatcaaaattgggtgcaataaaagacgtattttggggtgttgttt

SEQ ID NO: 266629 - DNA, 731 bp, Homo Sapiens
atgtccattaaggaaaccagattttcaattatttagtgagagaagagttagagcaaaagacagtggtaaatgttttattccgtctccatgaggaattgaaggagttggtctccacctagagatacatttgatttacagcttaagtaattcagaggctaagctctaagcttttttctctcattgctggaatgatttaagcagaagtccttttgtgtacttttaaaattgtatctttccaggagcccctcagattgtaccttgctttctcaccaatagacaccttcccgacacttttttaatgttgtagctgagcactttaacaagttgagcattccatgtttcattcttagaaccttctttaatagagggtcttccctcaacagcctgtgcctctggtctacctttgaccaccactgataactaatatattggtcacaatgactggaatgtgactagtgatctcaggagatggcactgtcctaaagtgctgtcagggtggcaccactgctctctgaacaacttaccttggtcagagggactcaggtttgggacagcacaagctgaaggctggagagtaacttgcatagtaggaccatacctcttcctttcccatcccacccacatatgatagacagcccctctgttgagatatggaggggacagatactggaatcgggggtgggacttgcagttacttaaaattttttaataaactgtgccctgaaacctaa

SEQ ID NO: 266630 - DNA, 631 bp, Homo Sapiens
  misc_feature (55)..(55): n is a, c, g, or t
  misc_feature (204)..(204): n is a, c, g, or t
  misc_feature (212)..(212): n is a, c, g, or t
cacccttagtttgtagctctgtattctagctctactacttactagatatatgacnctgggcaagttatccaatctctctgagccttagtttgttcacctatctagtatggataagcctcattgtgttgttgtgaagattaaagtagttaatatatgtaaagcactaagaaagtctcagtaaatactcgccttaccaggtattanttatagtncagtaataacttattattatagggagataaaagattaagaagaaaagagagagataagaagactcctagtttctttgtttaagtagctgtcagagggtttatatggctaataaggctaaaaggagattagagttacccatcaattttaattataccctactccaaatccccatatgctacaggtagtaagaagttagctgaaatccccaaattcatgtttgcaggtagtgggaagaaatttgaacattgctgaaaacatttttcaggcccactctgcaatggtagaatggcagaaattctttacattggcattggactggtacatatatgaacacaactcactggccatccctcaatccagtacactgggccccagtaactggtaccagttcactccacccttgctggcccatctactt

SEQ ID NO: 266631 - DNA, 545 bp, Homo Sapiens
cgtagagtgcagagccaagcagagcatcagcttcttcttgcaattgtccatgtgtttctccaatgtcaactgctgcctggatgttttctgctactactttgtcatcaaagaattccgcatgaacatcagggcccaccggccttccagggtccagctggtcctgcaggacaccacgatctcccggggctaacggaaggacatcctgttcaggggaagaaagccctggccctgaattctggtaacggatatcgcgttccagggttttgatgtggtgggatgatccgcaccatcttcactgatgtgcttccctttgatgcccattgagtgccagctttgctcattataccccaaagaccttttttccactgcccagacagcttataccacccagtgttcagggatctctgaagaacccacagaccaggtgaattactgatttctaagtccaaaaactatagagcagaagaattgagaaagagaatgagaccatgtcaacaaggctgtttccaactctccccattttcctgttctactgggaggttctg

SEQ ID NO: 266632 - DNA, 521 bp, Homo Sapiens
  misc_feature (62)..(147): n is a, c, g, or t
cgagcttaggagtgagaaggctggatcaaagcctggctccatgcctgcatccctctgacttnnnnnnnnnnnnnnnnnnnnnnnnnnnnnnnnnnnnnnnnnnnnnnnnnnnnnnnnnnnnnnnnnnnnnnnnnnnnnnnnnnnnnnactgataatgctggtacgagtgacagcttccctcatggaaggcccaccacgtaaagcagtttacagccatctcattccatctatgacagaatcctgtgtcactgttttggagatgggaaaaaagaggctcagagatggtgagtgacttgcataataattacataaaacccccagagcccctggcccctggagttctcaaaagttccttctctgttggtacctgcagctgccactccctaccccgctcccatagaccctctcctccttggagactctgccccatctgccgtcccttctctgctggatcaacaccttttccctctctgctggctcccatcagtatttaaacattgcctttcatatctgtcttcaag

SEQ ID NO: 266633 - DNA, 715 bp, Homo Sapiens
aaatacaggtagttatcatgaaaagcaaaattactgtggaagtagccagagtgttcactagatgtttgcaatgaagacagtcatcaccaaatactatataccatattgcccatttaaaagaaatgtattagaattattctatttataaacaaaagacaaagttgtctcccaagactaattctacttaatgtaatactaaaaatgctagcatagtttaaaaagattaatacgtagaaaatgaaaatatcaattttaaggtctatttattttcttttttaagaaaatagtactttttaattgtggtagtagtgctgaggacaagcagagaagatgaggggtattatctgccaggtttttaaatctatggcattggcaatcataaaccacacggtatggggttaaaaacattatccaacaaataattccaatcctttcctttagaaatgctatgcccaaacttaagaattcaaggtacccataagtcctaattaacaataatgaaaagaaccactcaaaaagtattattattggcattctttggcttcagctcctgaaaaacagagcaccaagagggttttcaggacccagtatacaaaccactatctataggcctcacctcactctccacacacccttaactaagtgcacagtcctggaaacaggtagggctgaaagtctcccctctccaccagggaaaaactctgggttgtctaag

SEQ ID NO: 266634 - DNA, 727 bp, Homo Sapiens
ttgatggtaatcgaatttagtgttcatatttatttaatcatttgataaaatttgaaagtgcagtcagacaaggcagtcacttaaaagcaactaaactgtgatttgcttgacttagtttctcattttctctgccagagtctgcaaataaacactctgatatcagagcaaacttggtaaatacctctgtttatatacaatataaatatacaatataaatcatgacgtatgaacgcctaaggtatctgaaagagttggtatttctaatatttcataaaagttaaatatctagagaatgcattgcttttgtcacttttaatttttatattaaccctcctaaactagttacctcttttattcgtatataggtaaaacaaacgatgagccatttttatcaaataagcaaggtattgagtaaagtgtaagcatatagtatacaaattgtaaggtaaaatggcaatttactgtgtggcaccaggtatttaaatgtgcactgaaaaaatttaatgtatcattcaagtatgtgctttagttatttagcgttcgttgttattttaacttcatgaatatgctgccatttattctttggaaaaactgcttgatctattgtatatcaaaggcagcataatttctaattcagtcggcatacatgttactaacaacaattcctctttcacattagcttaatttatataatgatcttggcattttttcctcattatgtaaattg

SEQ ID NO: 266635 - DNA, 695 bp, Homo Sapiens
  misc_feature (306)..(306): n is a, c, g, or t
  misc_feature (372)..(426): n is a, c, g, or t
  misc_feature (509)..(610): n is a, c, g, or t
  misc_feature (634)..(634): n is a, c, g, or t
  misc_feature (650)..(650): n is a, c, g, or t
ctaccgaatctatacaaccttaacattgactagtgcttgtaggtgtgctcaatacttgtttgttaactgaatcaaaaggagtaaatgcacaatatttgaacattgtatccaaaggaagaaacctgcgaaataaaattatttgcagaaatgaacatttgttgaaatgcagaaaaccactggatactgcagcctacaatattaatatgatattactcttttacagttgacacctgtcctctctgtagtctcttctctcaaatttggttcttattgaggagcctgtctagtttcccaaaggtttttatnaaaacataagttgaaggtacctttgatttttaattttatttttgagacaggacctcgctctgtcannnnnnnnnnnnnnnnnnnnnnnnnnnnnnnnnnnnnnnnnnnnnnnnnnnnnnngctccatccatctgcccatctctccctctgagtagctgggaccgcgggcgcgtgccaccacacccagctaatttttgtatgtnnnnnnnnnnnnnnnnnnnnnnnnnnnnnnnnnnnnnnnnnnnnnnnnnnnnnnnnnnnnnnnnnnnnnnnnnnnnnnnnnnnnnnnnnnnnnnnnnnnnnntaagccaccacacccggccaaggntgaagtatattttggngatttttctgacagtgcagactgaaaaaaatttaattaagcggcc

SEQ ID NO: 266636 - DNA, 506 bp, Homo Sapiens
  misc_feature (28)..(28): n is a, c, g, or t
  misc_feature (50)..(253): n is a, c, g, or t
aaaggcaggcaccttcttcacaaggtgncaggagagtgtgttagcatgtnnnnnnnnnnnnnnnnnnnnnnnnnnnnnnnnnnnnnnnnnnnnnnnnnnnnnnnnnnnnnnnnnnnnnnnnnnnnnnnnnnnnnnnnnnnnnnnnnnnnnnnnnnnnnnnnnnnnnnnnnnnnnnnnnnnnnnnnnnnnnnnnnnnnnnnnnnnnnnnnnnnnnnnnnnnnnnnnnnnnnnnnnnnnnnnnnnnnnnnnnnnngcacctataaccgaacaaaagaaaattaagtaactaagactaaggctttctaaagtggagttgggagattgggagaggactgcagttacccctgctgaaggtcaaaccacagaatgttccaacagacttcgacaaacaactaaagtctgtatcctccagccttcaatatccctcagctggcagtatcctaattaactaaccaagtcagaatgggtttgtgatttcagatttctgcccagccaaataactgctt

SEQ ID NO: 266637 - DNA, 482 bp, Homo Sapiens
cctgctttcaaacaccaagtgaagagaactacaaagtttggtgtgtccactagtgtggtttcataccccctaggtcttgctgttgaggactggttctgccaggcatgatcaatgaccacccacaatgtcctgtggcccagcctgtggagaggtgcccaaacagagttatctgggtccacatccatgtgcccagctattctgtccaatcatagcacaaagacaggttgcctgtgtccagagggacacacagcctcaggcacaccagcccttacttatgagcttgatggtcatcagcaaagactctctccctttaggagggttctccttgggacttttcagtgtcttggcaggaaagagatggcacacacgaagcactgattgaagacagtttaatgaaagaatatttacagaggttgggcaagggtatggaaaacaacagggaacagtaaaacacccagggatgacaaggcaaggtagctcat

SEQ ID NO: 266638 - DNA, 738 bp, Homo Sapiens
aatggggaaaatggggaattctttcgatatagaagggtgtggaaaagagcagagagaacagatctcccctttcccatcttagatctccatttttatgctcctgttgtcgagtggtttgtcatggtaaagaaaaaatgcttttaaatgtgagtgtatatatatcatctatatgttgcaaaatgtcctccttcgtgattcagcaacctgatcttacttcagtgctactccttcctgtgtaattaagcctcagctccagctctctgtattgcactcactagtcatcaggttggaaggtcctgggttcctgtgtcctggtgggcaaccgcatgatagaactttaatgctacttcctggcatagcaggagatgaaagagcagggggaagaaacatcaatctaaccacgaattttatttccttgtgtttctgatgctaaaaatggagaggaagtcaaactagacaagagggaagtctccatgaagtgtggaaaacaagctccttgattgtggatgtgcagagctgcctgttgagtctgaggagtctggcatgtgacacactgcagacctgagacaagaagccttgttgctatgggtgacttttagtgacctataaattttgcaggcgcgccacggcactctattattgctttctttctctgagtcactaattagatcctgatgatttccatgtgaaaccatgaggactgggagatgcaaaatggtttttgctgtgtagattcat

SEQ ID NO: 266639 - DNA, 528 bp, Homo Sapiens
  misc_feature (491)..(491): n is a, c, g, or t
ggcacgagaatggggaaaatggggaattctttcgatatagaagggtgtggaaaagagcagagagaacagatctcccctttcccatcttagatctccatttttatgttcctgttgtcgagtggtttgtcatggtaaagaaaaaatgcttttaaatgtgagtgtatatatatcatctatatgttgcaaaatgtcctccttcgtgattcagcaacctgatcttacttcagtgctactccttcctgtgtaattaagcctcagctccagctctctgtattgcactcactagtcatcaggttgggaaggtcctggggttcctgtgtcctgttggggcaaccgcatggataggaactttaaatggctaactttcctggggcattagccagggaggatgaaaaggaggcaggggggggaaggaaaacattcaattcttaacccacggaattttttatttttcccttggtgtttttctggatggcttaaaaatggggagnggggagttccaaactaggacagggggggaagtcttcc

SEQ ID NO: 266640 - DNA, 587 bp, Homo Sapiens
  misc_feature (155)..(155): n is a, c, g, or t
  misc_feature (267)..(462): n is a, c, g, or t
  misc_feature (522)..(535): n is a, c, g, or t
ctgggtatattaagacattaattatactctggatgaaaataaggaatgtagaaaaaaatgtgccaaatattactcactgcatgtgaacacggataattaacagacaatccagacaatatatctgctcatagtcaatatttttatcgtattttttnttgactgggaaatgtacacactttagtttctctggttctctgaataactgccatctatttctaagcaacaggaaaagaatctatatgaaacttctcgaaaagtactttctgnnnnnnnnnnnnnnnnnnnnnnnnnnnnnnnnnnnnnnnnnnnnnnnnnnnnnnnnnnnnnnnnnnnnnnnnnnnnnnnnnnnnnnnnnnnnnnnnnnnnnnnnnnnnnnnnnnnnnnnnnnnnnnnnnnnnnnnnnnnnnnnnnnnnnnnnnnnnnnnnnnnnnnnnnnnnnnnnnnnnnnnnnnnnnnnnnnnntgcttcaacccaggggacagaaaagaaaagtacattctttggacatagcttcattgcagnnnnnnnnnnnnnntcacatcaaagcaaattcatctctaactaaaaataactaggctatgttggtt

SEQ ID NO: 266641 - DNA, 471 bp, Homo Sapiens
aattcggcacgagcattaaatcaccctgaatccatacggcaacactgcgagagagagactattataccaggctaacgcacgaggagtccgaggctcaaaggttaattcacagatagatccaaggtctgggagccaatcaaaagcggaggcaggatttgaacctggccctctgtgacttccagccagcatccttccaccctcctgggtccctctgcagctcacctcccttggaggccctcgagcagctctggaggccctgcttggcctgcccgccactgaccttcaccaggacgcaggggctctcattttggtttttcttctgggaagtggggctggagaagagcaggcagatccctttccagggcagtgtttccaaactgcaggcacaattcactcatgggttataaaagcaattttgtgggttgagaccaacattaaattaaaataaaaattagagtgctttatacaagc

SEQ ID NO: 266642 - DNA, 653 bp, Homo Sapiens
gaaaggagtgtggtgatcctcggaacatcagcagacaggctgttcatgataggaacacattgcagcggggaaggaggatggctgagatatgaaatacccttcaaggtggacgcatacccaggggcatgtcattcggtggcaggggccagcacggacatgcagcactgaggcgtgtgctagcgcccagtgcgttcgacccaggcacggacttgtttggagcatacaggacagctctgcgttaagacctgtaagccattaaagaagtacagtctggtgaatgaaccctaatctcttgatgatcaagtgatgacatcatattctgtctccgaggagacaccctcttgcacagaaggcagtagaggaagcttgcgtcgagattgcctacctccccagccccaccttcgagggttctttcaaaagttcggactgatgttcaacttcacatcttgtctcaaggcaatcctctctgtttagtctcatagagttggctttgtggaatgtaattcatttttatctttagcacaaatttgtctgtttcttttaaggccaccagaaagcacaacatagactccccacagaaatctcattttatctcctaagttgcagaataaacgtaccttgtttgcaaagggaacattttcctttaaaaaatt

SEQ ID NO: 266643 - DNA, 543 bp, Homo Sapiens
  misc_feature (20)..(20): n is a, c, g, or t
  misc_feature (29)..(29): n is a, c, g, or t
  misc_feature (43)..(43): n is a, c, g, or t
  misc_feature (51)..(51): n is a, c, g, or t
  misc_feature (72)..(72): n is a, c, g, or t
  misc_feature (96)..(96): n is a, c, g, or t
tgaggctgaaaattggcacnccttccccnaatccccatagccnggtaaatnactgggtccaaaaacctcgtnagaggtcaccgggaatgggggaantggcctctgtcagggccggggctcatgaatctcattctcttagctgggcgtgcaacagaccaacagataactcatcctaaacagagaaatgagaaagagtctgtgggtgggcctctgagggccacagaaaaccagacaccccacatgtctgtggattggagaggggcaggccactgccctctccaaggaccaagccgggttcttggtccccaccctccctgcactccgcatctcctccccagcagccattctcccctttcccttgtgaacaaaagcctagttttgtgtgggcagcaatatagggtaaataaaaccacctgattctccagccttccttgctgttaggagggactgttggcctagtcctggcccacgagatgagggtggggtctgtggggcagggcttcttgagagccgtcgtttttctaataaaatggacagatccaa

SEQ ID NO: 266644 - DNA, 150 bp, Homo Sapiens
  misc_feature (18)..(18): n is a, c, g, or t
agcttcttaaaaaacagnaacgtatgcctgtttcctcatcaagtaccccattcccagcaaggtagcccttggtaaatgtttgtttagtggactgacaaagcagccttagttattcaattcacttttaatccaactattaagagttagatt

SEQ ID NO: 266645 - DNA, 892 bp, Homo Sapiens
  misc_feature (129)..(129): n is a, c, g, or t
tttttactgcctctcgtgacaggctagtgaggtggtttaaatattgttcaaaactctgaaaatgagctctgatggaagtattccaatgattttgtgatccaagggatttgtgcaaagctgtctagcggntacaaaaagaataaatatttagcagcttgtgtttgtcttgcccctgagtaaagtatacaggagcctgtctctgtttacccatttaaaaattttcctggatctgtttaaatgatggtgcccctggcagtggagtgtgtccaagctcacttaggaccagagtgggaagagcatgggaacccatcaggtgggccacacaaaagcctgcagttggcttttggctctgtcactactcaggtttttgggcaactccctttacttcttttggctcagatttttcatcagttgaaagaagggctgatattaagtccccttctaggtctgactctaagctaatatttattttattgccttaactaaccagaagtaaaagagagaggctgcttgttatttaatgtccaaggaaattttatcccagttgtgattacttcagctgattcaaaacagcgtccttagaggcacagggccgtgcagagcctggacccatgtaagacccctctgagccgccagcctgactgctctcagtgcaaagacccagaacccagccttccttcacctgaaacagctgcagcgtgcacacacacttcttgtgcatatatctctgtctatttattttcaaaactaagtataatccaaattgaatgctggaatcagatttttccattctgaatgtgtttaaataacatggccaaggataatttctttctgttttcttgacatttataggtagtataagatatgtgacttccaaataaacataaaccat

SEQ ID NO: 266646 - DNA, 799 bp, Homo Sapiens
  misc_feature (313)..(313): n is a, c, g, or t
  misc_feature (390)..(390): n is a, c, g, or t
attcggcacagaatttatacttagtgggtaaaggctttgcatgttggtgtttgaaagtctttaaacattactttcatgtttgatggctggtagttaatgtcaaacggttaacttactgagcatttaccataatcaggcactgcgccagactttatatatataatatcccatttatctagttaacgcttcgagataaatactgtttaatatcctttatttttatacaggaagaaactgatttctccgtgctgtgggccacggttttatagtagtgagtcaggcagaagtggtctttggctcctgtggagctgancagtctagtggggccttgaagtggttgaatgacttgtgcaaggtcacatacagaaagtaaagggtagatcctaggtnctggaatgagggaatttaagaccacctgacttaaaaacctctttgtttatgctatgttgtaatgcccttctacattttaacccttgcataaaagcatacagattaccagaggtaagcacagatgtattttttgttgggagatgggtgtcctgcatgaagtttgtgtcattttcaactaccaagaatattttgcagttttgtcaatgctagtgacaaactttagttacataatagagtttttattaagttattattaactttttccctccttttctctcttctcccaccctaccctatttggagcttaataaatataaaccattttcattgtggatgatactagagactagccataaataaccttgataagaatttggctacttttaccgttactgaagtaactgtcatt

SEQ ID NO: 266647 - DNA, 740 bp, Homo Sapiens
  misc_feature (366)..(392): n is a, c, g, or t
  misc_feature (400)..(652): n is a, c, g, or t
  misc_feature (683)..(694): n is a, c, g, or t
caaggggaagcacatgtttgcaaagagaggccaaacatgagaggcatcctcactttataacaacctactcttgtgggttcacttctccaagagtgagaactcctttcagaacgacattaatccctcttaacaacctaatcacctcttaaaggtaccacctctcaacactgctacattgcagaccaagcttcaacatgagatttggtgaggacaaatgatattcaaaccatagtagtcatttttttgtgtgtgttagttttgctggaatcttgtcaattttattgatctttacaaacagtcagattttgatttgagtttttaaaaagttgtggtagaatatacacaaaatataatttgccatcttgnnnnnnnnnnnnnnnnnnnnnnnnnnngagacagnnnnnnnnnnnnnnnnnnnnnnnnnnnnnnnnnnnnnnnnnnnnnnnnnnnnnnnnnnnnnnnnnnnnnnnnnnnnnnnnnnnnnnnnnnnnnnnnnnnnnnnnnnnnnnnnnnnnnnnnnnnnnnnnnnnnnnnnnnnnnnnnnnnnnnnnnnnnnnnnnnnnnnnnnnnnnnnnnnnnnnnnnnnnnnnnnnnnnnnnnnnnnnnnnnnnnnnnnnnnnnnnnnnnnnnnnnnnnnnnnnnnnnnnnnnnngtgtgagccactgctcctggcccttaactannnnnnnnnnnnaaccttccacagtccttttattttggaataggctgtaaacaatcaa

SEQ ID NO: 266648 - DNA, 804 bp, Homo Sapiens
  misc_feature (731)..(731): n is a, c, g, or t
aactggaagaatggtgatgctttcaagtaataaggacaaaggggaaccaggcactgtgagcctctgtggggtgtgttactcttttagctcatgtgtttcaagtcattctaccccttgccgtctccacatccaaacctaactactttggattttaattgcagctcctccacccccaccacctgtgatccgaaatggtgccagggatgctccccctcccccaccaccataccgaatgcatgggtcagaacccccgagccgaggaaagcccccacctccaccctcaaggacgccagctgggccaccccctcctcctccaccgcccctgaggaatggccacagagattctattcaccactgttccggtctttcttgggtgagtagctagctatctgtagtctcatggttcctgcggtgacttcacccactccagtgccatggctgctagatggccaccatagagtgggaatggccacatgggatcttttgttcacaatagttctcctgctgacttcatcctcagaggtatgggctgtgttcattgacttccttatcttgatatgaattctaagcatggatgctttggagtagattgaagtaaaatcagcaagtgttgtgctaactctaaatccactccaaagatcactttttgtagctagcttttaggtcagagactctgtatcttctttaggattattcagacaggacttatgtattctcctaggaaggagtgntcctttctagctcttcaaaaacaaaacacttgattggtcttggaattattattttttaattattttttataga

SEQ ID NO: 266649 - DNA, 239 bp, Homo Sapiens
  misc_feature (107)..(107): n is a, c, g, or t
  misc_feature (212)..(212): n is a, c, g, or t
taaaaaataattaaaaaataataattccaagaacaatcaagtgttttgtttttgaagagctagaaaggaacactccttcctaggagaatacataagtcctgtctgantaatcctaaagaagatacagagtctctgaccctaaaagctagctaccaaaaagtgatctttgggagtgggatttaggagttaggcacaacactttgctgattttnactttccaatctactcccaaggcatcc

SEQ ID NO: 266650 - DNA, 570 bp, Homo Sapiens
  misc_feature (19)..(19): n is a, c, g, or t
  misc_feature (284)..(284): n is a, c, g, or t
aggggacttacatcctatnctgtctgtcttccacaatcccacccacacacgtgtataaatatatacacatacaaataataaaggtatatagtatattaattctataattaatgatatatgaaaaatataggaaaaatgtttccaagagggcctcacttggccagccataccctgggggatcttgtaaattccagactcctctgcaatgggtttgcacaatgatgcccaaaccaaatatacatttgggtagccagaaaagggggtggtagtggtgctaagtgtangaacctaacagctcccaattacgtggttacctacttagtctacacgaccacttgcaaggtaagtattctcacgtcatatagatgaggaaacaggcttagatgttaaatatcttcacaatgccacatagacagtaagtgcatagctgagatcgagacctcagtcacaggttccaaactccatgttcttccactcaaagctataggttgaccctgatcctgacaacctgggccccacccagcacctgtgtatacctaccaatatattctcacagccagtggcttacac

SEQ ID NO: 266651 - DNA, 222 bp, Homo Sapiens
aatgttcttttgaaagaaaaggtaaccaggacctttcgttcatttgctttcgcagagttccgtttagataaaatggttaatttttataatgttatgaaaactaaaaagtgaactattttagagaaaagtaacactgaagattgccagtttgccatcggtatccttgatttgctcttcttcatctctaataacagatacaaatttttaatataattacctatt

SEQ ID NO: 266652 - DNA, 843 bp, Homo Sapiens
  misc_feature (16)..(16): n is a, c, g, or t
  misc_feature (134)..(151): n is a, c, g, or t
  misc_feature (190)..(190): n is a, c, g, or t
  misc_feature (725)..(725): n is a, c, g, or t
atgaaaaccaaaagancaaatttgctgcacactgatgccagcgattttcttcagtgattttgggtatatgctatgtagtaagttgcaacaaataccttgctcatttgtatacaactatccgatatatttttaannnnnnnnnnnnnnnnnngttcttctggctgtagtaatgcactgtaaagctatttcnacagtgcaaaatgatgaaaccagccccaaatgaaggctgcataataacaattctgatacaagaaaatattgacagagttactggaacgtgtaacagtagtttttttacttgctagagtggacatacccccagtttaaagacagggatgaaactctgctttagtgcctggggtttcagacagtttatgaggttgagcattcgctgcagaactagcatttttgctcacgttctggaagctttctccgtttatttggtcaggtgactgtggtggtatggaaagaaggggcctgtttgttgaagccaaggtgctggaagaactgcctgtgttgcaatgaagagacaaaggtgtgtcggtcgtggctatttctcgtgtgcttgggttctctgtctggggatctccgatttctcctctgctaaggtcagaggtactggtgcgtaggcgttccctggccagccagtctgagatggaaaggtcctgggctgagcattttggttttaaccggtttacagctgaaagttcagattctctctcacncgctctgctcatgcactttccaaaaattcaaaacgctgatttcggtagcatctctgtgccctcctagtgtatgtctgcgccggatgcttttccttttagcagtctcggcattcacttt

SEQ ID NO: 266653 - DNA, 881 bp, Homo Sapiens
  misc_feature (42)..(42): n is a, c, g, or t
acctcatttcttcctcacatccacagtaggagactgagatcnttttattcccattttacagatgaggaaacctagtcacagaatggttaaattcgttgcctgagatcatagagcagttacagacttgattcgggttgaaatgcaggtctgcccaactcccaagcctggcataatgtcttattttcgactgcttggaaaccatttttcctacatcccatctttctaccaagttgagaatcagtgagctcaggacgcaggggaggcgctggctgcatattgtagagatctgatcttggggaaatgcctgtttattatggatatggcttatggactaaaacaatagcattgaatgtacgttgtatgcatgtaaggtagttgtgattaaccaaaaccaatgttgatgacgaacttaacagagagtcaagtgtgctttaaaaataagcttaaaaaactgcctgggttttgtatgcacagattttgggccagccaggaagatccctcaggttgtggtttgagaatacctgttttagacaaagcacgggtgatgtgtcccagtcatcaggaaggatgaaatctggcaaggaaaccgtaaggatcagattacaggaagggcttgctcagggagaggaaggaagcaaggaagaaattagtaactgaaaagaggcaaggaggaaggcctcttcatcaggaggtgggggagtgtggggcagtggataactaaaacaaaacagctgtggttgtcataaacacattttgtcagaaaataacctggtgtgttattttctgatgtttcagccattgtgtcttgattcaggaacagctcccttccgagtttctttttgtttgtttgttggtttttgagactctgtcttgaaaaaaaa

SEQ ID NO: 266654 - DNA, 922 bp, Homo Sapiens
  misc_feature (35)..(35): n is a, c, g, or t
  misc_feature (104)..(104): n is a, c, g, or t
  misc_feature (132)..(132): n is a, c, g, or t
caccgccaccagtctgcacagctgcttatcgctgntccaggcagactggaaaacacccacgccacaaagccctggcccaacagtgagacgggcggtcacgcttntgctcaggcaggccacggtaggccatcncacggcgtccctggccaacagtggtctcatgtccacccgcccaggggtcccgtccagcatgagacgggcggtcagctgctgctcaggaggccacgcaggcctccgattggcatccatgtccccagcagcagcacctagggcacattcgcagatgcagagggctcggtttcaccagctcctgttttcactgcagcctgccttcccctacaggatttcctcagatcactgactgataccgcagcactgaaaacaaggaaaatgggtagaacgctccttcccatcgaggtcaatcgcacagccacagaggacccacaccttcggctcagatgaagctgccacagtgacccactggttccagcccacacaccctcaatccaagagatgggtctggggccgggcagctgtggaggggggtctggtccgagaccaaatccttgaatcacccccagggagaaggcggccaggccttctggagcaaggcgtggatggtgcaaatggtgtggcttctgtgtccctgcagggcgggggccaggccaggggccatgaccttcttttctggccaaacggccactcctgagtgtgtctctcccacgggtagacagcgtcagccacagagcactcaggattcagttgggtccaaactacagcccaaggaattgtctcattctgctcatgttttctatgtttcttccaaaactctatgcatattattttggtgatattattgtaagtggcaaaagtaaacattaaaaacactaagcacagaaacttaaaagaaaaggtcaaaatt

SEQ ID NO: 266655 - DNA, 771 bp, Homo Sapiens
ttaatgaaatgcctggtgcctatgctgcaaccatggacaccatcactaaatactaagaaggtgaaattccacgaagcttgctgaaatccctggatgggggtactgtcaagatgaagttataataagaatgttcctagacagctatgaattgcagccattcttcccttttccagaatatgtaaagaatgtttgtgtgcccacggaggagccgcatctagcctttgaggctgttcagctcatctttcccaacccgaggattttcctttcctctgactcctcccttcattctcccccactggacatctgttcactgcctcgccaaccaagggggaaaacattcttgggaactgaagctgaggcaccaccaagagtcaaggcagctatgagatgtttattgtcacagagaatatgtggtgctggctgaccacagaacctgccaggctgggatgccaaggagggactttaatgaagcagcagaggatggatgcaagccgcatagccaggcagtgtcccctgcctttgggcagagctcttgtccaagtgtctcactggctctctgttttcttccccttgggatgtctgcatggctcctggttgagctcaccagttttacagaaccagcctggtttatgggtgaagaaacaccttctcacagaacttatggggcctaagcgtgtttcagtaaagtactgggcagtttgcctgagggcccagcatgcctaactctcaccagcgtggatatgaagcgaggaaaacctgagctcacagcca

SEQ ID NO: 266656 - DNA, 514 bp, Homo Sapiens
taacatttagggtaaattctaccaacatgttgtactgattacagaggactttgttttaagcatcactatatcttggtcaataatatctattggtctacataatgattttgtataattattaagaatttagcaaaacattaacaatttaaaaaaactctctaggtgctttagattggcagtcagagtctatatgagtctacggctgtaattaaaaaatgaaaaatgcaatcagacatgcagtgtgaaggattctacccagggagatggctggattgcctggtggccagggcatcttgtagacactgctgagggtgtgcctatgtccttgaggctgcctgggctgtgagctcagggttttcctcgctttcatatccacgctgggtgagagttaggcatgctggggccctcaggcaaactgcccagtactttactgaaacacgcttaggccccataagttctgtgagaaggtgtttcttcacccataaaccaggctggttctgtaaaactggtgagc

SEQ ID NO: 266657 - DNA, 977 bp, Homo Sapiens
  misc_feature (757)..(773): n is a, c, g, or t
ttctgaaatatatagaatcctgtagccttaataatgataaatcttctaagtgataaaactttaaaataagtaccactagtgacaagcagaattatttttattaaaaaattttatccatcttattcctttttaccaactcacattgtactctttaataaaccttattaagggaaggcactagtatattacattaggctagggtgtaattttcacacattaaattatatatggctgtattcagcaaggccagatttctatttcaaacttaaccctctgaagtaaagttgtaaaactggaaatcaatgaaaaagacctataaagaactgcaatagctgacataaattcatgaattttacttactaggaggggcacgtagggcctcattcagagtccaatggcttttagttttaattcacacacttaacgagtttagttatgccagaaggttggaagacaggtgagggtggctagaggcagacacgtagacataagacatcctgacagcaagggagatgacaagaatcagtaatacagcatagctgagccattcaccacagggacagttgtgctctacaagccacagtcaggggctaacaaacatactaaaaaggaaaatactaaagcactgtaaggttaaattatactcactatatcctactaaataaggttggggagactgaaatttattttagaaaatgttacctaaaaaattaatctgaaagagtagaaagaacagtgtacagccttagtattgttnnnnnnnnnnnnnnnnngataccctatcccataaggtttttacaaagataaaatgtggcaatgtacatccggctccaagatggcacttcacacataacatagaaggtttttagtatgtggtagtagttttcattaccaaataacacttaaaaataggtttcccttatctggaaaattcacttttgtggaatatctaacttcctgatcaaactaaataatta

SEQ ID NO: 266658 - DNA, 200 bp, Homo Sapiens
tgaaggcagtatcacccaaataaaaataactttatatttttttccagatataactaataaatgttcatgttacaaggttcagggctcatcctaacactttagaaggcctaggtggtaggatgacctgagtccagggagcttgagaccagcctggggcaacgtgggtgagaccccatctctaaaattaggaaaaattggga

SEQ ID NO: 266659 - DNA, 365 bp, Homo Sapiens
caacctgtgatttatctgttttaatgcacagaaatcacttagcctttgtactgttcatatacccacatgtccccactattaagagtcctggtataccacgggcatccctgacattgttcactaccctttaatgtacttttggcataaacctgtcacagctatttagattgttaaacacctgcagcagcatacatttatcagccagaaataaatctggacaccttagcatctatttaaccgttagcccaacactacaataatcccaaatcccctctatcacacttgcctttttcttaatcctgtgtcatcaagacttaaaaatagatcattttatcctatctactctatataatcttcaaagattt

SEQ ID NO: 266660 - DNA, 681 bp, Homo Sapiens
  misc_feature (23)..(23): n is a, c, g, or t
  misc_feature (35)..(35): n is a, c, g, or t
  misc_feature (39)..(39): n is a, c, g, or t
ccggccgcttaattaaagatctntttttgaagggnggtnttttctttcccatttggaacaagtgcccatcaaaggcttaggagatataaaagatgtacaagaacaactccaagatcccttttaagagtctttcatctttctgtaaaaactaaaccaagatacataacatatgagtgtcacatatcgcatgctaattcagaagcaagctatatgaagcaataggaaacacagagccgtcagagcgggaaagccctggaggcacgagtcagcgatgacaccacagggtattcaaggagcaccaatggcctgcaggtggcagaaacaatggaggaaccagcctgagtcaaggaggactcactaggtaagcttgggaaatagggctgaagacgtggactgagcagtcgatggaaggctcggaagtcagacatggctcacctgcgacaggggcctcagcaagagacaggtatgagggacactgttttaggcccatggattaaaaacacggctgccatcaacattgattcagcctatgtaaatgtctggtgcaccagtttattctcaacaagaacttaatcagggtggctcctaccacctccattcctatcatcaaaatggttcaaaatatgccaaagccccgatgtttacatattagaaatttaaaattgcttcctgacaaccttc

SEQ ID NO: 266661 - DNA, 527 bp, Homo Sapiens
  misc_feature (379)..(379): n is a, c, g, or t
  misc_feature (494)..(494): n is a, c, g, or t
cccggctggcagcactaactttaaaaaaatgtttttgtttgcttggtaattcatggttgtaacaaaccaacagtatagaaaaatataagtgaaagcccctgtcttagtccactcctggtgctataacaaaataccttagactgggtaatttataaacagcagaaactttttcccacagttcttgaagctgggaagtcggggatcaaagctgtagccttgattcagtgtctggtgagggcctgctctctacttcaaagatggcatcagcaccctcttcctgcatcctcacacagagctccatccagccctcttttagaagggcactaattccattcataagggtggagccttcataacttaatcaccccctaaagggttnccctcttattacccgtacattgtggggttaggatttcaacatatggattttgggggggttcaccacagtttcagaccttggcagcccctaacattacttttattttaaataatantttattattaatgtaatccgtgttcaagggtta

SEQ ID NO: 266662 - DNA, 797 bp, Homo Sapiens
tcacatgcagttataaggctaagaaataccactattggccgtgagccaccgcgcccggccttgacttcttaactagctacttacattgtccagtaactatatgaagttattaattcaaaaatttattttgcctgcatgatttctgttaactgtttcaagcaggctgcctaagggtctttaccttgctttgcggtttttgccgatgtgggtgtttcctctgggttctttcctgtttgtatgtctttccttttcggttaattcacattttgggtgggggtgggtagatgggaagaggactagttgactgtttcgcaagttgaatagaatacttgaaaaacgcaagcatcagagaatatttattctgaacccataaaagttataactcacctcctgggataaataagtgttcacatttttcagttttgctcctcttttaaaatatactaaacaatcataacagacctaaggttatttttttctcatccccagtctcatttccctttcctaagaagcagcttcaatcatgattttggtgtgtatcttgtccttccatgattttataatttcctcttgtatatgtttgcatccatatacaaaatgtagtattttatgtgttttagaatttttattcaatgctgtgttttggagatctattcatattgctacacaaggacctagtttattcattttaacagttgaaaagtatttcatcataggatttataccacagttcagttacctattccccccagtaatggatatatagtatatttccaggtttttggtataccaaatcg

SEQ ID NO: 266663 - DNA, 608 bp, Homo Sapiens
agttattctgacccccttcagagcagttatattatttatttgaaatcagttttgcctacttttgagtttcatattattattcttaaagatttacttatgttgtgaatatcaatatttccccccactgctgtaaagcagcagtccccaacctttttggcactaggggccggtttcctggaagaggtggggatgggatggtttcgggatgaaactgttccacctcagatcaccaggcattagttagagtctcataaggattgcgcagctagatccctcccacgcggagttcacaatagggtttgtgctcatatgagaatctaatgccaccgctgatctcgacaggaggcggacctcaagatggtaatgtgagcgatgggaagcagccgtaaatacagatgaagcttcgctcccttgcctgctgcttacctcctgctgtgtggcctggttcctaacaggccgtgggaattttaccagtctgcagcctaggggttggggacccctgctgtaaagtattctgaatgaactacactgtatccattatactgatgatgaatatttgtgttatttcatatttttattatgaataaaactgctatgaacatgcttgt

SEQ ID NO: 266664 - DNA, 410 bp, Homo Sapiens
tttaagcaaagtttatgtacttctgaaataccacccaggttcattccagggaatgtagtttggttgcgattctacttggaactgtagacacacatgtcccatcaaacaaccttctcaaacaagtgagagcctaactcagactccggcgtgggctgccggggcccacggatgcaccaaagaaacatgcagctgggcatagccatgtcctctaaagagtctttcttgactttaaaacaccatcatagagacctgccctctcccacggccatgccagagctctgccctagtccaaacaatccagccagagctctatcagctccaaaatgggcaattcagacccaagtcataaacctctgtaaacagacttttcagtggaattgctgcccttttaactcttgcttctctgcata

SEQ ID NO: 266665 - DNA, 1458 bp, Homo Sapiens
  misc_feature (1020)..(1028): n is a, c, g, or t
attctagtgatatacattaatttcaatattgcattccaggtgatatttatgtaaatatgtgaaaacttaatactgtgggctgatttggcactgtttgtcactcttattgtgtgcttgactctctccctccccttcatcggttctctctctttaaactttttattatgggaaatagacacaaatcaagagaatggtgtggtgagcccttatatacccagtacccaccttcaacagttatcagctcatggccagtcttgtttcccttgcagtcctaccacttatcctcatcctgtgttattttaaagcaaatctgaggcatcatattatccctaaatatatttatacaaaccacaatatcattactacactaaaaattcacaataattcctcaatatcatcaaatatctagttagtgttcaaatagccaatcatgtttaaaaggtgtagctttaaaaaattacagtttgtttaattcagagtccaggtaaggtccccacacatttcaattgaattgatgtgccctcttatttcttttagtctaccccgtgtcagtccatttattgcctgtgggcaggaggacttagctccctgggtgcactcagagcttttggtagccaacactcagggaagttgggggggatctggggagggtatccactgcatccactgctcaggggaattagggggagaatttccaggcacaaggaacagcatgagcaaaaaaacacatgaatggcacagcgtagcatgacaaaccctttctttagaaagtctcctagcttagcacatttaatttccatctcttcttattactttagcaattatctgtgtcagaggtggccaagtgttcaccagcatccatgttccccttcttcctttttagcctttttagcaataggcacgtagcaacacagctatagataacattgcccaccctttctggctgacagatgtggccatatgtctaagtttgggtcaataggatgtgagaatacaatatatatgcaactactgggtagnnnnnnnnntctacataaattttctttcaaccccttcctgctgggaaatggcaacaagcagagttctagtcttagatgaagacagctgtgttgcttcatcagcatttgcccctgaatgaccatatggaacacagtcacctaactaccctaggccattcacttaccttaagactgatgagagaaaaataaaaataaacatctcttttctaagtgactataattttataacagcaacgcatcctttactatacccaatagagcatcccatatgtaacatattatttcctacttttctggttcactcatcaagtatatacattagtcaccctgggaaaagacactatattggaaagtgaatttgcaaaagttgcttaacctccttgagcctcaggtacttatctgctagagaaagaaaagacatatctatatctcacagtgg

SEQ ID NO: 266666 - DNA, 1066 bp, Homo Sapiens
  misc_feature (32)..(32): n is a, c, g, or t
  misc_feature (308)..(323): n is a, c, g, or t
  misc_feature (903)..(903): n is a, c, g, or t
ccccaagcagccgttccccgactcctcacccntgagcctcaccctgaactccctcatcttgcaaggccataagtgttttccaagcaaaatgcctctcccatcctctctcaggaagcttctagagactttatgccctccagagctccaagatataagccctccaagggatcagaagctccaagttcctgtcttctgttttatagaaattgatcttccctgggggactttaactcttgacctgtatgcagctgttggagtaattccaggtctcttgaaaaaaaagaggaagataatggagaatgagaacnnnnnnnnnnnnnnnntaagccccaggctgaatactcagggacagcaattcacagcctgcctctggttctataaacaagtcattctacctctttgtgccctgctgtttattctgtaaggggaaggtggcaatgggacccagctccatcagacacttgtcaagctagcagaaactccattttcaatgccaaagaagaactgtaatgctgttttggaatcatcccaaggcatcccaagacaccatatcttcccatttcaagcactgcctgggcacaccccaacatcccaggctgtggtggctcctgtgggaactacctagatgaagagagtatcatttataccttctaggagctcctattgggagacatgaaacatatgtaattgactaccatgtaatagaacaaaccctgccaagtgctgctttggaaagtcatggaggtaaaagaaagaccattctggtatgaaggttttgggggaggagatatcaatcaagaaggcttcccagaagaggtgactggaccagagccttgtccacaggtaagacggaggaggccttccacatggagggagaacaataagtaaaatgtccacctcaangatgtcctttattataccagcctccctccccacaaaaacacatgtccagtggactcctttttctgggatcagaaccaacaccaaaaagagcttttctccttaaagtttagaattctaaaccaggacttgaaatggcctccaaggtttgtgcacaaatactgac

SEQ ID NO: 266667 - DNA, 757 bp, Homo Sapiens
  misc_feature (352)..(352): n is a, c, g, or t
aattcggcacgagcggcacgagggagccgtggccgtctgcgtgcgagtgcggccgctgaacagcagagaagaattacttggagaaactgcccaagtttactggaaaactgacaataatgtcatttatcaagttgatggaagtaaatccttcaattttgatcgtgtctttcatggtaatgaaactaccaaaaatgtgtatgaagaaatagcagcaccaatcatcgattctgccatacaaggctacaatggtactatatttgcctatggacagactgcttcaggaaaaacatataccatgatgggttcagaagatcatttgggagttatacccagggcaattcatgacattttnccaaaaaattaagaagtttcctgatagggaatttctcttacgtgtatcttacatggaaatatacaatgaaaccattacagatttactctgtggcactcaaaaaatgaaacctttaattattcgagaagatgtcaataggaatgtgtatgttgctgatctcacagaagaagttgtatatacatcagaaatggctttgaaatggattacaaagggagaaaagagcaggcattatggagaaacaaaaatgaatcaaaggaagcagtcgttctcataccatctttaggatggtaggtaattctatctatctgttagatctttccaagtaagaatgcactaatttttctacagcttgccttttctatctagattttggaaagcagagagaagggtgaaccttctaattgt

SEQ ID NO: 266668 - DNA, 476 bp, Homo Sapiens
  misc_feature (188)..(208): n is a, c, g, or t
agctgatataagctgccacctccatatgtcaagctgcatgtcagatggtacgctgggactagttgattctctgtgacttgccgcaaaagttccttgccacagtaatcccttgtttcccaagggtgatgtagatcatcctatgtgacagtaacaataggctaaaaacagccaaaggacttgaaagcgcnnnnnnnnnnnnnnnnnnnnncctagagtgactgaataatgagggcaaaatgggtgtcagtgggcatgaaatgaatgaatgccatttgcaccaacctgttttagatgaggagggtgggacctggtgaggagtgaccactgggtgagcattctgtgtcaatggatttccagctcacattggcagcgatttgtacattatttcatcccattcctgtgtgatccatctgaaaagccgcgagacagaagggacacacattcattttgggtgtcaaagatctgggcttcagtcc

SEQ ID NO: 266669 - DNA, 761 bp, Homo Sapiens
  misc_feature (21)..(21): n is a, c, g, or t
atgaaatattgtttccatcancatttacataccacgtctgaagcatattaactgcatagcccaatgagtatttctataatatagtcatcatatcttcaaccattctaattatcctaagtttacattcgaaagattaattataaacttcaatacattataacaagtacatggaactcaagtaacccataaaaatataaagaaaaattaattttggatgcattggatattgtgaaaattgattatataaattggaattatcttgtcatacccaattaaattacagtcatgagatgagggaggaagaaaaggaaaagaaaagcacttagggcacaagcacctgcccagggattatctggcaagccagctgctgaaatgacctgctataaccttaagatcagttttacctagtagctgcggaaacgaactgctataactctaagactagttttacctaccacagtcactcacaaatcagagcatgccagctcccaaaaacttcgctagtgccaatgcattttctttcaaaacaatgcataacatttctctaataaaaacctcaatccttttcctttgttcctttggacatacccaaagacccaatgcagtctgtgtgtatgcccaaattacaattctactgtctcaaataaaatgtgttgttcagagattcatctctatatttgatttctgttgataatatccaactatattttattctaacacactattttagagactagctataacatcttgctcataataaa

SEQ ID NO: 266670 - DNA, 380 bp, Homo Sapiens
  misc_feature (316)..(316): n is a, c, g, or t
ttctgagttacaacaaactgaaacaaaattgccccagaagttctgttaccagctaacagaattaaacataaaaattccactgcaatgtttcaaaaaataaaacactgaatctgaaccgacatgaaatattgtttccatcaacatttacataccacgtctgaagcatattaactgcatagcccaatgagtatttctataatatagtcatcatatcttcaacattctaattatcctaagtttacattcgaaagattaattataaacttcaatacattataacaaggtacatgggaactcaaggttaacccattaaaanttataaagggaaaatttaattttgggatggcattggggatattggtggaaaattggattattat

SEQ ID NO: 266671 - DNA, 317 bp, Homo Sapiens
cgtcacaaaagtatatgagattcaaatttcagtgtccacagacggcaatcctggctcctacccctaaaacaatcattgcagtggagctctgccctagctacggcccctttcttcttttggttccctgactttggggcctggagggcacaaaggcaaggagcaggctgccatccaccccttctcagagaacctgcagggagctcaccatgctctgcatccagtctaggtggctcctagcggggcttggtgggttctccatcctcagcttctcagatgaccatcttggtcatctgagaagctgagagaaacacaaggta

SEQ ID NO: 266672 - DNA, 787 bp, Homo Sapiens
  misc_feature (13)..(13): n is a, c, g, or t
  misc_feature (33)..(33): n is a, c, g, or t
  misc_feature (79)..(79): n is a, c, g, or t
  misc_feature (358)..(358): n is a, c, g, or t
tttttttatgttnacaatttgtatggctgattntactgcacatttaaatgtgtttatgacaattgtagatttcggtttnctctggttaaaccaatgtggaagtacacaggatgggagctgagagacaagcatcctgggcccagccatgctgccctcagtgggccaagctggggacagatgacctctgctccgtggatcctgctggctcagggtggggaaggggcctcaggagaggagtcaggctctcttctttattctcctcacagccatggtgaatggcattcctgggaggctggtttggagaactcgctgaaccatgctctgcatccagtctaggtggctcctagcggggcttggntgggttctccatcctcagcaccatctgcagcaccatcttggtcatctgagaagctgagagaaacacaaggtaaatgttcctgtcctcatttctgcctcccaaccccactgctgctgcctcaatgtccccagtatctctctgcagactcctgtgtgccctcaaaagtctacacggtaccagtcaagagacatccatactgcaagatgatagaaaggtaagtggaacccaaccacctcattctctaccctcatgtctaccacggacagctgaacctctccctgtggaacctggaaaagtagctcagagaggagtagcaggtggcaaggaacatcagggaaacaaagctagaaggagcatgtaggcacctttgacctgaaatagacaagatgcaagatctcaggattgtcagggaccttagctgtgccgaac

SEQ ID NO: 266673 - DNA, 816 bp, Homo Sapiens
  misc_feature (184)..(604): n is a, c, g, or t
gcctgtggtgctcaatcccggctgcatgttgggaccacagggagatgacaaaacccatccccagccctcaccctagggccctcgaatgagcatctcaggggtctaggaggcctccacaaagacctactgattggcacacacttgtttctctaggaagagaacttacagctgcaggcaggagcannnnnnnnnnnnnnnnnnnnnnnnnnnnnnnnnnnnnnnnnnnnnnnnnnnnnnnnnnnnnnnnnnnnnnnnnnnnnnnnnnnnnnnnnnnnnnnnnnnnnnnnnnnnnnnnnnnnnnnnnnnnnnnnnnnnnnnnnnnnnnnnnnnnnnnnnnnnnnnnnnnnnnnnnnnnnnnnnnnnnnnnnnnnnnnnnnnnnnnnnnnnnnnnnnnnnnnnnnnnnnnnnnnnnnnnnnnnnnnnnnnnnnnnnnnnnnnnnnnnnnnnnnnnnnnnnnnnnnnnnnnnnnnnnnnnnnnnnnnnnnnnnnnnnnnnnnnnnnnnnnnnnnnnnnnnnnnnnnnnnnnnnnnnnnnnnnnnnnnnnnnnnnnnnnnnnnnnnnnnnnnnnnnnnnnnnnnnnnnnnnnnnnnnnnnnnnnnnnnnnttggtgcattttgcacttggatcatgtagatattttccatggagctttgaatccatttcttcttttttttgtagacatgaatggatttattctgggctaaatggtgacagggaatattgagacaatgaaagatctggttagatggcacttaaaggtcagttaataaccacctttcaccctttgcaaaatgatatttcagggtattgaagctc

SEQ ID NO: 266674 - DNA, 403 bp, Homo Sapiens
ttctgttgttaaaccctcccagtctgtggtacttatggcagcccaaagcagattaagacatgctcctgcctgcagctgtaagttctcttcctagagaaacaagtgtgtgccaatcagtaggtctttgtggaggcctcctagacccctgagatgctcattcgagggccctagggtgagggctggggatggttttgtcatctccctgtggtcccaacatgcagccgggattgagcaccacaggctcagcccaaagtccaagtatttcccacgtgtctcaaccccaaaaccagctctcaaccatccctgcatagcgctatcccctgcagagccccaaaggcatgcatacctagcatggcttgcccaatgatagttggattccttagtctgtgctgggaccacgtat

SEQ ID NO: 266675 - DNA, 848 bp, Homo Sapiens
  misc_feature (269)..(320): n is a, c, g, or t
  misc_feature (421)..(452): n is a, c, g, or t
ctttcctgtgctatgtcacagataagtgacacactcagctggatgaggggaccccaagagaaggaggaatcaagtcaccctccttggctccattcttgggaaagttttgcaacaagaatattccgtcttcactgtcgtgggagttgaaggtggagaagggaagtcagtccttcaccttgagggagaaggggccacctgctgaggctgtgggccatggtgtcagagatgcctgggttagggccccacatccatctcttcagcctttcaannnnnnnnnnnnnnnnnnnnnnnnnnnnnnnnnnnnnnnnnnnnnnnnnnnnctgaaggccactgaattgaatgaaagcttcatgtggggctcttagctgagagcttggcatgcactaagtgctaaataaacggtagctgctattgtccttgnnnnnnnnnnnnnnnnnnnnnnnnnnnnnnnngtctatacctatcctatgaccctttcagaaatctctgttctccttcgctattcatgggaattctgttttcttgatgccctcatgctcaagaatctcctcatagttcctcatccagggctaaattctgatgtcagtattcctcccttcccataacagcttcgggatctcatatccccaaaaatgcctttgaagacaggatgatgttggcagtcttgctgtgtcatttctgaagtttactccaaaaaatgaaattctccagtgacaggcatgcttaagtgcagctgtggatactgcatgttttgataaagatgaaatttattaaaaagcaaaagaacctccactaaacacccctcttcccattgacgctgggaggggtaaagaaggcttcttgggttt

SEQ ID NO: 266676 - DNA, 1043 bp, Homo Sapiens
gagctctaccagatttttttaaagcataagcaatagagtaaatgcatgagtaaatatcttgagtatcccataaaccttaatgttaaagtcatattgtaaatctctgacttcttattaccaaggacactctatctgttgcctcttactcttgacagatcttggtctcaacaataaattcgttggggaagtgtctaatcttccagcatttatcaatggcacgtttgttgaaacccagcaagaggtctctgcgacgaaggcggaaggactttctgttattgcaaagttggtaaataaagatgccaaggttactaacatcacgaatttcctccacagcaactaggtcttctcgaaccacataagtttgaggcagatatctgccactcgccagtttgccaaagagctctaccagattttttggaggcataacaatagaagtattgaggggcatcagatagcagttccccagcaacaagtccaggtaagcagtcattcccttttcaaagtcatgaataattgctgcagggtcactatcagagaaactggggacaggcacatcaatgattgcaatgttgtcatcctcacgaatgtcagcctcctcagtcacaggcaggaagttaggctctcctccacgaagggaatttgcaggatcctcagaatcaaaaaagcacatctctccacggtaaatggtgctcttgggcatgaagtacttgtaaatgcaggctccaccaacaataagtcctgccaagatgaatgaaaggcctaagagagtaagcatacatctcccagaggagccctctttttcctgggtggcaactcggagctccttgccggtcagtatctgagttctgaccgtgcggctcaggagggcctccacgtcttgccgcgcctcctccttttgcacggcggtaggggtattgaaggcgattttcaccatagtgaatcttcaggctgcgcggtaaaggcgctgctggaatcagcgtcctgggctgcagactgcaagaggagatcctgttagcccaaacagcacttactttatcttcagt

SEQ ID NO: 266677 - DNA, 776 bp, Homo Sapiens
tttgataaccaatattgtctctaaacattgctatatgtccccgcagaggcaaaattgtccctggttcagagccactgatctagggtttcttatcattttttaattttcacagtatttatttttgtggtttgtgatgatcttttattgacagcgggcaaatagaaatttctatattatagaaaataatacctggtttcctttcatgagaaatttaagttaattttaagttaatatgagctatctttatactaaataggcagtctcatcccctgccccctttcccaatattatcatgtgggccctgtgtgtgccaggggctccgtgggtctcctcctttcctagggaccttcttggaaggcctctggacttgtttcttctgggccttcgctggcctcccttggataacccccttctaccttctcttcctctgcccccagaggcagagctggcagattcgagtggtctctaccatgagggctccccatcaccaggctctccctggaagacaaagctgaggactaaggataaagaagagaagaaaaagacagagtttctgtgagtgaggccagggcccttgggccctgggagcaggaagtgagttggaggggtaagcggaggcaggcaggactcttgggtgactcctgaaaggttaagaagaagggatagaaggactgttgagtttcatgtggggaatgaatcgcttggggaaaagaggtggcttaccccggagggtgacagtgaacccttcaggatcacccttgggagtggattctgag

SEQ ID NO: 266678 - DNA, 426 bp, Homo Sapiens
  misc_feature (45)..(45): n is a, c, g, or t
  misc_feature (81)..(81): n is a, c, g, or t
  misc_feature (85)..(85): n is a, c, g, or t
  misc_feature (87)..(87): n is a, c, g, or t
ccccgctctcccccgaagacaaagctgaggacctaaggataaagnagagaagaaaaaagaccagaagtttcctgtgaagtnaaangngccccgccctgggcccccgggagcaggaaagtgagttggaggggtaagcggaggcaggcaggactcttgggtgactcctgaaaggttaagaagaagggatagaaggactgttgagtttcatgtggggaatgaatcgcttggggaaaagaggtggctttaccccggagggtgacagtgaacccttcaggatcacccttgggagtggattctgagaccctagtaaagtgagcttaaggtatggttccaatccagcttccctgtcctctctgtgcttctctttcttcatctataaaaccccgttttatagcctgggaaacatagagagaccctgtctctaca

SEQ ID NO: 266679 - DNA, 483 bp, Homo Sapiens
  misc_feature (189)..(206): n is a, c, g, or t
  misc_feature (331)..(395): n is a, c, g, or t
  misc_feature (418)..(418): n is a, c, g, or t
  misc_feature (433)..(433): n is a, c, g, or t
  misc_feature (438)..(438): n is a, c, g, or t
  misc_feature (443)..(443): n is a, c, g, or t
  misc_feature (449)..(449): n is a, c, g, or t
ccaattgacctgaaaaactgtgccagctacaaggagggtctgacttcaggaaagtggtttaaataacagtgcaatttcaaaaaaatttataactttcttttgatcatcatgtacagaggtgttttttttctttaggcttctcatgcatatgaatattttaagcacgaatggactactaaatatctgagnnnnnnnnnnnnnnnnnnaaagatcctaacagaacatagcgtaacaatattggtcttccaggtgttactcatttcaattatgtgtagtataccaggacagacctattttcatgtcttatttctttaaagagctgcttcattgnnnnnnnnnnnnnnnnnnnnnnnnnnnnnnnnnnnnnnnnnnnnnnnnnnnnnnnnnnnnnnnnnggtttacttgagggtccagggantttcgagaccagccnggggnaaacntgggcngaaacccccttcttaacctaaaaattacaaaaaa

SEQ ID NO: 266680 - DNA, 880 bp, Homo Sapiens
  misc_feature (484)..(484): n is a, c, g, or t
  misc_feature (600)..(600): n is a, c, g, or t
ctagcacaggaagcggatgacagaggaatcccctttcctccaggtcaccttggcttgctgagttttccctaaagtaaggacatggttcttgtgcccccaggcagctgttccaggcccccaccccaaggagctcaggactggtcaggtaaaggaaagctgttctcatgtcctttccccacctgtgtgacccctcagtcccacctgtgtgacccctcagtcccaccctgaggcccaggctagtggggccattccacaggatccatgcagcctggccccaataccctaacagggaaagggaaagggaagtcgtttggaagttgagacagcaaagatttaattttttttcctacacaaatctttggattcatggggaggattgaacagatggagcttaggctggtttaaagtgaaatagtggccttcccgggagagagacaccttcctgggacggccattccttcaacaagcatttattgagcacctngcaggggctgcatgctggcccctgcattaccgcagcagtgttgctaactggggtcatgaacgcctgggctctaggcctatttgtacttctggtgctgtacttggtagcttctcatnggcagatgatttcacactactcacatattattagtgctacttgtccagaccataagagtgctggtcacattgatgacagaaaactctctgcagacgtgtctgcggaatactgaccagtagtataattggcttacagatctgatcgctaagaaaaaacttttttggggttgtctcttgtggttttggtcctctatgttgcagatcgtgcctcctgggtactcccctcttctatcgcctgaggtgtgagcccgttcttcgaaggtcaaagagtgtctccctt

SEQ ID NO: 266681 - DNA, 835 bp, Homo Sapiens
gcaaccacactttataacaactcactctcgtggtagcaaattcagtcccatgagggagaactcacttctactccaatgagaaaggcactaatcactctcacaacatcatcacctcttaaaggccccacttctcagcatcattatattgccaactaaatttcagcataaattttggtggagacaaaccacatccagcccataacaactacccaccttctttctgcttcattctctgccctttctttctgctggctcccctcactcttgttcctttccctttctgatctttctctcctattctttctccttcccttctgtgctccctctagtcctttccctgcttaccaggatggacttcagcctctgtgtctccatttcctgtctggcatctgcatggtttttgtttccttaggctcttcatggtgtgaggaatatggccattagcagctctgggaccacagccctttagctgcagaggtctttcccagttgtgcagtaaaaaatttcaaggaacaattctgagctgtttcagccaaatatctatacctgcattagtcactgttctgcagatagagtgtgatgattagccagaagtggagcaaggtgctgtgattgggaactgcaccagaatcacaagatctgaatagaggagagcaattccccaaatcatacttgagagatcactggaagattctaacaggcatttggcagataaaaataacatgcctactgtgcttttctatttagatttatattttctatagtttattcttaacctactagtactgctaactaaaaatcgagtgtttcttgtgttaaaaaaacatgcttttac

SEQ ID NO: 266682 - DNA, 468 bp, Homo Sapiens
  misc_feature (445)..(445): n is a, c, g, or t
gttaatggtcgttcttctaaaactccacctccacttctaatccagaattgtaagtaaaggatactttttctgatatcacaagtatttgcagttaacaaggttacaaagtcttttacatcagttctaaaattctcagttaagcaaatcatttgtaggtagctggcaacatttagcttcaaaacagagagagaaatgtggttaactgctgagttcaaatagatacagcaataatacatacaaatagtatctaaaagtgagacaaattttgctaaaattcacattatcttaaatgctcttcttgaggatgaaactgctttaaaaatataaggggatatactactaaattaaaagcatttacatgtatttcttttattaactgtatattgtgcaaggacagcaaggaaacttttataggagattctccaacctgaacactgaagacagntttataaaccttgataaaacccc

SEQ ID NO: 266683 - DNA, 1099 bp, Homo Sapiens
  misc_feature (350)..(362): n is a, c, g, or t
  misc_feature (913)..(913): n is a, c, g, or t
  misc_feature (931)..(931): n is a, c, g, or t
  misc_feature (1025)..(1025): n is a, c, g, or t
aagctaactgggcaggcagaaagacagcaaaggaaaataaagtgaacaatagtttactcaccaggagttttgcactgcagcccaccagcttgtctgcaactaacttgtaactaggtagtgacattaggccaatcacttaacttcttcatctgtaaaaactgtagcaaaagcttattgctaaatcatgagtcagctatttcaactaagtactttatcaacatccccttggaccctcagagcataccgtctgcaagagacactatcatcctgttttgccaatgaagagctgtagagaaaggttcattgccctgtccaaggtcacgtagcaagaaagcagtagtattgagacnnnnnnnnnnnnncttcatccgtaaactgaggtaccatatatctaaatctgtactgtgctaagatgggaagggaactgaaacacataaagaaatttgggcaggggataaaggagaggaagtagatgatttaggggtgggaaggaaaagggacccttttagggaacaggaaagagaataattgagataaatgggaagggaagggaaagattaaggtggagggaaacaattattagtatattagtatctagatagaaagaactacccaggatagaggagaatgagattttatagctttttatgagtcattcttcgtttcttcctctcattccctccatctaattagtcaccaaatcctgaagttctttactggtttctcatcatcattcacattggagttgccttttgggttggccctcacatctctcacctggcccacagcagcgatccgtttctaggcacacactactaagtccactcactcataatcaccaaggggatcccagcatgatctggtgtcattttctgggcttatttctagtcttcacacatattcatatgtactncataatgactcataatgntcgataatggccatgtcttcacttatcgttaacaagttgtcctacatgcctgaacactctatcgtcagcagctagacctcgaagtctgctgcgntcttgagacaaatttcggggaactaagaagacccgaagggggtggtgagagcggggtgtgggggcgtcggtttt

SEQ ID NO: 266684 - DNA, 649 bp, Homo Sapiens
cctgatgtctcctcctcctcttataaagacaccaggcttattggaatagtgccctcccattatgacctcatttaatcttagttacctcctttaaagccctatttccaaatatagtcaccctgggggttaggttccaacatacagatttaggggagacatacttccatctataacaacatgtaaacacggtcattggagtgatatgtgtctcaatagagacaagtctgtgacatttggaagtccagagggggagcttccagttccctacggaggttgagggacacttgaccatgaagggccgtttagggtgtgtgttgaaaaatcaataagagcttaccatgcggcttgagtaaaggctaggaggatccatgtgtgtagagctccttgctgggggtgtggtttcagggtgaagtgccaatggggaggatgagggaggaggagaaataagatgaggctggacccaggtgggcatttatgtaattgtcaaaatcagaatttatccgaagcagagtgaatgggaaggggagtatagacctggaacaggaactctttctggatgcttcactgaagaggagagagattgagtgatggtgagcgggaggaacaatggtcaagggaggttttcatttttaatataattcttgtgcaa

SEQ ID NO: 266685 - DNA, 481 bp, Homo Sapiens
tgaaacatcactgcttaggtgtgaaatctataaaacctttggctaatatgtaggagtgagagggaaggtgccaacaatatctccccactttctagcacaaacagtggagtggaatgggaagaggacaaaaagaggggcagccaagttccaggaacagatccaaggctccagcttcggacacagtgtgaaaagtctgcggcatgaccgaggggacagcctgctggaaagtcagacagcccaggtctggagccctgcagaggggtgtggactgtcagcccactgactattagaagtacagggaccaataagatgaggaaactgagggcgccaaggtcacaacagtccagaggacaaccagcatgaagtcacatgcaaaaacacaaaagagcaagaggtgcgttagggaatgtaagatattatattctccttgaccctcgtatctctgagagcttaccttatgattcttctcccctcactctca

SEQ ID NO: 266686 - DNA, 782 bp, Homo Sapiens
  misc_feature (737)..(737): n is a, c, g, or t
atatcggcacagtagcagacagggcttcctggcttgaggctggaagcctttgggaagaggcccagctgggacattccctgggcacctgtcttccgctgaagggagcaaggtgccctctgggactgacagccatgaccctctgtgccatcctcaatccttgagccatatatcaagagtcctctagagccggatggtcctcaaaagtctgtccaaggaatgccaacgttcaccgggctctgagaaacgacgcaaatctctgagctggggaccacttggagaaccggcttagtaacagtcctgatcttcgcaagccagcttcttctgcatctgaggggctcctgggcgcccagaggaggcagacagatgtcttctagctgagtttcttaaccgcatgatgagactcagaccttccgctgcactagaaaatctgcaacagtgtccctgagtcacttctccttagtgggcagactcgtgttagatttgtggaacccagctctctgatttactccttttggaaaacccatggaatttcatgtataaggctttcatttgtattttaaggtttttctgtttgttttgagtatatacatggtgctcaatagcaacatcttagcagatgaaagcagtttatgattccactccctcctgtatgacaggtagccactatactgaatcaaggtgctgaactcaaatcacaaaattctggcttaccgatacaacaaccaatacatctttgntctgtaatgtaaaatttgactccttacttttataacttattaaag

SEQ ID NO: 266687 - DNA, 366 bp, Homo Sapiens
  misc_feature (44)..(44): n is a, c, g, or t
  misc_feature (67)..(67): n is a, c, g, or t
  misc_feature (105)..(105): n is a, c, g, or t
  misc_feature (111)..(111): n is a, c, g, or t
  misc_feature (119)..(119): n is a, c, g, or t
cctaagtggggcagaccccgtgttaagatttgggggaaccccangccctctgatttacccccttttnggaaaaccccatggaatttccatgtaaaaggctttcanttgtantttaaggnttttcctgtttgttttgagtatatacatggtgctcaatagcaacatccttagcagatgaagcagtttatgattcccactccctcctgtatgacaggtagccactatactgaatcaaggtgctgaactcaaatcacaaaattctggcttaccgatacaacaaccaatacatctttgttctgtaatgtaaaatttgactccttacttttataacttattaaagttaaaatgtctgtgtttttgcaaatc

SEQ ID NO: 266688 - DNA, 1186 bp, Homo Sapiens
  misc_feature (58)..(58): n is a, c, g, or t
aatttacaaagtcctataatatgtaggatataaggtcaataagttaagaattccagcnttaaggacaattttaaattataatttttattcctcagtcaccactgctaatccttcaatttatttcaaagtaacttctggtttttattacatttggaagataaagcaacttatcacatgtaggttacaacttaaaattcgtgtatgagccattgcttatattttctaaatctgacatgacccagggggtttctactgctcctaccaccacccaggacatgcgatgaagattgtgcacgttaccgtgagggcagaagcaggttagtagctgtaggagctgtcacatggatttactaataatgcacttgaaaattgtgtatgtggaccttatcaggcatttaaggaccataatctctccttgacctaagaaatcagcttgaagtaattcacttagatttcaaattttaatgtggatacccaaggctgcaaatctgttattcagtacctgctacacttttggggttgcctcttttatgcactgttagaattgctagaaatttagaagtccaattggaaagaagcatatcttgttagaaagtattcccagaaaatgaggaaggctacattttaactgtgtcttgattttacagggagaaaaataaagttaatattttgaggaaaaaataaggcttttaagatgacatgctatatagtagacaaatagtttaactcggtgcctacttcatgtacactggatgtgttaacatgaatttatgaccttcagtgactttttattaccaaaacagcttccttaaagcaaacacacacacatgcctctacagtattggaaaattccgtctccttagataaaacaattaggatttttcttgggccaactagaataattagggctgcagagttggagcctttatataaggagtttgcagctcatatccgaagagagaaatgtatttggaaagtcaaaagtgtaggtaagtgagaaagcagagtagtttcagcttttgcagttggagtgggtataatttactgtgttgtcataagatactggaaagatctttggaagaataggttcttaaagtgttttctcatgtgcccttactgacatttcccattgggccttcaagacaactccgagtaaatacttaaattgattttcagtgcacgtgct

SEQ ID NO: 266689 - DNA, 756 bp, Homo Sapiens
  misc_feature (725)..(725): n is a, c, g, or t
ccactctgtgccctgggtgctgctcttggcttatctttcacttcaggggaggaaccagacctactgcgccgaggggatagtcgagatttgctgtcaacctctggagatgatccagaccgactcctctgccgaagtggggttcgtgtcttggctttagaatctggagaagagtctgactcacttctttcctgaggggatgcactgggtttcacatcaagttcttgagaggatcccgaacgacttctctgccccaggggagtccgagccacagttttatgatcaactgatgattctgacccgcttctttctctcctggggggtaaagacacttgttgttgaagctctggggatgatggagaacgactccctcggcctaggagtctgaggaaaagctttcggttctggggaagaatcacattcgcttctccctctagatggcgttctaggtatatctttcattccaggagaggacccagacaggctgtgcctcgagggagtcccagacccatctctaagtcctggagaagacccagacctgcttctccttgatggagttctgggtaaaccatctttcatttcaggagaagatgcagaactacttctttctctcgagggtgttctgggtacagcatcaagcacaggtgaagagatgctctgatttgaagacatccctgccttttccactgcatctggggataactcagaactgctgtgtccagaggatncttgtcgattgttctttcatgtctagagatg

SEQ ID NO: 266690 - DNA, 862 bp, Homo Sapiens
aattgggaattggtaacctcgcaatctaaagtagttctggctaattcataaattgttcttgagaataaaggatatggaaggtatggttcccagagttggtgaggttagttattcttactgaaaacaaccaacactgttgtaaaattataaaacaaaacttttgtgaaaacaccagaaagttgaaaagtagagaaaatttgaagggctgggttatggggaactcaattgacagaagtgagaattactcttgtcctgaagggcaaacatttcaccacttgaccttgagttttaaaagctttgtgggggtgaggagactcaggaatagtctgcatccttacttgtgggcccggggttaacctctactgggtgggccaaggaaccaagtctcgaacttggattagagtgattctaggcaggtgttgtctcttggacaccctggaggaagctgcccttcacccctaggccttaagattataagtaattttttcaccgtaaaataactaactcacctaagataattaggcatagaagggaataagaaccatgcataagggtaagaaccactgggaacaacagaaatagtcctgcaaaaacttgagatttggaattatcagagactataaaataactgccccattaccaaagaaatatgacaatcttgaaattccttagagagtaggaaactataaaatatgacttagcagtaactagaaatcatagaaatgaaaattacaaacaaaattaaaaaccggataggtgttttaacaacagaataaaaagatgaagaaggagttagtgaaatggaaggtaagccagaagaaataattgtttagtatggagaagaaaacgtaaaaaaaggtat

SEQ ID NO: 266691 - DNA, 463 bp, Homo Sapiens
  misc_feature (189)..(249): n is a, c, g, or t
  misc_feature (260)..(301): n is a, c, g, or t
  misc_feature (400)..(400): n is a, c, g, or t
  misc_feature (405)..(405): n is a, c, g, or t
  misc_feature (423)..(423): n is a, c, g, or t
  misc_feature (429)..(429): n is a, c, g, or t
  misc_feature (451)..(451): n is a, c, g, or t
aactggagaaacagaaacctttacataatggacttcatctgttgagaaatgtatggatataatatttggttcatgacacactttcatcactggtccatgcttaggcttttatttaacttttgtatttatgtattcatatttaatattcaaaaaactgccatgaaccaaccacctaacacaactgactannnnnnnnnnnnnnnnnnnnnnnnnnnnnnnnnnnnnnnnnnnnnnnnnnnnnnnnnnnnnacatgtgactnnnnnnnnnnnnnnnnnnnnnnnnnnnnnnnnnnnnnnnnnncagttactcatgaacgccagccacatttcatggactcaataatcacatgggactagtaggctaccatactgtacagaacagattacagatccttttccntcacntgcagaaagtttcttacngtcggntcggggtatgggtgggcttgcntcctgttaacca

SEQ ID NO: 266692 - DNA, 485 bp, Homo Sapiens
  misc_feature (36)..(36): n is a, c, g, or t
  misc_feature (179)..(179): n is a, c, g, or t
ctggaagctgataagtcagggcacaaattaaaggtntaggaggcaagaccaactgataaacagggggcgtaatgcttcctggggataatcccatctcaaggaaaaacttttggctatttctgtgttagcaagatgcgaagcaagttgtgcaggaaaatgattaacttaaaaggcaacanccccccaaccccttcagctgtacgggcatctggatggccagacccctgatcaagctccaagccttgcctagagtcgcacacaggaagtgaccacaacactaaggcatccggaggctgctggcccagaccacggaccgccccctgctccgccccttgaatctgcagccccgaactggagggaatttccttttatggccccaggctgtcaggcaggcccagctccaaaccaattgttttgttttgtttgtatactttactttataaaatacatatttcttggaaaagaaaaaaatcaggtatagtttt

SEQ ID NO: 266693 - DNA, 1084 bp, Homo Sapiens
  misc_feature (263)..(263): n is a, c, g, or t
taaagcagactcaataattagtgtgactcagaagaaaatactgaaatcttagaatgtttactgtagaaattctcatggaaaattatttctaaatgtttttaaaacttatatgttaaatattgtagaattccatatctttgtcacccatagtgggcccattgtttatgtgtcacccttgggttctcctgtgttatacagaagatgtagactggcttgctcaagtaatcatgggacatgatattgaggtcctgacctcttctagncattacatggggcagtgggcatatggtgggggaggttggggaggagtggggacaccccagtacaggcaataaggaggtacattgtctgtagataattttaaaatgacagtaaacctcactaaaataggtctggtttttattatgaccatgcaccagccattctaacagtgtcagtaataaaactgttacccctgccaagcagatcctccccacttcatgtccctcccttgagggctgctgaaaggggaagttcttgatgccttcatcctagctcagaggggctgtattttctacctaggtttatatgtaatattaacataaacaaaacaaaagcacacaagttctctcatcttgccttttataatatttcccaacttagtctctatcttttcttcaattttaatttggagatttcttaaagtattcttgtgagcactgaggattttatggcaattaccatgtactatgaacactgaacacttctagattgacctcagttttattgacatcaattcctttggctctttctttacatccaggatcagtagatcagaaatgattgaaaataacagaatccttcatattcacaaaatactgtaaaagcaaaacctgcaggaagagatgtccctatttaataagaatggaattggagataatagaagatggcaaaaaggccttctgtggagggcaacggacacaaacttatcaccaaagtcagtatgaaatcggtagcccctaaacaggcagctcaggacattggttagacacctctgcatgaaagtatttttaggacaattaaatctgtcaatgattgaatttag

SEQ ID NO: 266694 - DNA, 873 bp, Homo Sapiens
  misc_feature (224)..(224): n is a, c, g, or t
ttccaacaagcagtgtttctatggaaggatttagaataaaaatatgatgttaacgataactgatagttacaaaaaactctaagaggatgtctgttctacactctaagtaaataactgaggaaggagaaaagagaattttgcgacttagattttggattttaattttgcaggatgagctgtcaggagtcttaaaatgcggccccacaaggagtatacaggtcccnattatgttctcaaaaaccaaaatgtaaaatggctgcttaagtaactgacaatgcaaaacagtttcaaaatagaaaaccattctatttttcaatatggatgattttcataacttaaaaaagtttacataagacatatcttgaaatacacatatttttacccttaaaacatttatctaaaggtaaactggaccaagagaagttgcctttttttcacagtaatttactgggtactggtgtccacatcaacttttgctttatctggaagttatttttcccatcacagatcggcactcagattttgcaagagaagcctttacttcactgccgtctagctcgattttctcagcttctcaaagcaaatttttctttgttcaccggtatagaatcatcattggaagccgcctttgctacccaaggtaccaagttcggagctctgtctggtttcacttcacattatgtgagtcagtcgtgctgcttgaactcagtattgcaacagctctgtctcctcagtgagcactaacacaccccagtgacccgtgggttccagagtctcagtccagcccatcggctcaacgagggagtaagctttgggatgactctcagatgatactttattcccattaatgagggctactgttttatttattta

SEQ ID NO: 266695 - DNA, 153 bp, Homo Sapiens
aaattaaaggtatatgatatgccctagacttgatgaaatatgggtgtttgaatatattcagatctgaggtttaaaaaaattcatttcaaatactggagataaactctgaagagcctacccatgaaaaactagcaagtaaactgcttccctacg

SEQ ID NO: 266696 - DNA, 423 bp, Homo Sapiens
  misc_feature (28)..(28): n is a, c, g, or t
  misc_feature (273)..(273): n is a, c, g, or t
ttatgattacattcttaaaaaattaaantcagagtcaggtcaagaatatacccactttgtttttaattagtaaggaatagtttacaacagaaaacttgttatttctctgtgtgttgaaccgagaaattcctactaatacacaattcagctcacagcatcacccctggaaggccttcttcaccatttgcatattcaattagtcaggatgctctctctgcttctgcaatccctttcatctgtctctgttatgtcactaattgtgttgccctgganatcaactgggtgccatgttgctctctccaactgaactgtgaggccctgaagccaaaagtccatgattctgtccatctctagtacacaggacagtgcgtgttatcaatattttcttgccgaataaatagattaatgaacagggacagtagt

SEQ ID NO: 266697 - DNA, 802 bp, Homo Sapiens
  misc_feature (74)..(74): n is a, c, g, or t
  misc_feature (148)..(157): n is a, c, g, or t
aaagagagtctcattctgtcatccaggctagggtgcagtgacacaatcatagttcactgcagcactgaattccngggctcaagcaatccttccatcttggcctccctgagtagctgggactagaggtgtggccaccacaccagctaannnnnnnnnnaattttctgtagagacagggttctcactatgttgcccagcctgggcctcaagcaatcctcctacctcagactcccaaagtgctgggcagaaatattcttaataaccaataggaatgcaactaaaaacaattttatgttaacactatattacaaaaaaacaaaatactatcagaaaattaggttcatctacaaaacactttaccatatttcagctaaaacaggggccggcagacctgattgtaggaaaaaattacgtgcttgatcacctggaggtaataaaaacaaaacccaagcagcacattagtaaatgaaattattccaatgcttctgaataataatgggtatatgttaatgatttattataattttaataccaatcattaaagaataagtgaaatagaaacacataaaaattatttacataactttaataagaacagatattttaaaacaaaagtcacatctgcactttattgtatattaatcagtgatgaaagatgattcatctcagtttttccacaattggggtcttccttaaaaatacttccacttagtaaaatttatatttaaaaacactattccctaaaagagtttcaatataaaaagtaccaggtgttaggagagagagtcctccatgagtttctt

SEQ ID NO: 266698 - DNA, 669 bp, Homo Sapiens
  misc_feature (121)..(220): n is a, c, g, or t
  misc_feature (255)..(499): n is a, c, g, or t
acaaataaagaaccaacacaaaagaacagttaagagctacctctgggaatgaaagaacagggaaaacaaaataactgactttcccccttaaattctatgtcccgtgccagtggcttatacnnnnnnnnnnnnnnnnnnnnnnnnnnnnnnnnnnnnnnnnnnnnnnnnnnnnnnnnnnnnnnnnnnnnnnnnnnnnnnnnnnnnnnnnnnnnnnnnnnnnacactttgtggggccaggcatggtggctcatgctnnnnnnnnnnnnnnnnnnnnnnnnnnnnnnnnnnnnnnnnnnnnnnnnnnnnnnnnnnnnnnnnnnnnnnnnnnnnnnnnnnnnnnnnnnnnnnnnnnnnnnnnnnnnnnnnnnnnnnnnnnnnnnnnnnnnnnnnnnnnnnnnnnnnnnnnnnnnnnnnnnnnnnnnnnnnnnnnnnnnnnnnnnnnnnnnnnnnnnnnnnnnnnnnnnnnnnnnnnnnnnnnnnnnnnnnnnnnnnnnnnnnnattctgtctcaaaaaaacccattagcgggcttggagggacacacctgtagtcctagctactggcgcagaggtgaggcagaatgatctcttgagcctagcagttcgaggctgcagagagtagtgactgtgccactgtgttcctgctgggtgagagagtgaaaccttgtctg

SEQ ID NO: 266699 - DNA, 554 bp, Homo Sapiens
ggtacttagcaaactggtttcactatgcaacaggatagcttagtcacattagaagttactgccatctgaatattcccaacaaaaatcttctcataatttttaaatccatcaaattcagtgtcccctcttccattttttggtaaggatggtttgggatttggtggcccccttttggttagagtcctccaatattttctgggtggtcctgtgactggattgactttatcattggcactatgtgtattattgtctatcacctaaaatacttacaaatggtctcaaacacaccagttgctgcctaatagaacatgcctcatttgaggaactggaagattgtctaatactagagaaagtcccatgatacaggcaatcaggaattactaaattcaaatcaaagcttcaacagcaactcaatgggttcatcatttgctctttagcaacacaaaataaattaaggcataattaactgttgctaagggagatttactcctaaattatcaagatatgtaactccagaatctccctaatatcagaggcccatgttaggaaattgc

SEQ ID NO: 266700 - DNA, 631 bp, Homo Sapiens
  misc_feature (141)..(215): n is a, c, g, or t
aaactcaagtcataaaacgtgtttttccttggaaagtaagaaataatgtaatgcatgtctcaattgaataactgtctttgtttctctcttctgtaatatacttccccctgcacagatctccccggcccacaaaatacttannnnnnnnnnnnnnnnnnnnnnnnnnnnnnnnnnnnnnnnnnnnnnnnnnnnnnnnnnnnnnnnnnnnnnnnnnntaaataatatatatcctcctcgacctttggtctctctgattcctaaattatcctgctgcaccaggacttataggagcagaaatcagaagactttactccacacacttcaggtggacatgtggacaaagccatcggagaacatgacaaaaatacagcaagagcagagacaagatcagatcatcctgggggcagatgctgggctctgaccaatttgagagagaaaaggaaaaagaacccagctacaagatgcacaagtagcagccacagccaccaacatcagcagagcaattggaggccaggaagacaaggacacttctgaagagactgaaaaaagcagaagacagtccaagtcactgcaaggttccaagatggggtttctgagaaagaccaaattagttatagagcactagctccca

SEQ ID NO: 266701 - DNA, 443 bp, Homo Sapiens
  misc_feature (14)..(14): n is a, c, g, or t
  misc_feature (24)..(24): n is a, c, g, or t
  misc_feature (34)..(34): n is a, c, g, or t
  misc_feature (44)..(44): n is a, c, g, or t
gcccctccaacttnccaatggggntttacatccnggataaatgnggccataagttgaaagtatcttataaggccgaaaatgcatttacctaccagccttaaccccactgaaccattgtagcttaggctagcctacctttaaaaccgtgatcaggacacttccctcagcctacatttgggcaaaatcacctaacacggaagcctattttataatagagcattgaatagctcaaataatttattgaatactgtacattacatagaatttgtgacagttttacaccatcattatgtcaaaaaatcattaagttgagccaccataactcagggactgtctgtatttatatttttacttcacactaagctttgaaactgaaatttttgctcctcagcagatggggtttctgagaaagaccaaattagttatagagcactagctcccaa

SEQ ID NO: 266702 - DNA, 765 bp, Homo Sapiens
  misc_feature (430)..(430): n is a, c, g, or t
cgtactaaattcggaacccacaaaaccttccagaaacctgctaaatcctgcaacagagatgaagcctctattgcccagtccaagataaattaagccactggacaagagtgcagcgagactgtagaaattccagagaagtgtcatctagttttgcccagtatggttgcagattgaggtggatgtattgcagaggatcacagcaatgctggctcagtagtttgcaagtctgtgctaatctacacaggtctggtagtgtaagatgattcagaatcagctgaataagctcataaggtagtttatcaaaatacccattatttggcccttccccgaggacagcactgctaaactttttgttaagactgtccattccacaaccatccttttctgcataggcatcatcttctatatcattccatgtcaataagtgaangtcttgagagaaagcactgccttgtccttcacaccatgtagcacaactgcatctaatccagtgtaatattccagaagagaactatttacttccagtcgtataagatttgtggggaaatttatctgcttaatacaaggtttaaactggcgagcttgggaagcattaaccttcgtaggtctctctgaccaaagaatctcccatcttacttcagctggtggatttggggaataaggatttgcagaacaagcgagaattctaatgactgctccgggatgataggtttctagaacatgtacagctgtaggatacacctgttgttcaaaagtaagttccag

SEQ ID NO: 266703 - DNA, 756 bp, Homo Sapiens
tgtagagaagggcccattccagtggaacaatgagaaaaataacttttctttctgtaggctgttgcaacctcaccagaacagctgaagaatgaatttcagcctggactctaccttattagttgggcacccttggggagggtgcaacctgcccaacattttctgctggccctgtcttacctcatgactaagagagccttcctaggtctggaaggtagcagtcagtctgttctggagggtggagagagacaccagtgttttcccatggtttctgggtagtagataaaattggtctattctaaggttaatttgatattttaaaattttgattctgactagcttattgggattttttttgaataatgtttgattaatgtaaaggttaaaaataaaacctaatatttccagctaaggcaaatgggtatttctttaataaggatgtatttctatctatttatacctgcctcattccataggaattttataaagccagtccaggaatgtagtctgaatcaatctagtttgctagcctgtgagaccagggcaaagatgaaaatagtcatgggaaagttttatccttttaggggtatctgtcttcttctagttcctctctcctcctttgacaaatccccaccccgagactgacctacccatttgacagaatgagattacttcttcaaatgacccaaaacactgagatcctgaacctaatcaataatgtccttggatgaccttgggatgccagattcacacataatt

SEQ ID NO: 266704 - DNA, 766 bp, Homo Sapiens
  misc_feature (102)..(111): n is a, c, g, or t
aatggtgcctctgcacttcagcctgggtgacagagcaagaccctgaatctttgaaaaaataaaagtgtttttcaatgagctgctccatctatgcaggaaggnnnnnnnnnnctttattgtagatatatgcaacctctaggctcattttgacccctacctcatctttttaatgcccatcatcttaatgttgtatctggtttgcctttgatgcctagaagaagaaaaaaatctttgcatttactaaagaaaacagttactccctgagtaagatcaagtgtttgatctgggaccttataaggaagttctcaaagaatggtgatcttggtattgaagaaagctgattttcatctcattagaaggtaatctttgcagaaaagtaaagccggtgcttcattctaacccccagattttcctattttgtaaatcccaagcctatggagttcaattagagcttttacaactcactagaactcatgagttcagtagctttagacagttaaatgcagctgagaacctgccttgggggcccagaaagaattcctaggcttatgggaatgttttttgttttgtttatctcccttaaaggagcagcaagcaagtaacacacttctttcaaaatcttcagagcctcacctagttacctatttcttaaccattgctttaagttatataaacatattcatcctttttatgtctgtgtctttcaaataaatatgtaagctggcagagtcctttgccttagacaccacgccgagcctgtgccgaa

SEQ ID NO: 266705 - DNA, 675 bp, Homo Sapiens
  misc_feature (111)..(119): n is a, c, g, or t
  misc_feature (276)..(276): n is a, c, g, or t
  misc_feature (614)..(624): n is a, c, g, or t
agatgatgaaaatggaggcagagtggttaagtaatttgcttaagatcacccagctagtaagtgacagagctggtatttgaacctaggcattctagcttcagcagttgagcnnnnnnnnnctttaggttggtatcaagttaacttaaatatgcgtagtggcaatttgtatttcttgtttgtttgactatatcctggttcatgtttgtttgtcaagatggttaaatgtatatccatattgtagtagaattttttttgattatttaaaaaaatgtttanggggctgagtttttcatcacaaccctctccttcctctcagaaatagtaactggtgcatgggctgtggtgagggagcctgctgtgccatgtcagtcaaatctgggctgtcttcatgattcaacttggtgatgtgatgcaaccttgggcctgggttgaatggacagactgacattagaatctacactgagcacaccttaaaggggtgtgtgtgtgtttaatgtagatgtacgtataaggctcatttctgactttgattactgacatgagcagttgattagccgtagtaaatattaaattcatagtctggatataatttttaaaaaatagcaagacatcannnnnnnnnnnaaaaaaaaacttaacagtcaatgtctttcctgaataaaattaataaaattt

SEQ ID NO: 266706 - DNA, 489 bp, Homo Sapiens
ctcatggacaagccccactctgcccccttgcttaaatgtctctgagcctccagtttccctcaatctgtaacaagggcagaaaatgcccatccgtgtgcaagcagagtaccgacgaaaaggatggatgcaatgctccttaatggcagtgccccaccccaaggcacaaggaaaaaccacgaaagcaaattcccagtttacacccacgtccccaaactggattttcccattcgactataattcctcccaataagggctcaaaacgttgtctaaggaaagtcgattggttgttgcccagggctggaggagttgggggaaaacggggagtgactgctgatggagacagagtttccttttgagatgatgagaatgtcctgaagctggtcatgctgatggttgcacgtatctatgaatatactaaaaaccatcgaattgtacactttagacatgtgaattgtgtagcatgtgaattaaacctcaagtcgttatttt

SEQ ID NO: 266707 - DNA, 447 bp, Homo Sapiens
  misc_feature (363)..(363): n is a, c, g, or t
ttattgatagattattaactaaattacgtattttatttagatttcttgagtttttaccagttgttctttttatattctaggatcccatttgtcataccacattacacttagttgtcataagacaataaaatttctatttagcaaattttattgggtacctcctttgtattgggaactgttttaatagtgtaagggatctgtccagtaaacagacccaaaaaatccctgccttcatatgaagcttgcattttgtttcctttaatatgctcaagaaatttctaatggaaaagtgaaacaaatagggagatccatatataccaagggtgtggattattgggcctgtaattttgcctccttctttgnaattttctttttttaaaaatctagggtggggcacagtgggcctgtgcctgtaatttcaggcactttggggagggctgaggtggg

SEQ ID NO: 266708 - DNA, 956 bp, Homo Sapiens
aagggtgggtatcagtaattacctatttttgcaactgtatctacaaagataataattaaaatgatgagattaaaagagatcactagggcagagagtataagaaaggaagaaagataaggaaagaactttggtgaatacctcatttaaatatagaaataagagttatcagagaagctgggtggggtatttatgccgaagcagtgtttagaaaacttatggaagagaaaatttcaggaaagaaagggttaatcagcaatctaagtttttaaaaacttttgcgaatttgtttttattggggtataagacatgggttggaaaatgtcagtttggggtatgcacttgtctccaggaaatatctatcctcatcttcccgggatgatttttggaactttttctctttaatggagctgctcttgctgccagcacaagttcactgctggctggctcctccttggaagataattttctcctttgttttggagacagttaacaagtggattaaggatttaaaagtaggttatctgatttgttggcctaggttatattgctgatgctgcaagaataattttaataaagtggaaaggacaaagttcatattgtaaggggttaagtagttcctaggtgataattaaatgtagtcaaatttgtatagattgcagtcttttcaaaagtttaacattgcttatttttgtcttcataatattaaaccaggtctatctaaaattttaatatcacatgcaagaagcattatcattttgtagcagatttttaaagctgttatttcagattttgaactgatcagcatgagacagattttctttagaaccatttttgttctggacaaaattcaagctggatattactgattactctgaaatgcaaatagtgctattttgttttacagctatcatttaaaaagccatgtactcattaagataaatatgtgcagcatgaac

SEQ ID NO: 266709 - DNA, 729 bp, Homo Sapiens
  misc_feature (59)..(222): n is a, c, g, or t
  misc_feature (716)..(716): n is a, c, g, or t
agagagctagcaccatgagcttcaatcctggtcttctatttagacttttcttgagcatnnnnnnnnnnnnnnnnnnnnnnnnnnnnnnnnnnnnnnnnnnnnnnnnnnnnnnnnnnnnnnnnnnnnnnnnnnnnnnnnnnnnnnnnnnnnnnnnnnnnnnnnnnnnnnnnnnnnnnnnnnnnnnnnnnnnnnnnnnnnnnnnnnnnnnnnnnnnnnnnnnnngaaaaaggagagagatgtgcttatatgaagagaaaggtcatctcccacaagagtacacagagcaaagagaaaagctgaagatggaaatgaccggcacattttaggactctcctaaacttcgtcagtgaagaaactgctatactatttcgaatggaacaccgggagaaagatcaccagctgcttccccaccaccagctcctcaggactccaggagacagaaacctaatagcaagagatcaaataataaacattggtgcaattaaaatattttctttcatttctgtctttgtttctctttatattcatattcctcccagaatggttgtcttcaaaattcattatcttccttctttgttatttcattgaatttcttactgtatcagcctgtattagtcagggttctccagagaaacagagcctgtaggagatatacaggtatataagaggagacctatcatgggaaattacttacatgattatggaggtcaaaaagntaaacaggccagg

SEQ ID NO: 266710 - DNA, 610 bp, Homo Sapiens
taacacagcaggacgtgtccttgtttactgaggaatctcttgggctcggcacaggtgtgcagataagcatttattgaactgaacaaacagattttacaagccggaccttctgtggcgttggcccgggtagctacttcagcatgggtccaagcatcctttctaagccaattccattctttcactcctcctcccttgtaggatcagaaatccaaagctagcttatccttttgcagatgtttctttccatattatttcctacctccagaacaaaggctatctgtgtctcacattcggaggcttggatgtgaagccctgtctgttcatttttctctccagttttttcacaggctgggtaactacctgcctgctagcaacgatgtgttcgttctccctggattcctgattgaggtgggcagagaggactctgagacaggagcatgaggatgaggcagatcagcttctttctcatgaaatctggatgttgaggctggtagcaggaccaccgcatgtgccaatagtctttagcagctcatcaggccatagaagaagtgcctttactaacttcaagtccagcctgggaaacgtagtgagaccttgtctctccctgtct

SEQ ID NO: 266711 - DNA, 388 bp, Homo Sapiens
  misc_feature (35)..(35): n is a, c, g, or t
  misc_feature (59)..(120): n is a, c, g, or t
tttagtagagatggggttttgcccatattggcccnggctggtcctcaaaactccctgannnnnnnnnnnnnnnnnnnnnnnnnnnnnnnnnnnnnnnnnnnnnnnnnnnnnnnnnnnnnncacccacactgggccaatgcttaatattttaatgtatctcaacaataaaaccaagaagaaacaaagccttttgacttgttagaatgtattaagtagtattttaaagaaactttatagttgtgacattgaaagactgttggggtggggggaggaaaatttttactttccatcttaatgtaaccttatgctattctgtatttttactgtatattgcttttacaataaatataaaatgaaatgtttatgttgacatttcagtgtgaactgt

SEQ ID NO: 266712 - DNA, 762 bp, Homo Sapiens
  misc_feature (25)..(25): n is a, c, g, or t
  misc_feature (395)..(395): n is a, c, g, or t
aatattaactgtcctgtaatagtancttccatttattgaatgcccttttttgaactaaattttagatacttcataggtcaacagtatttaatttgggttttataaaagagagaagcttggaagtatagaaatttcctgaaatgaaaggactgggtatagccagatacacaaattctttatttcttacattattctatactcctttccaccttgtttcaccggaactacctttgaaaggaagattgacaaggtgtgcatgttaataaatggatagcaccatcatggtatttctactgatgacaggaaagagaaaattgaatagtagggcatctgatttggaaagtcctaaaagaagagaaagtgcaagtataatttaatgacctatcacagggagnatagggtaagttagtaggaaaagatagaggtccccaaatctctgcacaggaaaacaagcgaaagggcaagaaatactgctgaaaacttcttgaaaaaagtgaatttcctgggatagtaagttttgaaaagtttgagttttgttccttatttgtctttccatagaagcattttatatatttcatgtatttattccaagacctactggatatctgctctgtgtaaggcactatggtaggtacattggaaaattaacatacaaattacacacaggctttaccctcaatttatgatccattgtggaatattagtcatgtacaaggatgactgtaatatagggaagaagtttaaaaatgtcacagggattga

SEQ ID NO: 266713 - DNA, 364 bp, Homo Sapiens
  misc_feature (135)..(154): n is a, c, g, or t
ttcttgctctgttgcccaggctagagtgcagaccatagctcactgcagtcttgaccttccgggctcaagtgatacttctgtctcggcctcctgagtaactggaaacacaggtgtatgccaccatgccctgctaannnnnnnnnnnnnnnnnnnngtagagacaagttctccccatgttgcctaggctagtctcgaactcctggggctcaagggatcttcctgtcttcaacctccgtaagtgttggggattacaggtgtggggcttaccatgcctaaaccttgtttatttatggaaggatgggggtcttggctatgttggcacagggctgggccttcaaactcctggggcttctagttaattcct

SEQ ID NO: 266714 - DNA, 758 bp, Homo Sapiens
  misc_feature (596)..(615): n is a, c, g, or t
ggcatggctggtacatcaacagcatagaggcactgtcatgatttccaggcacagcttgcgtatatcccaaacatctcacacttgataatatacctgttccttagaaacataactgggtaaggaaggattatcttagttcagtgaagccattacatctacggtctcttcagcttttataccttgttcccattctcaagtgcagcaacatctcatcagtactggaaaagcagtctgcacagtgaaccagaagtccttggtcaagtacaagtaacttcagccaagattttcatgtatcttgggtttagtatattcctgtaaattatcagttacaaatttcaaggatgattcaggcacagcagcacatgtgcctgtagtcctagctactcaggagactgagagaaagaggattactagagcccaggagtttgaggccagcctgtgcaacatagcaagaccccatcttcataaataaacaaggttaggcatggtagcccacacctgtaatcccaacacttacggaggttgagacaggaagatcccttgagcccaggagttcgagactagcctaggcaacatggggagaacttgtctctacnnnnnnnnnnnnnnnnnnnnttagcagggcatggtggcatacacctgtgtttccagttactcaggaggccgagacagaagtatcacttgagcccggaaggtcaagactgcagtgagctatggtctgcactctagcctgggcaacagagcaagaccctgtctcc

SEQ ID NO: 266715 - DNA, 551 bp, Homo Sapiens
  misc_feature (148)..(148): n is a, c, g, or t
ccataaaccatttccatcagaagaccaggaaatgaggaccaggcaagctgcttttaaaattcaacagtgatttctcagctaagaaaacacaaattggatagagccagataatcttcgtatctaaccaggaaagatacattgtagactnaattaatccaagttttgatcaatcaggaaacgaatacacgaatgtacaggaaagttaactcagattacctgatgttggcctacttcctttggcaatattcactgaaatgtacactactgggtcacagcgtttattaaatgccatccaggtgatgtgcacttattttccatcctttgtaacattattccagaaaaatgggaaggttttccccatgcatattggcagtgatttaatttggttctataggtggcaggcatgcagtgagtatgttttaattttccattgtgcttttattccctgaatgctttccatgtgccggtcactgttgcgggcacaaggaattgaagggtgaaccagtcaagattcttgttctctttatgaaaattaattctaatcaggacag

SEQ ID NO: 266716 - DNA, 306 bp, Homo Sapiens
tccttgagtaatcttcaggtcctccgtgttctggagctgagatgggaatgagcccctacacagaatggagtcctctagcctaaagatatcagctgttccatggcagagccttgactggatggaggtggggagtgtggtgtgtaaagtctctggcctcataaaaggtggctgtgggtcgtcaggaatctgcgccatcttcctggggcttctgcgctgttgttggggaagggaccccagtcctgccttccaccccccaaccaggcctgagactgatcaaacaataaacacgtttcccactctgaaaaa

SEQ ID NO: 266717 - DNA, 723 bp, Homo Sapiens
  misc_feature (501)..(632): n is a, c, g, or t
ttactttcagaatcctcttaaacctcattattggtcattataaaattccagccacaattagaaggatttcccagagttagctttgtggttcttgaaaaagggctgtgtttctaacagttcccattaggtcaaagatttaaatataatgtacaagtgacttaatggagcccttcagaaaaataaagcatttatcattttcctgggaaggctttttacactgttaggttcaaaagtacggacttgccctaagaatattttgatcttttcaataagtgtttaaagatatcttatttactgttgttttgatgacatttgtcaaaatactaacatttggtatcttctttttaaaaagttttttttattggtgagacagggtctcagtctgtccacccaggttagaatgtgggtggtgttaccacaggctcactgcagcctcaacctcctttgctcaagtggtcctcctacctcagcctcccaagtagctaggactacaggcatgtnnnnnnnnnnnnnnnnnnnnnnnnnnnnnnnnnnnnnnnnnnnnnnnnnnnnnnnnnnnnnnnnnnnnnnnnnnnnnnnnnnnnnnnnnnnnnnnnnnnnnnnnnnnnnnnnnnnnnnnnnnnnnnnnnnnnactgcgcccagctacatttgatatctttgaggatgaggaaaaagtgtttatgctgtgtaaataaattaaattgagtcctgccttcaagtag

SEQ ID NO: 266718 - DNA, 743 bp, Homo Sapiens
  misc_feature (479)..(479): n is a, c, g, or t
  misc_feature (617)..(617): n is a, c, g, or t
tctgaggcagctactctccccgctccccgcctcagccctgtctcggctccagctccagcccacagccggagagcactgtctatgctaacactcattttgctaaatgcctcgtgggctgccagcatgatctgcctgccaggatctctgttccgtgacctgcgcccagccccacgccgtcctgtgtggccctcgtgccctgcgctcacacttacacatcccggggaggctgccttgccgtttggataaggaggctgacacacgctgggcaacgcgactcgtggtagtagatgtttcctggctcctggatgagggccctggccagtcagaacgcaccacttcccctttaagagagcacgcccagacgagattagggaaaggcagaaagaaaagcccggaacagtcagggttgtatcctgaatttggcagatgaacttgggtattcctgaaccacacacacaaggtgtggtccagaggccagncaggctcctcagaggagtatcagaagccaacgctgtgtgcgcagggctgggcctttccgcagccctggagctgctgtctgtctgacctgggtccccggtccccaggcagcctgaagacacctcaggccttcccactcncctcttcgctcagggtctgaccatcttgataggcagagtccacttcattacctagcactatgccttagagagagtagagaggtcattataatgattggaaaatacttttgtgggttgttgctcgtg

SEQ ID NO: 266719 - DNA, 327 bp, Homo Sapiens
cgcgtgcctgtagtcccaaagtgctgggattacaggcataagccaccgtgcccgaccctgtccttatcttataataaccagttcttctagaaccagacgatgctctagacttcatcatttccagctcctcctcactcaagatctgactccaaattaccctgggtctagaattcagccttcaaatatcttctgattttagactttgccttatacatttctctggttttagatcttaccaccctcaactccttctgattctagatcttatggttcccaaatctctctggttctagaactcagattttagggcttttgtttttccttttt

SEQ ID NO: 266720 - DNA, 546 bp, Homo Sapiens
  misc_feature (107)..(205): n is a, c, g, or t
  misc_feature (239)..(247): n is a, c, g, or t
  misc_feature (427)..(471): n is a, c, g, or t
  misc_feature (489)..(489): n is a, c, g, or t
catcagtcatatttaattactaagatattaaagaaaacttgagttttattctattggtaatattacattagggttttgtttttactttttgagacagttactgtcannnnnnnnnnnnnnnnnnnnnnnnnnnnnnnnnnnnnnnnnnnnnnnnnnnnnnnnnnnnnnnnnnnnnnnnnnnnnnnnnnnnnnnnnnnnnnnnnnngcatgggccaccatgcctggctaattaacaaaannnnnnnnngtagagacggggtctcaccatgctgcccaggctgacattagtcattcttaagcttctcagttaaattacattatgaaacactttgttttcagaccatgtaaaatacctttcaactgagctctgagttcatcagttaacttctctactctttttaagggagtaagaatagtagagataacnnnnnnnnnnnnnnnnnnnnnnnnnnnnnnnnnnnnnnnnnnnnngagatgggagttctcggntctgttcgcccgggtgggaatgcagttggcacgatcttcaggtcactggcaaccttt

SEQ ID NO: 266721 - DNA, 409 bp, Homo Sapiens
  misc_feature (107)..(205): n is a, c, g, or t
  misc_feature (225)..(225): n is a, c, g, or t
  misc_feature (239)..(247): n is a, c, g, or t
  misc_feature (332)..(332): n is a, c, g, or t
  misc_feature (359)..(359): n is a, c, g, or t
tcatcagtctatttaattactaagatattaaagaaaacttgagttttattctattggtaatattacattagggttttgtttttactttttgagacagttactgtcannnnnnnnnnnnnnnnnnnnnnnnnnnnnnnnnnnnnnnnnnnnnnnnnnnnnnnnnnnnnnnnnnnnnnnnnnnnnnnnnnnnnnnnnnnnnnnnnnngcatgggccaccatgctggnctaattaacaaaannnnnnnnngtagagacggggtctcaccatgctgcccaggctgacattagtcattcttaagcttctcagttaaattacattatgaaacactttnttttcagaccatgtgaaaatacctttncaactgagctctgagttccatcagtttaacttgtgtgactgtttttaaag

SEQ ID NO: 266722 - DNA, 434 bp, Homo Sapiens
  misc_feature (332)..(382): n is a, c, g, or t
ggtcagtactatgcagatgacgaagcagccctgtcccccgtctgactcccatggctgcttcaagggcagtgtggttatttgctgggcagtggcatggggcttgtgcatttcctactgtcacctacagagggtttaaaaaaaagacatgggcaggttaagtggaagggaacagtctcacaccactacctttattgcttcttggtacttgggttttcaggaaattcctatcagcagacatcaaaaacagagaatgaagggacgcagttggcatgtgcctgtggtcccagctacttgggaggctgaggtgggagcatcgcttgagcccaggaggnnnnnnnnnnnnnnnnnnnnnnnnnnnnnnnnnnnnnnnnnnnnnnnnnnngcgcaaccctgttgtaaaaataataattttttaaaaagattaaaacatcaca

SEQ ID NO: 266723 - DNA, 746 bp, Homo Sapiens
  misc_feature (413)..(443): n is a, c, g, or t
tataagtgccttgaggtcagggattggtgtctatttaccgctgtatctgcagcatcaagactgcttggcagatagtaggctctttcttgagtgaacaaattaaagaataaatgaacaggtacagatctggttgcctcactgggagatcccccaattattggttcctggacaccttttcttttgagccattcagtctctccagcttcacagctgggggttgggcctcatcctcagggttctggctgccaagcagggaaaagggacttggcagcttcctggccagtgtgtagactctcatgtaacctcctgttttctgccctgctccttgctgagtaattccgtgtgatctgcaaggatagaaagaatgatctttcaaagaacatggagagagattggcaataggggctggcagnnnnnnnnnnnnnnnnnnnnnnnnnnnnnnnttcacagccaaagctctactctttctgtttactgaagaaagcaagtgatccaatctcctgcgaatgttgttgattttaataaccaccttctctgcttcctccaacccggccctttgggctagactccagacagccatttcttccaattcaaggctgtccaaagatgccccttaaggagaaagaactggtaaattcttaaactgatggtaaattcctaaactggtggtaaatggatctatgtggcccagaccacactatttatatccccagtgagtattattaggtcgttatcttgacatttgg

SEQ ID NO: 266724 - DNA, 717 bp, Homo Sapiens
aggacagtgttccttctggttgtcaatgcagtcatgggactaatgaaacagaaaacaggtaccacccaaagttaaactccagtgagagaataaacaacacgccaaagttcagtaatgaagagccaaatcagagctggagacagggtgatagtagaaaccaaataatgaatggcagatgccaagggatatgggtccagttaaaggcaacccaggaagcaagcaagggcaaaggaggttgtgcattctttaggggagggaggcgtctgtggaaggcccttgcctgccaccttctccattctcagcagtgtccctcagaagaagcactgctggtgtcacaagggctgggatgctaacccctaaatctgacaactttggtgaaattgctactttgatatcagagaccatgccttccatgtcttgggtattccaacaatattgtccccacagtgcccttgtagagagtgacacctgggcaaagccctgattcaactaaaacacaaagcacagtatattctgataaatatggctggaatttttggttcttttgtacacttatgtatccaaaaagtttagacctctgcttatcacatagttggtgctcaataaatattttttgaatgaatacatgaatgcttaaaacctcattgcaggccattctccctgtggtcagaattgagtagtatttctaattaaccctcaacaaggtagcttatggct

SEQ ID NO: 266725 - DNA, 736 bp, Homo Sapiens
  misc_feature (714)..(714): n is a, c, g, or t
acagttgatgtgtttcttccaggatcaaatgaggtctggtatgactataagacatttgctcattgggaaggagggtgtactgtaaagatcccagtagccttggacactattccagtgtttcagcgaggtggaagtgtgataccaataaagacaactgtaggaaaatccacaggctggatgactgaatcctcctatggactccgggttgctctaagcactaagggttcttcagtgggtgagttatatcttgatgatggccattcattccaatacctccaccagaagcaatttttgcacaggaagttttcattctgttccagtgttctgatcaatagttctgctgaccagaggggtcattatcccagcaagtgtgtggtgggagaagatcttgggtcttagggcttcagggaaggagccatctttctgttgactacccactcatctgatggtaaagatcagcctgtggcttttacgtattgtgccaaaacatccatcctgagcctggagaagctctcactcaacattgccactgactgggaggtccgcatcatatgacaaagaactgcccctggtgatgtgagcagggacctgcctgcccctttcaacctttcccctcaccttttttgagatttttgctgcaatctgtttgccttccctgaatcaaaataatctttcattcgtcaccattatactaatgaacaatagatttcatgnttcaaaatttcagattttacat

SEQ ID NO: 266726 - DNA, 679 bp, Homo Sapiens
caaacaaacaaacctatacgaacaatggtaggaatgtcaaggaacccaggagtgaagatcggattagtcagatgctgtgagaggaggtggaaaaaaccagtgtagaatgggcaggcacctttgaaaaggctagaggaaaattttggaagggcattaaggaggagcatagcaaagaagtctagacctatgacttgggagctgttctgttatataaataggatattccagagatagccaaactgctcactgcaggaaataggggaaatagaggataatttggaagaacaccccactgttattatttgtggcagttatgttctataaagtcgctgtggacgtaattagtgaatactgagccattgctcctaggggaacaatacagagttagattcctgtgagcctctggttataacgattttgtcagctgtcaaccgatcaatacatagccttgttttgcatgtgtttctgtttaaagataccttgtttaatatacattgttgattcattaacattgacctcatggcgaagagcactgtatctcatgcctaaatgaagcttagccaatgcgtctcttcttcctaaggcacatcatggccttgttgtgattaagaacattagacgacactaaggcatgatgtttggggctcattttaaacagcaaaatcaccaagaaacccac

SEQ ID NO: 266727 - DNA, 827 bp, Homo Sapiens
cagagagcagaaaagaggaagagggaaaagagtgccactcccttcccttctgctttcatgaggcagcccccgccttgccatttcacccccacatatacatttcatcttgcacagcctttgccagagctcagatggccacacccagccagagagagggtggtaaatgtagtctttccagtggaacatccgtaacattgaataacatatgccatgttctagggaggcagagggactggctatttgaagatattttgcaggatatgtcataatacgtaacctattcctaggcaatagtacatgctttaaaacaaggcaattatgatagctttaatgaaaccacagattaaataattcccatattttataggagtgctcaggtattttgaattgagaaaatgatttgaaaaaaagtattgtgtactgatgccctagactagagagcctctatctgtcactgtccctgtataaattctcagctgtactcaggaagacctaagtggtgaataaatgccctcagttgtgggctggtacctgtggcaggtcccctgagttttctagcattggctattggattaatggtttgtcttttattgagcaatagtttgttgtgatttaagggtgccatgcttacattctcttatcatgtattccctgggaatctaatttgtaaataattacttgacagaaactgaactggctggaaaattctgagtatgcagaggcagaggcaggccctgggaggggacttcagctgaaaggctgagcacctgaatggtctgaccacaatttctcatctcagcagttagcagctaataaggtcccctgtt

SEQ ID NO: 266728 - DNA, 419 bp, Homo Sapiens
  misc_feature (26)..(26): n is a, c, g, or t
  misc_feature (87)..(87): n is a, c, g, or t
  misc_feature (384)..(384): n is a, c, g, or t
  misc_feature (399)..(399): n is a, c, g, or t
caaccccacctatccctaccttcccncctatataatagatggtacctggttcctggggcaccttaattccaaccaaatgggcccccngggacaacctaaatatccccacatgtaaaagaatccaagttagactcccctccctcgcacataaaaattaacctcaaaatggatccagagaccctaaaggtaggtggtaaaattataaatcacttagaaatagtaaatctttgtaatgtgggataagcaaagttttcacaaagtatgactgaaagcacaagcaacaaaagaaaaaataaattgtattccatcaagttaagaaacatttgggctgaaaagtatatcatcaagaatgtgaaaagacagtacatagaagacagaaaatanctgctcgtgccgaantactggccgcgcagggccaa

SEQ ID NO: 266729 - DNA, 548 bp, Homo Sapiens
  misc_feature (19)..(19): n is a, c, g, or t
  misc_feature (68)..(330): n is a, c, g, or t
  misc_feature (332)..(387): n is a, c, g, or t
gactttatagaaataattncaaatatattttttaaattaaatacaacgggccaggcgcaatggctcannnnnnnnnnnnnnnnnnnnnnnnnnnnnnnnnnnnnnnnnnnnnnnnnnnnnnnnnnnnnnnnnnnnnnnnnnnnnnnnnnnnnnnnnnnnnnnnnnnnnnnnnnnnnnnnnnnnnnnnnnnnnnnnnnnnnnnnnnnnnnnnnnnnnnnnnnnnnnnnnnnnnnnnnnnnnnnnnnnnnnnnnnnnnnnnnnnnnnnnnnnnnnnnnnnnnnnnnnnnnnnnnnnnnnnnnnnnnnnnnnnnnnnnnnnnnnnnnnnnnnncnnnnnnnnnnnnnnnnnnnnnnnnnnnnnnnnnnnnnnnnnnnnnnnnnnnnnnnnaaggcaaatgttatactgcccatgagtatatatgtattatggcccacaacactagaaaagagtacaaatacaagctgttttgacagcttaaatatatggcatcctcactgtaagaacttaaaaattaaagcatatattttaaatataaattatattaaaat

SEQ ID NO: 266730 - DNA, 494 bp, Homo Sapiens
cggcgtcttgctctgtcacttaagctgaagtgcagtggtgagattatagctcactctagcctcaaactcctgggctcaagcatcctcccacttcagcctccgcagtagcttggactacaggcacgcaccaccatgcccagataattttttattatttttgtagagacagggtcttgctatgttgcctaggcttaaagtttttttaaaattaattccatgtcatctcaaagaatattagaggttttgctactgtcatcaaaatgcatgtcatgcagccagctcacacagaagttgtgtttattgtttctcaattcctggaatagattcttaaaacttctggtttttattacccaccttaatagttgaaatagaaatatctgtaggttagcaacctacttcaacaccaagcagataaagtttcttgatgggtaggacttctaagaacattttcattaactccagaccttttcgttaatttagttaattaagcggcc

SEQ ID NO: 266731 - DNA, 428 bp, Homo Sapiens
  misc_feature (334)..(348): n is a, c, g, or t
  misc_feature (366)..(366): n is a, c, g, or t
  misc_feature (414)..(414): n is a, c, g, or t
ttatgttgattttattcctttgagaactgattacccctcaggagtgatcaagatgggcttgtgtggggtggggccaaagggagaatggcaggcaaccattcagagaaagtggttttaccatctcgaggtgagtaatgtttaaagttttagctgctgtgaagtgggatgctataaaattcgggggagttttccttctacccggtttcattccccgctcccctagccccatgcaactgcatttcccctcttctgtgctgagggaaagaaaagctgcctctcctttcttggttttgtagcatggcttccagtacctgttagtcatctccttgctccnnnnnnnnnnnnnnngagacagagtcttgctcngttgccaggttgcattccagacggggtgacaaaggggagaccctgttnggaaaagggaaaat

SEQ ID NO: 266732 - DNA, 1084 bp, Homo Sapiens
  misc_feature (725)..(725): n is a, c, g, or t
ttaatcaaatccagatttctgcctgtagctcttcctctcctatcctaccgctccaaatattaactttttgtggcttcggcctcaaatatggaatgtgtcctgaagctttctaaaacttcacacaggcagaaacttgtaatgaggaagaaacaagatctattcagtccagaaaggaacaataccagatgaggcatgagggaggtatgagaaatatccaacgggattagcgtcaaatcctcgggagaccttggcctttggactagggtcaagtctgcccacaaaaatagggaaattgctctggggcccagtgaggcaggtatgggagagccacagtctcacacccacgcaagggcaagggcccggcctcattcaacgtgtcaacatggggatggagctgctaagtgaggcgctattgccacagcaagtgtgggcgatgacttcctttctgccttccttccctcactcattctcctctctgactctggaggtctggtctgcagtcttgacggctcccaggccacagaaagtccaccagagaacctagaaggaagcaccaaggtggcagaactcagaagggttttctgagctggaagagcccttgaagactgtctggtcagtgggtccccactgtcctcgaaggtccagtaccgcacctgtgaggaagcgttttctggcttgccctcatttccgttagatggagttcaaagggtaagtccgtgtgagcnagccaagcccaggccccagcagttctgtgagcatgactcatcaatcaggccattagccaccacagaatgggccattttcacctggtattctccttggagagcaaataacaattccttcaagctaaaaacctccccaagaggctagacaggcaccatcccaggcctgagaaaagggaggggggcagtgactgaaatcctgcacagaaattcgtgagattagtcagccaagagactccgaagcccagacacccttcccccagaaatcgtgaatgaaatgcattcctgaaagtaatatgcaaataactcagacatgtaaatcacatagaattacgaataaagtgctccacagccagggtatt

SEQ ID NO: 266733 - DNA, 472 bp, Homo Sapiens
agaggtttaattggctcacagtactgcaggctatacaggaagcatgaggccagcatctgctcatggtgagggcctcgggaagcttacagtcatgcaaaaggcaaaggggaagcaggtgcatcacatagagcaggagaaagagagagaggtgggaggtaccatactcttttaaacaatcagatttcctgtgaagagaagaactcactcattgccatggaaaggacaccatgccatttattgagggagctgcccttgttaatccacacatttcccaccaggccccacttccaaaattggggatcacatttcaacatgaaatttggagggcacaaatatccaaaccatatcattccccttattttgaaatattgttcagaattccagttcagtaatatggtttcttattccctaagtcaactgccagcccttgaggtccattatgaaagaaaacttcaaagggaacgctccaaag

SEQ ID NO: 266734 - DNA, 871 bp, Homo Sapiens
  misc_feature (740)..(804): n is a, c, g, or t
gctttcctgagtcttagaccagatatggccagttgcgcaggtttctgccaactgtgaagtatcctcctggagcagtgacacaatcttggcggaacattgctacccccgctgccccctccacagttcctgaatggtgctaaggatctgcagcagttggcaacgagctggggctgggggcggcctccatgtccactgagatcataggacactccaatggggatgggacctttcccctcctccatcagaggtgctctgaccctaggttacacgggaaagtgccccacatgcaagtctccctgagggttctgcccctaaaggcagactgcctcatgcccgctagctgtgaggttcattgctaccctcggccctactagccctctcttcccccttgtgcagcggaccacttgcccagtttgctgtggtgctagccttccccatcatccaccaggtgatttctgggtcccagggaaagaaagagagagctgatgcaggtttctacagtgaggaacaggcgtttcccaggccccacacccagatttctctatctttgctgtgttttatggcctgggactgagtccacacggatagatttttccttgtaaccttgagacgagaattccaaggagtgtcaccatcagaggcttctcttcattgtgtcaaagaagcccctagctgctctcgtggcctccttcccccactccctatcccttcacctgtgaaatgcctttgctttgcatatnnnnnnnnnnnnnnnnnnnnnnnnnnnnnnnnnnnnnnnnnnnnnnnnnnnnnnnnnnnnnnnnnctaatgctctgtctcttggtcactgaagcatccaaataaagaatttccctcatgggccagactacaa

SEQ ID NO: 266735 - DNA, 366 bp, Homo Sapiens
cctgaccccttttccaatttcccgagcctattaaaaagtgcctttcctttcccctttaactatccataaatggtttttccctcccccttaacctaagtaaagatttcctggaagaatgttttgacccagattgaaacccagcttctgtccctatcctacctagtcattcatttcttgatttctcgtgcatttcctaaacatagataagtttctaatggtgaagaaagtgaaacagaaaggaaggaaagaagcaaaagctgggttgggtcaccatattgagcgaaggatatgcttgtggggaatcctacactgtgatattggagtaaacagttacattatggggtgagaccaggtgagatggcttat

SEQ ID NO: 266736 - DNA, 499 bp, Homo Sapiens
  misc_feature (11)..(11): n is a, c, g, or t
  misc_feature (27)..(27): n is a, c, g, or t
  misc_feature (52)..(52): n is a, c, g, or t
  misc_feature (64)..(64): n is a, c, g, or t
  misc_feature (93)..(93): n is a, c, g, or t
  misc_feature (118)..(118): n is a, c, g, or t
ccgttgtgggnttccccccacaagccntatcccttggcctccaatatggtgncccccaaccccngctttgcctcctttcccttcccttcctgnttccactttccttcacccatttggnaaacttatcctatgtttaagaaatgccacgagaaatccaagaaatgaatggactagtagataggacagaagctggtttcaatctggtcaaaacattccttcccagaaatctttacttagttaagggaagaaaaaccatttatgatagttaaaggaaaagaaagcacttataatagctcagaaaatgaaaaaggatcagacagaattccacttgacaaatgctcacattctgaaaggcactaacttagggaagggagggagctttcctttactataacatcaatgattttttaagacatatttttacttctcagacagtgaagaacaatttaaaatgccagactccttaaacttcagcagcccataaaaatcgtttgcaaca

SEQ ID NO: 266737 - DNA, 889 bp, Homo Sapiens
  misc_feature (729)..(742): n is a, c, g, or t
  misc_feature (879)..(879): n is a, c, g, or t
aatgcagccatccgtatcgttgttaattactgactggcctcagtgcatgggtgtgaggagggggcagaagggacaagcgcccccagcgtggttgtggcagtggccttgctgctttatgtgcattcgctttgctccctggtctgtctgagctcgcccttgaagctggatcatggtattcctctgagggcacacgatttaggaatcctcaccagaaaagtaaacacacaagctgtttttttaagttgttgttgtctttggggaggcagaggttgggtgaagaggaactgtccccccaaaggagtcccgatccagggtggaaaacgggtccaggcccagctgcccaggaaggaagggatcggagcagcaattcaccaacagtccaattcaaattagacctcacaaagtaaactactctgattagggaagaattgctcctccaggagtctgtcctcacagtttgctggctgcctgaggagactgtgctatggaaatgccctacaggcttacccatcacacacaaaggctcccagaggcccccaggtgggcctggctgctggcactttggctcagcttgtgactctgagctcccaaggccagggccagcctgcctgagcagttataagtggcaacacaccctctgggtggggacaggcagcaaaaggaggaagggagtgaggatttagcaatagttgtatacatcgttagcacaggacagccctgtcatgggcnnnnnnnnnnnnnngtcctatgagggctcttttctctctggcagtcatgagaggtaggtacttggggggtaatactgcatcactgtgagactggggcaacagtgtgctgatgaaaataactccagttactcgtgccgaaaactggggcttntagggccaaa

SEQ ID NO: 266738 - DNA, 770 bp, Homo Sapiens
  misc_feature (26)..(26): n is a, c, g, or t
  misc_feature (248)..(248): n is a, c, g, or t
tagggtcagaaaatataaggctcagnaaggatccagaataatttcctctaaacccttcattcacagagtaaataaaatgaagctaccaatgtcacaggtagctaaagttagggcttggtctagaaatctcctccttatttaaattttctttattctccactgaacaaagagaaattgggaagaatgcaagagatctccccacttcagacctacagtccacctcgccacagccagtcttcaaaagaggncaggtgggagagccacgtgatggcattttcagctggtgcaaaggatcttccctgccctttcagaatgccccttcttcatgcctgcctccctggctcacacagaataaatccactcctttgagcaaagacactctatcctgagaaggagtcatctgcaaaattgtatgcttttataaaggccaggccaccatcaaacattaacatgccaatataggtccaatcaagcaaagctgatttccaagaataggaagctggactaacgcagatgacttgaggctccacacagggcttgcacacaactggagtctacagatatcatttggcttgaaaagaattgaatcatattgatttctagacaaggatcctaaattgtattgcctctagaccttcagctagtacctaaagcaaaatcaattgctctagggaaaaacaagtttgtaaggacaataataacatgcaagtaaatacgtttttactaaggaatgggagggtctctcacaccaaaaagaaaatggtttacta

SEQ ID NO: 266739 - DNA, 600 bp, Homo Sapiens
  misc_feature (277)..(306): n is a, c, g, or t
gtcagtgagttggggaaggcagatccaccctaaatctgctgggcacaatctaatcagcttccagcaaatataaagcaggtagaaaaacgtgaaaaagagagacaggcctagcctcccactttacatgtttctcccgtgctggacgcttcctgcctttgaacgtcggacttcaagttcttcagttttgggacttggactggctctccttgatcctcagcttgcagaaagcctattgtggaaccttgtgatcatgtaagttaatacttaataaactccnnnnnnnnnnnnnnnnnnnnnnnnnnnnnncctactacttctgcccctctaagagaaccctaatacaaagtgttgttggaaatttattactaaaaataatgaaatctgatctcagactttcagaaaaaacataattggtcttgtgattcaggtaaataattttaacttctcaaaggattcagtagttggggtgaaatattttcagtgaatttctacttgaaacaagagtaaaggtagacctggcacaatggctcatgtctgtaatcctagtaacttgggaggcccagcgggggacgatcatttgaggctaggcgtttgagacca

SEQ ID NO: 266740 - DNA, 747 bp, Homo Sapiens
tgattgggcaaacctcaggcatgtgttcattctgtagcttccagaacatgcgaggagagagcatctggctcctttgtctcgaggaggagggggcaggactctgcagaaactcactcgataaaagattttcccaaaaggaagggtgttcagatgacaaaagtccactacaccactttccttggctatctgatgcacccccatcttcccatgcgcgcacctcagaaatcaggctcccacctgacataacacaaccatgcctcacaaaaagacagtggtttatcccttccctaggagaaaagagaggcaatgccaagctgcttcatcaactgttaatacttcttccagcccgcaacccaggatatctgcaggtgtctctccctctggtttggtcatggctctctctgttctagaatgtatgggttaaagtcggctgccacaccatgccctcggcagtggtggtcccaaggacccctgagggtcctcaaggtccttcctttcccaaccccacgtggttttcttcagtcaggataccatactgcaacagaccgaaggcggaagcagctatgaggatgcagcagccttctgttaagccaggctttaaggatctgcaaaaatgtaaaacgatgccactcctactgatgaaatatattgttttggaaaatataggtttaaaaatttttttaaggtaacatgtaatggatgtatagtcttcaaatggatgaataaatgtttttcagagttattgga

SEQ ID NO: 266741 - DNA, 678 bp, Homo Sapiens
  misc_feature (133)..(162): n is a, c, g, or t
gatcaccaataagacattaatcagctttatcaatactgtcctccctctaactctcagcattagatctaattagggtgaactgagtatgtttagcggtttagtggtttccactttatgcactttctttactttnnnnnnnnnnnnnnnnnnnnnnnnnnnnnntacttttctgtaaaaatttctcttttaatggaaacacaggtaataacatcctaagattttcctctgatttttagttagccagcctccaaacccagggtttatcttttattccgccttccccattccctatagtcaaccagagtagtcattaagagcaaagaactagaactaaattagaactccaactacattgcctggtttggaatggggatatacccacttactaactctatccattggaaagttgcccctcagttttcctcatcctgcaaaatgggggtagtaatagcacctacttcatatagctattaggaagattaaatgagttaaggtttataatgcactttaaaaatggctagtaacacagtataagtagaaaaacttttcagtagtatatacatatgttttagtaatgtatattactgaaataacttcataactgatcagcctatctctttttctccctattttaatccttactactcaaaatgtgatcctagcaagacaggcatcatc

SEQ ID NO: 266742 - DNA, 608 bp, Homo Sapiens
  misc_feature (500)..(513): n is a, c, g, or t
gcatggataaaaattggatgggaactggctaaagcttcaggcatggataaaaactggatggcaactggctaaagcctcaggcatggataggcatccttaaggtagggaggtcatcagcaagggagtggctactgcccaagggaagccctcagcacatagccccaggaatgattctgaccatgtgcttgctcttatggtctgtagatgctgaacccacccccaagggcctcctgagcattcaagaaatggtcgtcactaaaaatgctccttcatttttaatctgtttgattccttttcagatcttgactcttccaacctagggccttcacttgatttctctcttttcctttcaatccagagggagactttctagcctgggaggtgggtttggatgggtaggattggaggaggaactttgctgtcattattttatttaatcatttcatctgctagaagacttcttgcttttcccgagtaccttaaaagacagaaaaacttannnnnnnnnnnnnnctgacccatacttgtctttcatttgaagcaataaacacaaaatggcttagctacttgcagggcagatggtaaatacacagtaaagaaagaagcag

SEQ ID NO: 266743 - DNA, 612 bp, Homo Sapiens
tcctgtccctcatatcttcatgactgcaacatttactgtacttgattgcaaagtcttacagatgtatgactgattaaccgtactatgtttatgcaatcatccccttattttttagttatcttaattcttccctgtatgtactgctacttctgtgagtgtccttggaacaatttggctggtcatgtgcccagatgacatcaagtggacaagtggatcaagggcagttttctaaaaatgtgtgtgtatgtagagggggtgagtcaggagcctgttagcatgagctctgtgttggcactgagatcctgagtgccagttctctgctgtccttgaaactgctcctgacacagggcattttcttctttggcctaaacctgtcttttttggcataaaccctgtgcaaagctcggtccataatagtttataaataaacctggttattaattgtttatacccatatttttttgttttggttctgattttgtctaaagaaaggggatcttggctccctttaatgtccatatccaatcatcttccattggcagtacctaattttgaagaaggcaacactgactgagggaattaggaacagttttagttgatagttatgtgctt

SEQ ID NO: 266744 - DNA, 478 bp, Homo Sapiens
  misc_feature (42)..(42): n is a, c, g, or t
aaaaaaaatagggggtataaaccaattaaataccccgggttnatttaaaaaactaattagggacccgaactttgccacagggtttatgcccaaaaaagacaggtttaggcccaaagaaagaaaatgcccctgtgtcaggagcagttttcaaggacagcagagaactggcactcaggatctcagtgcccaacacagagctcatgctaacaggctcctgactcaccccctctacatacacacacatttttagaaaactgcccttgatccacttgtccacttgatgtcatctgggcacatgaccagccaaattgttccaaggacactcacagaagtagcagtacatacagggaagaattaagataactaaaaaataaggggatgattgcataaacatagtacggttaatcagtcatacatctgtaagactttgcaatcaagtacagtaaatgttgcagtcatgaagatatgagggacaggt

SEQ ID NO: 266745 - DNA, 128 bp, Homo Sapiens
gttcttttgcagctgataagttatttcccattagtggcagcaataactggcaatttgatttttatgatctgaccatttgatttctgtagaagaatttgtggctaataaagatctattctctgctgaga

SEQ ID NO: 266746 - DNA, 515 bp, Homo Sapiens
agctggaaggaatttagaagttatccagtccctatcatttcagagagaaaatgcacctaggaaaaaatgactagctgctaaaaacctcagcctcccaactaaagctgggtttggtttcatttttgtctttataggtgcaggttaagagcctgttaggtccaaaatggtgccccagaaattcaagttaagtcaagcccatgttggaagaccaccaggtaaaccaccggccatcccaggaccatagcaggcttatcttttcagtctgtggtggcccctagtacaaatctaaccagccagcccattctgaaggagacctagacgagaaactttctacttaaggggagggcatgagatggatttttcagatcattcacattctctgactaacctttatcctctggtcacagcctggaccccaaaattggccagaaccagaaaggccgtttggcatgaagacaacatacagcatacacacacacgaaaggtttaacagagagttcagtaattataaaaat

SEQ ID NO: 266747 - DNA, 462 bp, Homo Sapiens
  misc_feature (22)..(22): n is a, c, g, or t
ggtcctggcccaaatttggggncccccaggctgtgacccaagaggataaaaggttaagtcaaaagaatgtgaaatggatctgaaaaaatcccacctcaatgcccctcccccttaaagtagaaagtttcctcgtcctaggtctcccttcaagaatgggctggctggttaagatttgtacctaggggccacccacagactgaaaagataagcctgctatggtccctgggatggccggtggtttaccctggtggtcttcccaacatgggcttgacttaacttgaatttctggggcaccattttggacctaacaggctcttaacctgcacctataaagacaaaaatgaaaccaaacccagctttagttgggaggctgaggtttttagcagctagtcattttttcctaggtgcattttctctctgaaatgatagggactggataacttctaaattccttccagctaa

SEQ ID NO: 266748 - DNA, 584 bp, Homo Sapiens
  misc_feature (290)..(374): n is a, c, g, or t
cctaataatatttctgaatatggaagtaatgataccattccaactataaccagacattttattcccagtgggaaaatgtgtacatgacgtttcaaatcggtgggggcagaaacacagctcccaccatgctcacacactgcctcacacagcaaatcgggacctgggcctggtagacaggatgagaagatttttgagcctgagatcctccttttctacactttcaacatgtcctgaattgatagaaaaatgggactattttggctctgtatccactcgtttcgtcatttatnnnnnnnnnnnnnnnnnnnnnnnnnnnnnnnnnnnnnnnnnnnnnnnnnnnnnnnnnnnnnnnnnnnnnnnnnnnnnnnnnnnnnaacaatattctccataccaacttaaagagatttatgtgcaagtagggaagggaattagggatgctttgttttagagatgcttgcaagccattactaagttaagagttcagattcatggcctgcctcttaattttcctaaataacccctagatcagagtgcctgatttcaagtctggtaatgaacataaggattatccaaaattcatgcaa

SEQ ID NO: 266749 - DNA, 328 bp, Homo Sapiens
  misc_feature (41)..(41): n is a, c, g, or t
ggaaggaagagggggaagaaagaaaaagaaaaaataaatgnacgaaacgaagtggaatacagagcccaaaatagtccccatttttcctatcaattcaggacatgttgaaagtgtagaaaaggaggatctcaggctcaaaaatcttctcatcctgtctacccaggccccaggtcccgatttgctgtgtgaggcagtgtgtgagcatggtgggagctgtgtttctgcccccaccgatttgaaactcatgtacacattttcccactgggaataaaatgtctggttatagttggaatggtatcattacttccatattcagaaatattattag

SEQ ID NO: 266750 - DNA, 703 bp, Homo Sapiens
gcaatgctgtaaagaggttagtgtgttgagggtagatgcatggccactggatttggcaactagcaagtccttgcaatggcatggtttaggatggggctaaaggtgaacaagggataagacaggcagtatgggcagatgattccttcaaaaacctgtttctaaaggggagaagagggtggtagctagaagactgaagggatccagggagtgaaaaggttttgttcctaatgtttttgttttaaatgagaagttcaagcaagtgtctataaggcagagagcgtgcagaggcccatctgaagacacaggacacaggaggaggactccttaaagactcaggaagggaatgggattcaaaacactcaggtgaagggtatgagcttatggaggaggaaagcccagtgctgttgagatagaagaaaggtggatgctggcaaatgtgaaagcaagtaggtagcacgaaaagttgaggggacctcgtacccaatgtcctctgttttcatgatgaacctaacctggaagagggagaagtgagggaggtgacacacgggatcgggctccagggatgtggtacatgaggactagaagagttgaaactgatatttaaaaatatttaattatccttatctcatcactatacattatttgtactgaaacatcattatgtaccccataaatatgtacaattaaatgtccatttaagaaa

SEQ ID NO: 266751 - DNA, 551 bp, Homo Sapiens
cacatttgggggaatgagtaatctttaaaagtgtaaaagggaccaaaaagtgtgagaatgtttgatgtagagaaactccaagctcattccctggactttggctatagatgctttcttcagggatgggtcttctgggcctgtgtcctgcaggatgcccagtaggaagcacagcctctttgatcttatgggggtgggctcatttgctgttttggagctcaggtgcaaagccgagttacttgatattccctggtcatggcaaagcctctctccacttttcttcccttctattgtcacttccattctttttccatagtccatagaaatcatttttacgtgacagtgatgagctgaccagaagctatagaagctatagtacttcctatatcctaatgggttttaaaaacactggctggggcatactcaccctttctgaacaaaggctgctaggtgaccctgctgttgccgctctgtatattcacttggttagcccacagattggtttggacctaattccctttccttctttaactccccaaagggcttttctattt

SEQ ID NO: 266752 - DNA, 488 bp, Homo Sapiens
  misc_feature (82)..(82): n is a, c, g, or t
  misc_feature (91)..(91): n is a, c, g, or t
  misc_feature (186)..(186): n is a, c, g, or t
  misc_feature (464)..(464): n is a, c, g, or t
ctaaacccccggaactgggcctaaaaagcctccctcaagggggggccctccgggccctgtgcccctccaggaagccccagtnggaaagcancagccccctttgaaacttatgggggtgggccccatttgctgttttggaagcctcaggtgcaaagccgagttacttggatattccccgggtcaatngcaaagccctctctcccacttttccttcccttcctattgtcacttcccattctttttccatagtccatagaaatcatttttacgtgacagtgatgagctgaccagaagctatagaagctatagtacttcctatatcctaatgggttttaaaaacactggctggggcatactcaccctttctgaacaaaggctgctaggtgaccctgctgttgccgctctgtatattcacttggttagcccacagattggtttggacctaattccctttccttctttanactccaaagggcttttctatttaa

SEQ ID NO: 266753 - DNA, 568 bp, Homo Sapiens
catgagcttcaataccctgagaatttacagattatttattgcttggaagagagtattttcttctaccaatatcctaccattctccctccactattagttgaccttttactatgcactaagcatagtaataagccctttacatacattatccattatctttttttactcctataaaagcctctgagggaagtcctattatcatcaccattttacagatgagggaatattctaccaataatatagatcagacgcctaaatttaaaaattatatctacggacatggtaggagttagttttaagttatctctaagcactcaaatagaaaaggacacaaaaaaattagcctctaccccaagtccaaagtggatatattccatttttacaactttcaaaactttaaccttagcatgcaacaatattcatatactagtcaagctaaagaaaaactactagttaataatgctttatcttatttagttactgtagtttataatttaaaaagcaggttgaaggtttagagcatcccctttgggttcagacagtatggaattgaacctacacaatacca

SEQ ID NO: 266754 - DNA, 680 bp, Homo Sapiens
tatggcttaaaagtcacttggttagactcaaacattgttgcaacatgctatatgttattcttaactaacattatacaaaatgcacaataaaggtagataatgaggatcttacacgttatttgtacatttattgaatacctatttataatcacgcatgatttctccgcaactgcattttctccagttaaaaaagaaacaaaaacaatttttttaaacccttgcaagagcaaagaaacaaactcaaactagctcttcaatataactgatttagactctttccatgttacaggtatcttgcctgactccaattcatgttacaattatcactgcaaacatcagcatcactttttgtgggactctcttatttatcatcccctgctttaagaatacactgtgttccggttggtattctcgggccccacaactcatagtattccttctggtgttaattgcttgttgatttgccttgttctaaatgcccctatcatggtcttttccaccctaagtagctaaatatattcaacgctgtcaaccattcctcgattcactttatttccctgaaaaaattttttatgtcttcttgcaaaaagaaatcttgtagtatagtagaattaaaccatgctgcatttataaatatttgctctagtgtattgatggctctcttaaaagctgccattcag

SEQ ID NO: 266755 - DNA, 554 bp, Homo Sapiens
  misc_feature (65)..(139): n is a, c, g, or t
ataagaataagaataataaagtaggacagtccaaagtagactctaaggaaacaaggaccccgggnnnnnnnnnnnnnnnnnnnnnnnnnnnnnnnnnnnnnnnnnnnnnnnnnnnnnnnnnnnnnnnnnnnnnnnnnnncctcctctcctggctatttatttgtttggtatgaatagatgttttaaataatatgaaccggaccttcaagagccttaaatagtttgtttcttgggataatttattatgatcatgtgaactgtactcacgggggaaagattattttgtgaggccaagcaacctgctcagagtctatttttctacatgtccctcgtcccggctgtcagaaagcaaacctctgtccccgccatccctcccttccatctcctgcttctcagcaagtgcaaactcaaacgtgcttcatgggggtccacaaattatatttttatacacagaattgtaaattagattttttgagagatcaatacttaactgaattacatttcatttttgaaatagtgtaaaatatgaaaatatattattttaatttaactag

SEQ ID NO: 266756 - DNA, 729 bp, Homo Sapiens
  misc_feature (84)..(84): n is a, c, g, or t
ccgaaggagatcagcaccttcttgccatgtgccttgactttggggttgcccattattgcacagtcagagcccagatatccaaanctttcaaagtacctctaggtccatgggtagacaaccaggagactgtgggatagtcataatcacagagcaggtgcaaagtcagactatgtaagacaacggggctaatccctctttcagaagcactttctgcctttctgcaccttgtcccggcttccagtacctacctgcccagaatctcacctccagccttctcaccttaaccttgcttcacaggctggtggcagcagccttcttgtcagcagtgaaaatgcactacagtgtcaagatctgggagttaccctggtgatcacagatgagccagaagcatgcctgcattgctgcttcatgtgtggctttttacttctcctctggcccccagccctttgcctctcccagtgaaatgaatctattgaccagccctttgcctccctcagtgaaatgaatctattggtcaagggtgggttgtgactccaggggtggggtttgggcaaggaagttttgcaagatggacattcgagtttctgatagaatccaggtggccttctcaggggaactttgctgttcaggcttaatttgaaactttacttccttcccctccattttcctacactacccccaccatccagtgtgcagtttatttctcaaggacttcgccagcagccgctc

SEQ ID NO: 266757 - DNA, 399 bp, Homo Sapiens
gatgaataacaggataacacgttgttacattgtcacaactcctgatccaggaattgatggctaagatattcgtaattcttatccttttcagttgtaacttattcctatttgtcagcattcaggttattagcggctgctggcgaagtccttgagaaataaactgcacactggatggtgggggtagtgtaggaaaatggaggggaaggaagtaaagtttcaaattaagcctgaacagcaaagttcccctgagaaggccacctgggattctatcagaaactcgaatgtccatcttgccaaaacttccttgcccaaaccccacccctgggagttcacaacccacccttggaccaatagattcatttttcactgagggaagggcaaaggggcttggtccattag

SEQ ID NO: 266758 - DNA, 541 bp, Homo Sapiens
  misc_feature (392)..(392): n is a, c, g, or t
  misc_feature (401)..(401): n is a, c, g, or t
  misc_feature (407)..(407): n is a, c, g, or t
  misc_feature (499)..(499): n is a, c, g, or t
  misc_feature (525)..(525): n is a, c, g, or t
aaaatactgtaaatcttatagccaaatcaatttcttcatttaatcccttgctgtaataattgttttctttgcttcttcccccctagtggtgtggacatgcctgcaatcctgctgaaactcggatttaaagagtccctggtacagtcaaaaatggcagcaggcacaagtaccttcgtggtggcctatgcaatccacaagctgtttgcgccagtgagaatcagcattacgctagtctctgtgcccttgattgtcagatattttcgaaaagtgggattttttaaacctccagctggcaaaaccttaatggaactcttcagtcgtacacactgaaaacctatttcttctaaattacatgatttgggattggttttagggttttagggttgtagggnttcttttgnagaggnagggggctaattgctatgttctcatggataaactttgccagcaaaaatcaggcttttgaacaattttaatctttttgcctcataaattttgngaatgctattcattatagggcttgcntatataatctaaaatg

SEQ ID NO: 266759 - DNA, 737 bp, Homo Sapiens
gagttaaggtatctgagaaagcagttctccccccagattaagttctcaaaaaccctctcagtaagcaatgaagaaaaacagtgctaggtggagagtttcttttgtttagttaaatctgggaggtctgagtgttcctggggtcctcgtcgggatgtgccatgggtcgagaatcctttgaatgtgagtattcactattagaaggctctgtagggtcaatcaaattttcataatcactgtcgtctgaatcctcaccactgtctccagctgctctttggggaggaggaaggtcagccccacttccaggatacttcagtccggcactggtggaagccataattggaagagccccacagcttgaggtcgaggcataaagacactcctttccatgcgagagtggctcaaagtactttcttgattgtttgggtgaaaatcagagtaagggggaggaggatccgaggcctctgcatctccaagtgtacttctgccttcagctgcaaacccagaggacggcatccgaggactgaacgctgggtccaagctttcagacggcatctgtctgcttaacactgcctgctgcaatcttctttcttgttccttttcatttttcctctgagtgatttgtcttcttaatttgttcacttctgcctgacaagattcaacaactcgctcactcttttcaacatctgcacacactgcctgaactttctcctgaagtgcattataaacctgataaatcg

SEQ ID NO: 266760 - DNA, 462 bp, Homo Sapiens
ctttgccctgggtaagctgctgtagggtcagaagtaaccctttctgtgtcagttgagaatgagcctgtgtggtagctgatgtcagaggacaaagctctctgcaagggctggacacagagctgcagagtcctgaacatccctcctttcaggctgcagaagggagaggcaatgaagacagctgctccggaagcagcatcagggctcttggaggggactggtggggactcaggctgggtgcagcctccaaacagagaacggaacttaggtgtgtctctacagctaggcccagcctagcccagcccagaacaaacacccttcagagcctaaccaaagaacataagctgcaaaatgtgcacccatattttaagctgctttttcaggggataaatagtgtttggggacattgaaatggatgttctcaggttgtatttatttcggacaaataaactagagaattgtaaa

SEQ ID NO: 266761 - DNA, 591 bp, Homo Sapiens
  misc_feature (95)..(95): n is a, c, g, or t
  misc_feature (97)..(134): n is a, c, g, or t
  misc_feature (521)..(521): n is a, c, g, or t
  misc_feature (524)..(524): n is a, c, g, or t
tctgttgggagagagagagccaggggtgatggtctggctttcagacctgagatcagacaggcagatagctgaactcccaggcagttcgttggttngnnnnnnnnnnnnnnnnnnnnnnnnnnnnnnnnnnnnnnctgaatctcatttcaaagagagcagattgactccacacctaatgcacatcctcagtttcacaaagcagctaagagcgaagtcaggtttcatagtccaaatgatgctattgcttggagtgtaattgtgcaccagccattagcccacatttcttggtagagcctcggtgcccttggattatgaaccttggcacacagtggaatccgcaacaatttgttttatcagttcctgtccctttgagggagtgacatttcttcccaaggtctcagctcctttaatcctataaaatgggaataataagaattcactggacaaatattcagtgtgcctgttgggagtgttgggcatgtgcagtccatctctggggctagcatggaaggcgtacattnaanagatactcatgctggctgcagtgctcgtgcctgtaatcccaacaccctgagaggctgaggtaggtgg

SEQ ID NO: 266762 - DNA, 784 bp, Homo Sapiens
ggctctccaaagtgtcatgttcagcaccaaaagggaataggcacagggtgaccccagaagttcatttgtgacacttaaatctccagatatttatcccacgtgggtctgatgcgggctcagcactaaattaactgtatgtggaaagtgtcaattgcagagccttctgtatcgatgaggcttccgccacttgtccatgcttagcccccttgcctcttccttgggagcatgctttctattcctatgtgaaacagcctgacataagtgaaaggaattgggctcaagcaaacatgagatgtgggttcatatcttggccaccactcctgatagctgtgtgatcatggcaaacctcgttttcatcgtctgtcaggtggagatgaagagaaatggtgcatgtaaagtgctcagcatctgtgcttagcaggccatagtctccctgcctcctttttcttgagtaagcctttagaactttctgactcctctagagaaggcagagaaacgaatatattttgggtgccatttggagtctgggtcttttgttaaaattgtcctgtattatgttgaaaagtgtcggttacccccaggctctgggggcatctgtgatcatagaatactgccatgcttattttgcctttctatgttgagattaattcactgacgcctcattttccacgtgcatctgtcatagtctgggtaccagattgtatttagagaatggctcttgccactgttatgtacacacagatcgtgtgtgtaaacaagcaaattaaagtaaactgagataatg

SEQ ID NO: 266763 - DNA, 708 bp, Homo Sapiens
  misc_feature (688)..(688): n is a, c, g, or t
atggggcagcctaacctacagaggctattgtgtggaagggtaaaatggggaaactgaggcttctagtccctgcattaggggtccctcactcactgcccaacctctccccactcagaggagctgccaggagggcccctgcttcctgcctctgccccagctctttgtgctttttgatctgctggtttgaccagatgcctggtttctttccctcccctgctcccctccctgtgaggggacaggtagggagcatgggagggcagctgtgctattcccgcctgtgctgtagtgggtggagcctctcactccagaggaggcctctgcttcttgaggagggaaggagatgggccttgtcggatgccctcagatctcccctagactgtgggactcttaatccccaggcctggcctagggctcctccatccccaggctcaacacagaaaccagattaggggaggaactgtgggaggcagggttgtgtgcgcatccgctgaaattacccttggcttatatttgaggacagtatagtgataccccccgccccatggcacatgcacacacatatgtaagtatacatacacattcacacacagtcctgcggagctgcctcagaacttaatctattaataaataagaatcagaaagctaatttcataaaattcaggcttcatatttgcagcccaaattgagnctcgtgccgaattacttggg

SEQ ID NO: 266764 - DNA, 857 bp, Homo Sapiens
ccttgataattcctctctccctcccaccagcaccataaacagtccataagagttaaaggaaacgaagataaatgcaggaaaagtttacagttgaggggaaatgaactgtacttcacatgcttcattatttagcatatttttttgtgcgattataaaattaataaagaactcagaactttatggatactatccctattaacactcaccccatagtcaagacagtatgagaggcccaaggctttattcagtacagaaagtgacgtagagaaagataccacctctgggaaagacctgggcagttcctaccagggaaacacgtaaaccacaacacagccctgacctttgcaacaggctgtctgaaccccgtgaagaacccacccaggagattccttgagctagactttcattcaccacatgggcacatagtcttgacccgggtgacagttcgctgtcctaacctgtgtggcctcagatgttgaaagaaatgtttgtcttgttatgtcaggaacacaactgccgaaaaaagcaacataacaacaacaacaaccccacaacctgcttaggtatattccccacttctgtctgtgggcaagcacagagatgggaagacgtgcaatgctacctttaaaattacctctatttctaactatttttttctaaaaactatagcaaagtacagatcactcagactgatgtagcatcattgcaaaggttcaattcacaaatgtattttcatatatttctaccaccctcgaacagcattcttcgaactttacaacacattcagctgacttctttaatgtaaaacgttaaatggggaggaagtacagtggagcgagactcagggacctcaaaag

SEQ ID NO: 266765 - DNA, 819 bp, Homo Sapiens
  misc_feature (17)..(17): n is a, c, g, or t
  misc_feature (25)..(25): n is a, c, g, or t
  misc_feature (71)..(71): n is a, c, g, or t
  misc_feature (171)..(225): n is a, c, g, or t
  misc_feature (374)..(382): n is a, c, g, or t
gccatcaaatatttatngaggggtnaaaaaataggagtctctctaaagtggtccagacagggctttgtatngaataaatctttttttcccccatcttctagttttgatttaagtattttgaatacattttcttttccattgacacttagtagcctagaagcggtccgacgnnnnnnnnnnnnnnnnnnnnnnnnnnnnnnnnnnnnnnnnnnnnnnnnnnnnnnntccttcctcacctgaccctcaagcccacccccatacgctcacagataactgggtatccacactataaagaacaaccaaacttagaagcagtgtcttaagtcatgtttttcttaagttagaaagggtgaattaggatgctgaagactttnnnnnnnnntccatagctttaatacacgttaagatgctgaacactttaaaaaaaatccgtagctttaacacaatttgcaaactgtccaaaaagcactttcatctgtacttttgtttgcattgtgaccaaggccaggtttttcacaatataataaccatttggacaccattggaacagaaggtattcaggctttgtacaaaagccttatttgccttatgtaaaaaaattgtacaaaggcattgtagcagcggggctgacagtgatgtggttccaatccttaaaagactattggagactgaagtttaggaaactttaattataaaaactattaaggataattgttctgatatcacccaagtattttatgtcatcacataggtgtttttgtaataatgaagaaaggaaaatgcaaagtttttcacatccttttctgagctccatatttt

SEQ ID NO: 266766 - DNA, 464 bp, Homo Sapiens
  misc_feature (148)..(178): n is a, c, g, or t
aaagtcttcagcatcctaattcaccctttctaacttaagaaaaacatgacttaagacactgcttctaagtttggttgttctttatagtgtggatacccagttatctgtgagcgtatgggggtgggctgagggtcaggtgaggaaggannnnnnnnnnnnnnnnnnnnnnnnnnnnnnnatttgcatgtgtatgatgtgtgtgcgtcggaccgcttcttaggctactaagtgtcaatggaaaagaaaatgtattcaaaatacttaaatcaaaactagaagatggggaaaaaaagatttattctatacaaagccttgtctggaccactttagagagacttctatttttttaacccttctataaatatttgatggcacttgaaatattcctgcaataaaatgtgatttgtgtaaagaaaaaaagattttgtaatgtgaaacaaagaaagaaagtaatgtaattttct

SEQ ID NO: 266767 - DNA, 747 bp, Homo Sapiens
  misc_feature (53)..(138): n is a, c, g, or t
  misc_feature (363)..(363): n is a, c, g, or t
  misc_feature (372)..(372): n is a, c, g, or t
  misc_feature (381)..(381): n is a, c, g, or t
  misc_feature (417)..(417): n is a, c, g, or t
aagagatgggttctcgctgtgttacccagactggcctctaccctctacctggnnnnnnnnnnnnnnnnnnnnnnnnnnnnnnnnnnnnnnnnnnnnnnnnnnnnnnnnnnnnnnnnnnnnnnnnnnnnnnnnnnnnnnaacttttaaagccattaaggttcttactgacaatttacagttgatttattaatacacatatatttttgctctgaaattagcaaatatgttaagactatttgcacatcagacatgaattcctttcataaaatacgccacgaattcttaaggttcctactgacaatttacagttaatttattcatacatatatatttttgcctctgaaattagaaaatatgttaagnactatttgncacatcagnacatgaattcctcctttccataaaatatgcccatgnaattcttaagactgtatattttaaaaataatatttacatgggccttgagaaataaattgttctaaactaaatgataatcgcagttagaaaattatgcaaaattataaaactgattagccttggtacacccagcgattcctttctatatctcttgtaccaaccaaatacttcttcaggtagttggtatacatatgcacagtggtaccttaaaatttggtctacataaaaatatacagtattagtcatctacatcttagtgtgaataaatttaactgaataaatccactctaggattttaagcctaatccccaactatgaaataagacaaaa

SEQ ID NO: 266768 - DNA, 401 bp, Homo Sapiens
  misc_feature (16)..(16): n is a, c, g, or t
  misc_feature (22)..(22): n is a, c, g, or t
  misc_feature (77)..(77): n is a, c, g, or t
  misc_feature (190)..(242): n is a, c, g, or t
  misc_feature (280)..(320): n is a, c, g, or t
ccatagacttcttaanggatgnttcaagtgaaataattgtgtttcagaaaaataaaaacaccctaaaatactatttntcttttttggcattctgcagataggactgactaaagtgggaattgtccattcctgccactaataatgggttttattctttaacacttacttcagcaagatttcattgatttgnnnnnnnnnnnnnnnnnnnnnnnnnnnnnnnnnnnnnnnnnnnnnnnnnnnnncctgatgggcaaagaagtctatgcatgcggtggctcannnnnnnnnnnnnnnnnnnnnnnnnnnnnnnnnnnnnnnnngtaacatgaatacacctatgttttaaaaataccaaacaattggactgggtgtgggtataatactaagttgagatgatatca

SEQ ID NO: 266769 - DNA, 724 bp, Homo Sapiens
cctttcacatgcctttgttttaaataaacaatggacaatgaaatctttcctcattagagaggaggtgtgttcccggcaaaactgccagcattctgagtttctatttcttggatgccaggggatgaatggtgcaacacacacagtttatgattatcaggcccctgcaggccttggccctttacactgtaatgaaatgaaccacagtgccaagtgagacagagcgcaggcaggtcaccctgtaaaaggaactggtgttcttgcaacatcactgcttcaactgctaactagaaagaaaaaatgttccaaaggaaaagaatgggtgaagggagaagacattctgtgggaggaaacaggtggattgtttcagggtgcaagggacacaaactccaaggaagtcagcccagggtacgaaagggggacaggtgccaggttaaacatccaaaaacttgagtgcagaccctttcaaagaggaaacctgggattcatttcgctcattacacatctactgttgtgaacaatctttatcctgccttgtttgtacagtgtctgacaatccaaaattggttagtgcaaaacaaaagggacagaaaagccaaagtgacataggagggcaaatccatcttttgggagctccccaatggcctgagtgctccagaactggagtggaagatagctccctgtggtgtcccttgtattctctcagaaacaaccaagggcctggctc

SEQ ID NO: 266770 - DNA, 863 bp, Homo Sapiens
  misc_feature (244)..(365): n is a, c, g, or t
aactggcagcttttactttatatccttggaaccctgaacaaccatgtaagacgtccaactgcactgatggagagaccgtgtgggaagatcctgagatcctgggatggagaaaagcctagctgagcctaaccttctagcaattcccatcaaaaagccaggcatgtaagcacacccttttggaccctccaaattgttccagacaccagctgaataacacccagtgatcctggtggaggctacagannnnnnnnnnnnnnnnnnnnnnnnnnnnnnnnnnnnnnnnnnnnnnnnnnnnnnnnnnnnnnnnnnnnnnnnnnnnnnnnnnnnnnnnnnnnnnnnnnnnnnnnnnnnnnnnnnnnnnnnnngaggaagtagcaattatatgtcagttaacaaggggtaaaggcattgaggattggtaagaaaaaaatacaagaagggtaggtcctctgtgagttaattcaggatccctaagtggatacaaatcatttccccctgggtagtaacttcagcgaggatactggtttggaccgaaaagtatgcatgtaataaagatttatatctgcaaaatgatgaaacactggacacttccattttctattgtactttctcctataagaaagtcaataacatacagattgctgctgttgttactcctaataataatagtgaccaagttctgaatgccttttgtgggccagcactccactaaaagtacttcacatacactatctcactagtttttaccaagcgttagtttctgctatgtcaaatgaagatggtaatacataccttgcagagctcttgccaaagttttcttagctaagacatttcaaagtgagaatttgaaccccaaaagtgtc

SEQ ID NO: 266771 - DNA, 452 bp, Homo Sapiens
  misc_feature (14)..(14): n is a, c, g, or t
  misc_feature (45)..(45): n is a, c, g, or t
  misc_feature (101)..(101): n is a, c, g, or t
  misc_feature (139)..(139): n is a, c, g, or t
taacaaaaccctcnaaagccctttaaccccatgttaaacgaacanataaatgccaactccctctggcctaccctatgttgccataacaaattaacccccanattaagtggttaaaaataaacattttaataataacctncacaattttgtggaatcaggaatgcccagacagtgctgaagctgggtgattttctgctctctgtagcctccaaccaggatcactgggtgttattcagctggtgtctggaacaatttggagggtccaaaagggtgtgcttacatgcctggctttttgatgggaattgctagaaggttaggctcagctaggcttttctccatcccaggatctcaggatcttcccacacggtctctccatcagtgcagttggacgtcttacatggttgttcagggttccaaggatataaagtaaaagctgccagttccgtgccgaa

SEQ ID NO: 266772 - DNA, 876 bp, Homo Sapiens
tttgagtggaacaaagtgacctcttgcatccataacatcttaagcgggcagaggtggattgagcactatggagagattgtcatcaagaacctgcatgatgattcctgctactgcaaagtgaattttataaaggcaaaatactggagcactaatgcccatgagattgaaggcacagtgtttgacaggagtggaaaagcggttcatcggctgtttgggaaatggcatgaaagcatctactgtggcggcggctcctcttctgcctgtgtatggagagcaaatccctatgccgaaaggctacggagcaatactatagcttcacacagtttgcgctggaattaaatgaaatggatccatcatcaaagtctttattgccacctactgacactcgatttaggccagaccagaggtttctagaggaagggaacttagaagaagctgaaatacaaaagcagaggattgaacaactgcagagagaaaggcggcgggtcttagaagaaaatcatgtggagcaccagcctcggtttttcaggaaatccgacgatgactcttgggtgagcaacggcacctatttggaacttagaaaagatcttggtttttccaaactggaccatcctgtcttatggtgaaaaagtaaagaagaaagataacattagtgtatttctcctgtgcttgccttctgaagtggcacaaacctgtgtttatatatttaaaagatactctaggatgatcacttgtgcttagcttagcattgtaactctttaagtctatattttcctcagtgcgtttctttacaatttcaaatgttaccctgattgtttatatgaatgtagaacaccttgacatttctttttatatataaactatttaataaaaatg

SEQ ID NO: 266773 - DNA, 1063 bp, Homo Sapiens
  misc_feature (31)..(31): n is a, c, g, or t
  misc_feature (43)..(43): n is a, c, g, or t
  misc_feature (126)..(152): n is a, c, g, or t
  misc_feature (367)..(407): n is a, c, g, or t
catgatgcccatccatggggcccacaatttncactttcgaaangatccatcaggcccaagtgtcatgggattgaaagcaggactagaaccctttgaaacaaaggtagatgattctctgacacaagnnnnnnnnnnnnnnnnnnnnnnnnnnnagatggaaagaagataaatgagagagcttctattagatcaccctgggattctcatgaaactcataaccaaggtcatctgctgaaccggaaggagactcaaagaggaggaaaaggatctgtcaaaggacaaaattacaacaaatttactttcaggagctcaagtagctttatttgcaattttagaatagaacaacacttcattccattaaatattnnnnnnnnnnnnnnnnnnnnnnnnnnnnnnnnnnnnnnnnncaatgagtgggcagagatggttggctttgtaagcagaaaagggctagagaaagcagaaacacagaacaaaagcaattggtcattgcatagttactttctttgtaatccaggaacaggaaaacagaacaatagagaaaaaaatatctagttaacatcacgttccttcaggttactttttgttgtaaggattaaagcagagagaacttcatcaggctgattgaagattgaaactgccctgtttggaaaattagattgttatcttcctcccctgatttattggaaggtgaacatggaacttttagcatgagtgactcccattttgattttcaatctggtttgttggggccaagtgcagaagcttagtccaaaacgatggccccctgtaatttttatttaacagtgccaacaactagcaagaagtgtgccacaggaatgagtatggggtggggggcggtctatgtgtatacctgtgcacacactcaaatacacctttagattaaaataatttttaactgtaaatgactcaaagaagtctactttcagtgtatactttgagttttttccctacattaaactcattttagtggaaatggttcctatctttctataaagtctatttcaagacagtttgcagaagctgggaaagtggggtgcaa

SEQ ID NO: 266774 - DNA, 358 bp, Homo Sapiens
ttttacaatttttattgtttttccttgtgtccagagaatccatcctaccctttgtttcaaagggttcctagtcctgctttcaatcccatacacttgggcctgatggatctttcgaaagtgaaattgtggccccatgatggcatcatttgaaagccctccgatgactgtttcccgaggagggtgaactttctctccttacctgctcttgctttcctgcctccattttgctcatggcattcccttgaattaggttctatgagtggaatacagctttgaaggcaattccagagatccaacaaaaacccaggagattggaaggaattcatatttgtcaaaaaatgtgtagctcaaaaatata

SEQ ID NO: 266775 - DNA, 528 bp, Homo Sapiens
aggagggttctgggtctggatctcttcgtaaggagaaccagggactggccctggcctgtgatttgggtctcttcctgaggaaaccaggtcactatagtgaccctagtgacaggaagaaagggagatgggtgtggctgcccaggactttctccagtggaaaagggattccctctaggctgagcctcccctgggccttagggcctcacccttcccttcccccacacctgtcctggcaggtaaggctgcttcctgcttcctgggcccagatggcagccgcaccacccagctgatctccagcagccctccccctccccaagggtggcttccctgcagaagaatctgcatggcacgctgttgtcttctttctggggtccatctcctgtactggggagggagaacctcagaatctcctggaattctttaccattcagaaaccagcctcccctctgaagaatcccaaggcccagctgggctcaatttggatctgttctttgttttaaaaatgtgtatttatttaattaagcggcc

SEQ ID NO: 266776 - DNA, 795 bp, Homo Sapiens
  misc_feature (43)..(43): n is a, c, g, or t
  misc_feature (469)..(469): n is a, c, g, or t
tccagggaggcgtggctcccaatcaattagtcaatcaaccaancaaccaatggagtgataggaaatctttctttgtactcccacagttatagaagattctagtttagtccaacagatgtgaaacagaaaaataatctattttagtatctagaatctaaacattagactctggctcaaaagctatgcacataacccaccctccctatagatctcagaaagggattctaccggcatccaaataaagaccaggtgaggtcaaggataaaccacatatattttctttgttgataaacagcatatctggctaaataaatacatcaggttaatggagaaaaaaaggtgataagaacatatatccataatacattctgggcaaatcaagtaatgcatcataaaaattaatgttggaaatatagaaatatatagaaagttagtgggatatgacctaagggacatcattaaagaaagnaaaagaaaattggtgggagaacaagttatccccatgatatttaacagtacagtaataatacatttttaaaacccccaacaacagtatcctacccaaattaacatttacttgagtttcactgattttgtggctctcttggtttggctgtagaattgtgcaagagcacaagaatttatagctggtttttgtttatacatatttaaataatattataataaatataatttaaatcaatattggaatttgtagggattttttccccttaaatggacccaaacattgtgaaggtctgtgaaacatcatttatagttacaaaatataatttc

SEQ ID NO: 266777 - DNA, 522 bp, Homo Sapiens
cttttatgtatgtataaaatgcaatgaaattaatacaaaagtaactggagataatgataataatgtgatagtgttctgcagaattataggctaggctaaaaatctcaaaagtcaagtaagttagtatttgctaaagtcatgtagctgacaatatagtgatgaaagacatatgagaaaacattgtccacatccaaaactgaacttctgtctaactaccctagtgggcctgccctccctgcacctcttattcactatgctgactaatggcatcatccacccaggtcatccaagcctaaaccttggaggtcatcttaagcaccacctccccagacctttacaactgctgaccctcagaactagtcagtcgttaaccagcttctgacattacctaaatttctcccaaacccatcccaattttgtacccaattcttctgacttaatttaagtctatcatttttgtcagaattactagatgaattcttcagtcatatgtatagatatacacgtgctccacaggttaaa

SEQ ID NO: 266778 - DNA, 457 bp, Homo Sapiens
  misc_feature (18)..(18): n is a, c, g, or t
aatttaaggtcagaagantggggtaccaaaaatggggatggggtttgggaagaaattttaggtaatgtccagaagctggttaaacggactgacttagttcctgaggggccagcagttgtaaaaggtcctggggagggtggtgcttaagatgacctccaaggtttaggcttggatgacctgggtggatgatgccattagtcagcatagtgaataagaggtgcagggagggcaggcccactagggtagttagacagaagttcagttttggatgtggacaatgctttctcatatgtctttcatcactatattgtcagctacatgactttagcaaatactaacttacttgacttttgagatttttagcctagcctataattctgcagaacactatcacattattatcattatctccagttacttttgtatcaatctcattgcattttatacatacataaaa

SEQ ID NO: 266779 - DNA, 578 bp, Homo Sapiens
  misc_feature (63)..(63): n is a, c, g, or t
ggacgcccttagctttcccttccccacgcctcccccatcaaccctccctaagccggcagggtnctcagccgttccagaaattgacaaagaagttgcagagggagtgccacttctcagcgcaccggaggagggcaaccactcagcagcagcagcagcgaccggcgacacgacgctcgcagcttcggaggagtcatgctccgcggtttccgcgctccgctgttctcagaccacgtttgtcggggctggaccaggcaaagagcattccccaggacctgcggacagaggcagagactgccaccaactgagccacacgcagcgcgtcgcccagacacatgcacctgcgaactactcttccgcagactttctagaatctgcagcctgcgaggagaccctctgaggagctttcctggggaaactgcttactgtctaaataatcactttcgaaccatgtatgcattgagattttcttccccttgcaaatacgatagcgaaacgatgcgtgataattgccccctctaccccttccttcattttctcccttctccaacctgcaataaactatctacaaaatctatttt

SEQ ID NO: 266780 - DNA, 897 bp, Homo Sapiens
  misc_feature (333)..(346): n is a, c, g, or t
actcaataaatgtaagccgttacctccatacaaataattattataatgtgggtttatttctttccagtcttttaaaataagcatgtaaaaatagttttaatcctattgcactaggaagatttgtttttgtttcttaaatatatacagaatttccctttttctgcttctttatatttaataacaagacattctaggatagactaagccttttcatggctaattgtcctgtggaattcttttagtttttctcttccatgtttatatatttgatatgattttctggtagaattcttgaaaaaataactgcatcacacagtagctctcctctcccannnnnnnnnnnnnnacttgctgaggctggatattatattcttttggctgaagtcaccatagtggattcatacaactaatttccagccagtttatgtagatcatttgcaaatgtattagttacagagaggctccaggggtgtaccaaagaaaccctcaaaatacagtggctcaaataaaatcagagtttatttctttctctccttacagttcagagttggtgggtgatggagggtgggaaggtgcgccgcttcatatggtctctcagggatcctggttccttctctcttgttctgcctttccaaagtgttgttccattttcttgatgaggcttgcccctcaacactatgtcaagttctagtccaaggaaagagaaaagagaagtaaaaaataagcaattttttaaaatgtgcatggccctcaggttgcattcctgatttcttttcacatcccactggctgctgcttagccacgtggactcatcttgctgcaagggaggttgagaaatatggcttgtgctgagctagaactgtggggatggaggagaagagcaggtttctgatactg

SEQ ID NO: 266781 - DNA, 357 bp, Homo Sapiens
ttgagaggtgttatgtaaacaagtcaaagattgtttctgtgtattggcccctcggttgtttatttcttcactgtcgactggtgctgatcccttggctcatacctaactcaaattttaccatgcccagtcattaacaaaaatagctcatataagcagattttcatccatttagtgcctgcctcctttgcagaccccataaaatctcgatggacagctgtttcctaatgataagatagagccttgcaggatacagggccctaagctgctacagcccttgggagctctctggacccagaggactccctactgtgctgtgggagcagccttcacccagatctataaggcttctggccctaa

SEQ ID NO: 266782 - DNA, 284 bp, Homo Sapiens
  misc_feature (250)..(250): n is a, c, g, or t
gttctctgtggttagtcacttagtgactttagataagtttttccaattttatgggtcttaatttcctcagttttaaaataagaagggggggttgagagatttgagggctgatcaacgaaaaggatagggaccataaaaaagcagtgacatacaagctttcattgaggcaggcacttggggacaggggtttacattaaggaggcgggaaggccccttccccaggcatggaggaacaggccttagggcttgnccagttgaggggaggggggaccattcccaggagg

SEQ ID NO: 266783 - DNA, 267 bp, Homo Sapiens
acagtgagagtgcacacgttgctatatggctctgagcctgctgagtcagggccaaccctctgatcaccctcctgtagctccaagaaggagggcagttattcaccctccacgccgttccttcctgggttcgggggcagctccccggaggcctcaggtacccacctttcctgcaggtgtccaggctcctctgcctaccagtggggtggcgaccattcaccaaggtgtgaggggcggggggacctgcctgggggtgatcaggcaggtcca

SEQ ID NO: 266784 - DNA, 978 bp, Homo Sapiens
  misc_feature (91)..(91): n is a, c, g, or t
  misc_feature (129)..(129): n is a, c, g, or t
  misc_feature (453)..(494): n is a, c, g, or t
gtaccagctgacctctctagtccttcttgcctgaaatggataagatggctgcagctccagcaaccattttgagccacgagattaccctgtngagggaaacttcgcattaaaggtggccaagctgcgcanacgcccgggctcctgatgacattgtggcacccacaccagcactcaaccatccacctccaggctttttccacatgcaaatgaacctctaatgcctttaagccactttatttaagctctctattctggccaatgaaaagtgattccccactgacccccagccatgttagatcatcactccttccttcccatttatccaatttctaatttgtcaattcatttttccatcactggagacacggattctttgacctaaagtaactccaacaatgaacaggcagagcagacttacaaaactgacttatgtgataagggtcacactacagnnnnnnnnnnnnnnnnnnnnnnnnnnnnnnnnnnnnnnnnnnggaaagaactggcactagacagtgttctaaaagatgagtaagaagttgccaggcagataggaacaagacaggcattctaggaagaagaaacagcacctaccaaagagatggtgacattggaagcatggtgggctcagaggactgcacacacctcagtatgtctgggatgtggggggatccgtgggagagtagcagatgaaactgggaaagtggcctagaatcagatcttgcagggccttgtatgtcattccaaagaatttgcatgtgctatataatcaaatactccatgcaaatactgaaatgtattgtctttaatggctaattgtgttccatatggtctcatctctgcaattggagggcaggggccatgtcttctcttttataatctctacaatgctaagcccagcactgctacatgccagaaacggaaaaatatctgtagcattaaagtcagccacatagcctaagggacccacgcagatgg

SEQ ID NO: 266785 - DNA, 771 bp, Homo Sapiens
  misc_feature (450)..(470): n is a, c, g, or t
tcagaaaagttaaagccttcagtgggaaaaccatggtaaatgacatattgactcaatctctaaagccctggcaaattatagattttgtgcaattagtgaccaacatatacatttaagagataatactgactgttgaccagaaccttctgatggttctgaagcatctgctctttagagttacttcagctttacatgtctatgaaatttaagattcctcaatgggatgttatagcttattctgcactagatacaagtaatatgtatagatttagaacaaatgactacttttcaccttccaggagcctgtttttatttatacaaaattagattggtttttcacccacatgtatgcataagtgcttctcaaatttacaccgttcatatctgaaatcccacaataaatgcaaataaatggatactagtttatatatttcatattttcattcatcnnnnnnnnnnnnnnnnnnnnngagacagagtctccgttgcccaggctggagtgagactctgtctcaaacaaagaaacaaacagcaacaacaacgaaagcatatggaataaacatgctgcaaccatccctgcaaaggatcctgccaggcaggcggttctgcttccttttgtaatagtttgcctggcagcagcttttgtaacactccagtgaggtaaagatggagtaacatcaatttgaggcttagatttataatttctaattgtacatactagccataaacagaatgttttactttacaacgtattatgagaggaacactctt

SEQ ID NO: 266786 - DNA, 717 bp, Homo Sapiens
  misc_feature (18)..(18): n is a, c, g, or t
ttccagaggaggattgcnttcgtcagggtaaggggtgggctgctcaggggccctaccccttcacccccttctgtatcagattggccctcccactcccatctcactctgcgtgtacaatcttccatatccgcaagttcactggcactcttctggcacctgggcaagatcccagaacagaggatggagtgactggcctcacagagcttagtgcccgactcaggggaaatgggactggtgcatgggaaatggtcagcctaggataggacacgagagtctgaaattcaaagcacccagcttgaaatggtttgaagaagctggaagcaaacatgggctaagagagatagggccagaagtcaagacgaggatctggactgaatgtggagaaagtagcccacggaagcatgaactgtatcctgcacaaagtccctcttccccgcctcctaattcattatgcccaaaaggccttacgtgaaattccagcccagagtactcatgacttgagagacgtggacagagccagcttctaccttgcctggccgtctctcccctgtcttaatgtctgctcttgctctaagctccagaagagtggcgggccatgtatcttcaatatgtttttgctgtatgggcaggttgtcttattatgtgatcaacagatgtccaggaactaatgagtggaatttaatattattgtcaaataaaacttgatttgtcctataa

SEQ ID NO: 266787 - DNA, 457 bp, Homo Sapiens
  misc_feature (31)..(31): n is a, c, g, or t
  misc_feature (37)..(37): n is a, c, g, or t
tcactcccaccctctgttcctgggaaccttncccccngtgcccagaaaaatgcccaatgaaacttgccggattatggaaagattgttacacgcaagagtgaagatgggagtgggagggcccaatctgatacagaagggggtgaagggtagggcccctgagcagcccaccccttaccctgacgaaggcaatcctcctctggaatgtctcttccctcttcagtctgggttctgcctcagccacgaactgggaaggagtgaggaacatcccaacggcaatgagagtatcccagtgactccaaacaggaggaatcagtgttcagaaagtcaggcactaagctttactgaacacctactgggagctcggcactgggctaggtgctttgcagacaatttaaccttttaaggatgtcttatttccaccccaactctccactccattttagtgctggagaaatga

SEQ ID NO: 266788 - DNA, 672 bp, Homo Sapiens
gacgaaatgccctcctgtactctgtcttcagcagccaactcctggagctgccaagtgaggggttaaagaagaggtggggaggcagtgtggctccctgggaaaagtctgttgctttggttctcagtcctgggtattctaggagcttggacacgggattgcgtttcctgtgctaaaattctctctcctggctgggctccggtaaactgaagctgctcgagaaatcacctgggaactctcatagccgtttgtcacccagggtgtacttgccaggacctctccttgctactcttcccaaagtcgggaggcaaagcggctgggtcaccagagcctgaccatactgacgctccagggggaagacgcagaggccgggaagagacaccccctcccaaacacataaaacttgccccttcctagcctcggctcccctcactggggccttgggcaggaccgacccgcatccaactaggcctaaggggtaggctctgagcctcttacccctaagaggcggagatgcgcccaaggcgggcgcccggcctgttccccagccctgcctggaagccccgcagccactgcattttgtttaaacacagatagcacgggcctttctcttattgctacagtgttttgtacacggttaaaacactagtaaagctttttcgttattaaaaaaaa

SEQ ID NO: 266789 - DNA, 828 bp, Homo Sapiens
  misc_feature (177)..(191): n is a, c, g, or t
  misc_feature (686)..(686): n is a, c, g, or t
  misc_feature (727)..(727): n is a, c, g, or t
  misc_feature (748)..(748): n is a, c, g, or t
  misc_feature (807)..(807): n is a, c, g, or t
aaacttacaactattgaatctgtacctttatgccagtaactatgccagtgaagttcctattacttcttatgattgggagcttagaattgtgttctttactgtaaacctttaagatgatttcacaggaataatccctttaacttaacaaatgaactaactcccagatgagaagaaacnnnnnnnnnnnnnnngcttctaagtctgtatttaagacactcaacaaatgagttgtgtgaatcttacttgtgcttgttcggatactgaacctacaacagtataggtttaaaataagttaagcgccttgagttccaaaacttgtaccacagtgcacagtgtggtcgattttaaagtcctgactcttaatttggaatggcctgtaaaaacgaaacagtggtcctggttatgtggcttttgtatgaaattttatttgctaagtattctattgtatattgaggtaagtaaacagtaaattgaaatatctaaaattggaaactgcggaagtcccaacacgaagccagtcaaatatttaaaattgtacactgttgcctatgttgcctatcatattgaaacttaaaacttagctggtttttcttcatatttttaccatgagtatttttattagtagtagcagtaggactttccattgtattggcatgtctttcctccatagaagataaatttccggntattaactactgaatgtaatttatatgcacatggtagaagnttgagatatactaggaaatgntgcttacttttgagggttggctggttttatgaaccagggacattgtagtttgaatttgngggtgatatttttatctggtc

SEQ ID NO: 266790 - DNA, 718 bp, Homo Sapiens
  misc_feature (368)..(368): n is a, c, g, or t
aatacttgaacacaaagtttatttaaggataaaacacattaaaaagtatttggttgatttgtaaaaagagaagggattgggttcgagggggtaggagagtgggtggggttccccaggtcaacaatatccccagtggccaaagctgccatggcaaggttgaaggacacagtgggtggagaagcgcctcatagacagaacacgtgcataacatagatcggacacttccaaacaccagcaagattcccttagagggagtcaaaccttccagtcatcacttcaaaatcgttccaacaggccctctctctgtaaaaaactgtgatccagaaatagcactggcttgacagatttctctggtcagatttccagtncagatttctcttaaccaggaatttttttcctttactggtttttcatgtgaaccaaagtctctagtgacaactgtttgggaattttacacaagagagatactttccataactggcttgtagaagccccgtttcatactctgaaagaggagcttggatggtcgctggtttctggaccttggaccattggaggcaggtggcatcattttgagatgctggacactttcaaataggttttgacttaagggcacacactttttatcctacagggtgttgaagtaagtaaattacagtactttatatagcaaccttgagttaattatgaggtcgtgcctgatttatagacaaaatgc

SEQ ID NO: 266791 - DNA, 417 bp, Homo Sapiens
  misc_feature (17)..(17): n is a, c, g, or t
  misc_feature (28)..(28): n is a, c, g, or t
  misc_feature (34)..(34): n is a, c, g, or t
  misc_feature (52)..(52): n is a, c, g, or t
  misc_feature (64)..(64): n is a, c, g, or t
aaaaatatggaaaaagnggccctccctnggaccngccacaccagtgtgagtnagagttttaganttccctccagtgttttatccaatccaaaaaagtaataaaactcaaaaaatattgagagtgggtttatgtatataacatacgagaatctgttcacagggctaggtcctttgcctagtattctcttactagattcttaatacttggtaagaaaagaacctaagttgtaacaaatgcactctgataatatatattttatagaataaatatacattatactctgttggaattaataataatagatacaagcaataattaaaaactacagtgctagagttcctacacttgcttctaacaaactaaaagttgagctaaaattggtccattctattaatgcataataaaattcaggaaac

SEQ ID NO: 266792 - DNA, 544 bp, Homo Sapiens
ggtcttgctccgtcacctaggctggagtgcaatggggctgttataactcaccgaagcctcaaacctccgggcccaaatgatcctcctgccccagcctcccaaagcacggggattacaggcatgagtcactgttgacacataataatggccttactatcttaccagcctatgtgatgatgttgttggcgtctctacgcattgaatgcaagctccaaaaagacaagaggccttgtctgcctcatggtatccccagctgacgctcaaatatttgatgagtcatgagtgaagacaaatcattaattatgcgtaggaaaggtaaagtgctgaacccagggaggaatggactgggaaacagatgagagtcctgatgaagccaaagaacagggaagtggggaatagagagggctagagaaggagaggctgtggtcagggcaccgaactcctggaagcgtttcaacactgatgtgctggggtggtgggatcatgggcaaaactctcgagtcatataaattatataaaagtgaaggccgggcgcggtggctca

SEQ ID NO: 266793 - DNA, 480 bp, Homo Sapiens
cctacgcacactcctaaccactaagttaaaagcacccacattgtgccctagaccactcctagctattaaccttgccctatccagagagaaaagaagggagccccgggctagattaaagagacttggttctagtggtgtatcttccctggcttcctctaaactctggagtaagtcattttccttgctggacttcactttccctctctgtgaaatggaaacagtcatcacaggcctgcctgttctttccaggggctgttaggaggctcagatgacacccggtgtaagaattctcaagactaaggagcctggaccaagggtgagagctgaggaatcctggaccatcacccctgggacagccctgatttttctgtaccttggctaccacaggttctgctgaatgtcctgaccttgaaccggaacctgagtgacagcctggcccgcggccgcctacacccggacctgcagtccaacctcctgcag

SEQ ID NO: 266794 - DNA, 369 bp, Homo Sapiens
  misc_feature (26)..(26): n is a, c, g, or t
  misc_feature (291)..(291): n is a, c, g, or t
tctacccgcatgctgtacttctggcntctctgagcgagtcttccactcgctggccaaggtagctttccaggatggccgcctcatgctcagcctgatgggagacgagttcaaggcagtgctggagacctggggcttcaacaccaaccaggaaatcttccaagaggttgtcggcggccttccccagccagggcccaagtcaccgtccactgccttcaagatgcccaagatctcctggccaaaacaaggggagtcgtggttcaattttttcagttgatgggtgaaatttccttnttttcccacggcccaggaccaggcaacatttctgttaggctttacacatttttgaaggagggatattcgttgacttac

SEQ ID NO: 266795 - DNA, 1003 bp, Homo Sapiens
aatgaaagcaagtgagaatatatatctaccaagtactgttattttttaaacagtccactgtggggatttgtgtgaggcaggggtgagaaggttgggggctttctgtttttgtagtttgggaagatacagggggaggagaggaaggtcctgcttgtcatataccatactgtatacttaggccttaatgaagaggtcagagaggctttatcctagtacaagaagaatacaccctaagctgagggatagagccaggattttaacaagatctgcaacagtgattgggagcctccttttgtctggtgttcagccactcacgttaccacagcaggtgctccaaggtgctagccagttgattctctgaagttgggatgatgagccagggggcatggcttgaagaatattctggggctatttaggaaattccaggaaggatgacccgtggcaggtgtcatccagaaagcaggctgggcttgtgcttaaaaacccgatgagataatttaaatccagcaagatattaaaataaaagagggcaaaacatactgataatacactgtgcactaaaggggaagcaggaaattactaagcatcgtctggattttttatctgttcagttgccctatgagggacatgttatgtcacagtcaagggaaaaagggactttgtcttttgatcatgtacttctaatggaaagaaatgcaggggttatcctttttctaaaattttcttcccagagtgggagagtgttctaaagcatatttgaaaattatttatatctacactttctaaataatccacacaaatttatttgctcacttatatttgcccttaaaaagcacacagaagttgaatctgattttcatattaaaggaattatacccttttacaaggcataattcctttaagatgaaaggtatgtatctacaaaaggtatatatatctatggaaggatatacatttcacaaaaaaatattgtcaaactagatgctggggacatttattcttt

SEQ ID NO: 266796 - DNA, 651 bp, Homo Sapiens
tgaacgaacagctacttgtgacagtgtgaatcaattttagaaacaaagttgagaggaagaatctaatagcagaagactgtatatagaatggtaccattttaataaagctcaaaaataaaactaagatctcatttagagagatagatggcaaaattctttttaaaagcagaggagtgacaaaacacgaaattcagcatagtggttaagagaagcaggagagacgaggaggagtacatgtttagctttaataatattggtattccttggttcttcagttgaactcgtgggctattcattttcatgattatggcattattaatttgataaatgtatgtaattaacagatgtatgtatgtgacatatttacttttggtaacaaatactacttcattaaaaaaatcacaataaaaataacaagcgtcaatctgggagaagatacttgcagtatacaaatatcttaaacagattaatgtcctgaattcataaagaattcctatgaatcaataagaaaaaggacaacacaacttaaaaaatactaatggacaaaggatctgaataggaattcataataaaaacctggatggctaattaaaatatgaatatgtgctcaaccctacttgaaataaagtaaatgcaaattaaaacaagatt

SEQ ID NO: 266797 - DNA, 451 bp, Homo Sapiens
  misc_feature (83)..(186): n is a, c, g, or t
tcctggactcaagcgatcttcccacctcagtctcccgtgtagctgagagtacaggcctgcatggcatctcagggctaatttannnnnnnnnnnnnnnnnnnnnnnnnnnnnnnnnnnnnnnnnnnnnnnnnnnnnnnnnnnnnnnnnnnnnnnnnnnnnnnnnnnnnnnnnnnnnnnnnnnnnnnngtgcgagccaccctgcctggcgctatacatgttttcaagtgctgatcatttattaatagtgaagtgattgtagtcaggcgtggctcccccatttactggcaggtcccatttagacctgcggttgcagaagtacagcacagctctgtgcatgattggtggaaatattccaggagatgaggctgttacagtaacagcagatttttccattgtgaaaatgtaactattcctgctttgttgaagagaaagatttttttggaaaatgaag

SEQ ID NO: 266798 - DNA, 425 bp, Homo Sapiens
  misc_feature (67)..(67): n is a, c, g, or t
  misc_feature (83)..(186): n is a, c, g, or t
  misc_feature (371)..(371): n is a, c, g, or t
  misc_feature (398)..(398): n is a, c, g, or t
tcctggactcaagcgatcttcccacctcagtctcccgtgtagctgagagtacaggcctgcatggcanttcagggctaatttannnnnnnnnnnnnnnnnnnnnnnnnnnnnnnnnnnnnnnnnnnnnnnnnnnnnnnnnnnnnnnnnnnnnnnnnnnnnnnnnnnnnnnnnnnnnnnnnnnnnnnngtgcgagccaccctggcctggcctatacatgttttcaagtgctgatcatttattaatagtgaagtgattgtagtcaggcgtggctcccccatttactgggcaggtcccatttagacctgcggttgcagaagtacagcacagctctgtgcaatggattgggtgggaaatattccagggagatgagngctgttaacagttaacagcagattttntccctttgtggaaaatgttaaccattt

SEQ ID NO: 266799 - DNA, 514 bp, Homo Sapiens
cataccctgtaattactctggcttaatgcctaaagagtcccaggctgcagcacaggaaggaggaaccccaacagagcctggcaatctctgaggttgaggagacacagttaaatattggaggaagccaaggaggctaaaactcacaagcagagtaccggaaaggaagaaaccgcaaacagagatacactcagagatcactggagtcttcagctgagtgctgtgtgtgaggaaatatgtcaaagctgggaaaagaaccaccacagaggtggaggcagaaaaattattgtaacacatatggggctggaatagttcaagaaatcttgtaatacatggagcatcaggttgaaaattcagaaaggtactgccttagcaatgatgtcaaattaaccctagagtaaaggtttctctggtctctctgataaagcttaaaagtaagtttagaaagaatcaaaaaaatcaaactgttcccaaatttaacttcatcccaatcctcaaacgtatttaaaagcacatc

SEQ ID NO: 266800 - DNA, 521 bp, Homo Sapiens
  misc_feature (281)..(313): n is a, c, g, or t
tgtgttcttatatccctcacatcccacagtggcacctaagcatcatgtccctctaacacggcctttcaactttgcttacacaggtgtcttcagtgccctgggtttgcctgtgacccaatgcccactgggactgaatgccaaaggactccctttaggcatacaggttgtggctggaccctttaatgatcatctgaccctggctgtggcccagtacttggagaaaacttttgggggctgggtctgtccaggaaagttttaggaggaccttctgcaaggttaannnnnnnnnnnnnnnnnnnnnnnnnnnnnnnnnttctattaattgggtgaaatcaagcaccagcagacaagcagagaaacaactggggaatttattgactcatttagttattctttctacttttatttccttctctaactgttggtcttactaaaatggtaatatttgcttcttgcttttatgttactggaaaattaggacatgtaaatggataagtgcaataaagtttcctaaatgctaa

SEQ ID NO: 266801 - DNA, 943 bp, Homo Sapiens
  misc_feature (60)..(72): n is a, c, g, or t
ttcaaatataggttttatattctttcagaaattattcccaaattgaccgatgcgttacannnnnnnnnnnnngataaaattcattaaaagcaggaagccatagggacttcacatatagcttcctgcctctcacttgcatagttacttacctgtgatggccagctgagtcacaaagaaggtcattcttgacttcttctttctcctccatgtggaaaaaagcacaacggagtttccaacaatggtaaaaacaaagaggacccacagagttatcaattgctcagtctgcaagaaacagagaaaaataaaaccagtgtaccagtgagaactggagttctttacagaatgcctgccccaggctggatttcttccgcctagccacatatccctacttttggaagctctactctcaagaaaacaatgacaaaatggtcttcattttacaccagctgcagagtaaattaatgcaccttttaaaaaacttttggaaagatacgtcaagagacaaaaagtttgtattctttggtcaggtaattgtaacactatgtgaaaagtaggtcaagatgtgaaaaagaacacccctgtcagaaatatgtccatgtttattataaaaagaaattagaaattgtttaaagataatagggtagctaagtaaataaagcacttcaattcagtgaactattacagcatagctattaacaatgacaaccatgaagactatgtagcaatattaaaaatacctataatataatggtaagtgggaaaacatgataaaatcatatactgggtatgattacaactctgtaaaattatatacatagcaaaaaggctgaaatacagtaaaatgttaaaagcagtcatattagggtgtaattatgggttatcttttgttcatttgacagaattttataagacagtaatattaaagttctactgaagaatgttt

SEQ ID NO: 266802 - DNA, 827 bp, Homo Sapiens
aaactttcccagaagctcaaagcagacttctgttcctgtctcattggccagatccgtattacatggcactcctagttaggagaaattgtggaatagagagcattcagctttctcagtccctctagtggaggcagtgggagaagggaattgggagtatattttgagttggccattggattgtgcctactgcacataaaatgttgttttcatattggattttgataaatccattttataataagccaccttactacattctcctgttgaataatttttcagttgtttgccttcccaatgtattgttttagaattacgaacattttgcttttttcatttcagctgttcttaagtgtatcaagaagctttcaattgccagtaatggaaaacttattctaatgaattttttaaaataaaaggaatttagtgattcacatagctgaaaagtctgaaggtctggtgggcttcgggtgcagtttgactcagaggatcatggtgttctcaggttctgccttcatttctcttggggttttcttgttatgtggccttgtctttgggctgacttccaccgtggtagcagctggcgacataatgttagccagggagaatgtttcttctgatagctttcttgggctttgttccagaaagtctgcagctaatgtctgtgagtcatgtgctccttcttgagccaatcactgggattttctggaatgtgtcctccatatatttggttgtgtttccatcagtgtctccacttcctttattgctgtttagtgcggcaatccgtttccgggattgcctcactcttcttgaacttcatttcttccctg

SEQ ID NO: 266803 - DNA, 639 bp, Homo Sapiens
  misc_feature (36)..(36): n is a, c, g, or t
accagccctatctgagagtttgtcggaaatgcagancctccagtccagacttaccctaatcagaatctgacttttaacaaaatccccaggtgacaagaaggtacattacagtttgagaaacacacatctagacagtgaagacagagaagaggtccaagggctgagccccagaacatttctgtgtttaaagaccactcccagaaggagagatcagcaggagagaatcataaccacagatcagtgaggtaagaaaacgaccaagaacactgagccagaggcctgggtgacaagttcaatttcccagctaatttagcctgccttcaaagtcgtcttgctggggaaatagtcaaatgtactattgattagagggcaattctcactatttccacacactgaaatgacacttatggtactgggatgcacaaaggaagttgctcacagccctggtcaacccatgtaggacagaggcccagttccactctccagcaggaaagagaatgggtttcctggcacatctgagttgagaaactgttggcaagctctgaattagaatatggtgtggcaagtactacaatgaaagcatttacagtgtactatgtatggaaggcccaaaatgggtgacaaccagaagcatcctca

SEQ ID NO: 266804 - DNA, 972 bp, Homo Sapiens
  misc_feature (479)..(479): n is a, c, g, or t
cctggccgctgccaacccgtgggacccggcgtccgcgcctaacggcgctgggctagtgctaggccacttcatagcttcggggatggtcaatcaggagatgttaaacatgtctaagaaaacagtttcttgttttgtgaacttcaccagactacagcagatcacaaatattcaagctgaaatctaccagaaaaacctggaaattgaactcctgaaactagaaaaagatacagcagatgttgttcatcctttctttttggctcagaagtgtcatactctgcaaagcatgaataatcatttggaagcagtgctgaaagagaagagatcccttaggcaaagactgttgaaacccatgtgccaggaaaacttacctattgaagctgtttatcacagatatatggtacatttgctggagttggctgtgactttcattgagagattagaaacccaccttgaaacaattagaaatattcctcatttanctgcaaatctaaagaaaatgaaccaggctttagcaaagatggatatattggtgactgagacagaagaactggcagagaatatactcaagtggcgtaaacaacaaaacgaagtttcgtcttgtatccccaaaatattagctgaagaaagttatctttataaacatgatattataatgcctcctttaccttttacttctaaagttcatgtcccaaactattaatgccaagtagtcatcaactttatttttgcttaattatgtgtagtcatatgaagtctatttctagttgactgtaacatgggtattaatagtctttgctgctggtaatactgaaagaacctgctttatattggagtatcaagatctcaggttcattaagaccaaactgacttttcctttgtttttcatatatttttattctacctttcagtaaaactagagaagctaaaaaatagccatgacaatttattaatataagtgaattaaccattaaa

SEQ ID NO: 266805 - DNA, 372 bp, Homo Sapiens
  misc_feature (36)..(36): n is a, c, g, or t
  misc_feature (41)..(41): n is a, c, g, or t
  misc_feature (346)..(346): n is a, c, g, or t
tgccaacccgtgggacccggcgtccgcgctaacggntgcgngctagtgctaggccacttcatagcttcggggatggtcaatcaggagatgttaaacatgtctaagaaaacagtttcttgttttgtgaacttcaccagactacagcagatcacaaatattcaagctgaaatctaccagaaaaacctgggaaattgaactcctgaaactaggaaaaagatacagcagatgttgtttcatcctttctttttgggctcagaagtgttcatactctggcaaagcatggaattattcattttgggaaggcagtgctggaaaggaggaaggaggttccctttaggggcaaagnattgttttgaaaaacccttgttggcc

SEQ ID NO: 266806 - DNA, 510 bp, Homo Sapiens
tgctacctcccaacatcacctgtgaagttaataatcaaccacggagtcatcacaaagcaataacactccttcctctgttgcattcagtacaaatgattgtgaggatgtagagaaacagaaggatggtaaggagagttgtgtaactcatttatctggcaaaaagttatctttaaccaggttgatctactgattttcaaactgagaggagatgtttaacactgataagagacagaaaaagtagtacttcttgggaaaaacaaacataattaaagttaacaaacattcatctggggagattcaagttcatacagctaccaagggcaactgaaactgaagggcaacttggtgctgagggaaaccaggcgctgtgtttctgttgatttggcccttaccccatgcatgaaacttctcctggaatttctgtaaacagcccctagggttctttgctcaattgatttgtgtgtaagctaagcagtaaacaaaaacactttttctttgttgttgttgaga

SEQ ID NO: 266807 - DNA, 754 bp, Homo Sapiens
taccgtggggtatattttaaaattatacacatgcacacatatatatcctaaacgaaatacgtggcatgtagtaagtgatcaataaatgcaggtcttcagccccaatgaagtggtctgccatgctaccccaaatcaatgtccttcttgactgctaagctggctgtcaaataataccctagtaatatctgctcaggtctccgggtgcaggtaggcagctgctatgccagcaaggtattcgggctgcttgtccccacatctctcttcttccctactacccgggtttactgcatctaatcattacctggatatcaccacaaaaagcattactaccaggttttaccagatactggcattttattttaattggaattgttccccatggataattctggttaactttattattttactttagtatacagtttcgagcatacagaaaaacattctttctgtaacacatacgatataatctcaaacaattttgtggaaaaggaaatggatcagggcctgagatgatgctaaaggttgttcttagaaattcctgccacaaatattccccagtttactgctggtgtctacacgaataggaagctataaataacataaaacagacttgcagggagatgcaaaatataatcaacctacatggtgtcagttactgtgcctggtttagcttccactgagctctactattacagcttgagcttaactgctattgtacttagttacaattgaaagagtcagtaacccaagg

SEQ ID NO: 266808 - DNA, 571 bp, Homo Sapiens
tggcaattagctgatccaagtgaaaaaggtagagaatgtgctctcaactggaaaatgccaattaaggaagcagctctgacttcccacccgccctggctaagctgggagcttatcttccccgagaagaatctgctgggataagggggcttgggaaacaccgagggcagggctgcctcctcacctcctcagcttcctctgagagcagattagccgtggccttgtgccagcagggcctgggtgccacaccgggtggcagcgggtggcagagcggggccccgctccggcactgggatttggggtggcgggacccagtggggcacccgcttgtgggcagcactgagggcggtgacgtaggcagcgggtgccggtgtctgcccctccatctggccgggctccccaccctgctcctgcagccctggacctcagggcccatttgcggtgcaaggcggctcttggtcggtctccactcctaaacatttatgcgttgaaaatgcccatttgtttgttttcttgtgttccatttatgtgttctgtatccttttttacttaatttaaataatttttaaatgtg

SEQ ID NO: 266809 - DNA, 677 bp, Homo Sapiens
ggccgcttaattaatattaaatcaatattgcattgattaatattagtattaaaatattaatcaatataaaatattaatcatggtaataattgattttgtgtgtcaccttgactaggacatagtctcaattattcaatcaaacactaatctaggtgttgctctgatgtataatacaggtgttattaaagcctgtcatcacttctctagggtcaggaagattgtcctaggatgaacttgggtcggtctgggtttaatcctaggcagaggagaagacaatgggaactctatgggtaggacaggcagctgtagggacttcccagggaattccgtcctgtctttccttttgggccagctccattgggctctggctgtgcccacccagacctcacgattgccatcatgcagagctcacagcccaataaagtgtccatcctcagctctcccaaaaatccacaagtgagagtgggggctctgtgacagggtgagaagcacaagatcagctctacaacagtatcccatttgaggaaacgactatgagtgtccacttgcatttcccaaatgcatccacgcatagaagacagcaggggcatgcaggcaccagggaatgagaaagatccctcagcctgccaggtccacaggagccatagccagagccacacctgagttcccaggtaatg

SEQ ID NO: 266810 - DNA, 725 bp, Homo Sapiens
  misc_feature (551)..(551): n is a, c, g, or t
  misc_feature (563)..(563): n is a, c, g, or t
  misc_feature (653)..(653): n is a, c, g, or t
  misc_feature (664)..(664): n is a, c, g, or t
acgggggatgcccaacgtccttggggagctgaacagctctggacccccatggcatcgagagcaaacggcggaagaaaaagccggccatcctggaccacttcctgcccaaccacggctcaggcccgttcctcccgccgtcagccctgctgccagaccctgacttcttctctgggcaccgtgttccctgcccggccgggagccccctggcgggcctgacctcctggacgatggctttgcctacgaccctacggcccccacactcttcaccatgctggacctgctgcccccggcaccgccacacgctagcgctgttgtgtgcagcggaggtgccggggccgtggttggggagacccccggccctgaaccactgacactggactcgtaccaggccccgggcccccggggatggaggcaccgccagccttgtgggcagcaacatgttccccaatcattaccgcgaggcggcctttgggggcggcctcctatccccggggcctgaagccacgtagccccgcgatgccagaggaggggcactgggtggggagggaggngggaggagccgngcaatcccaaccaggatgtctagcacccccatccccttggcccttcctcatgcttctgaagtggacatattcagccttggcgagaagctncgttgcacggntttccccttgagcccattttacagatgaggaaactgagtccggagaggaaaagggacatgg

SEQ ID NO: 266811 - DNA, 589 bp, Homo Sapiens
  misc_feature (489)..(489): n is a, c, g, or t
  misc_feature (576)..(576): n is a, c, g, or t
gatggcagggcttcatcctggtctggtgcctcattttcttctttagcagtgggcttagaaccaatgcagattcccaagttaagtattttttctgtagcttaattattacaggcttctggtacctaagccctttcttactttctgttctgaggggaagagaagataatgttgtttctccgccccccccggagtggccccaggaccttgcatggcatttgcagcatttgcagcgtgcttgggtttgctttactagggtgaaagtgttgcaccccccagcacccacaaaggcacctctggctcaccctccggtgaggttctgactgggccctgggacatcacctgctccaggattcctatgtgggctcatcccagggagagatgtgggagggaaggggaaaaaaggcttacatttgctgagtggaattcatgtagatctgagttccgcattgattcctaagctgcagagcccttatgccttggctgttttgngaatgctagtcggtcttaacctttttcaccgaggtagcattggctgtctcaggaggctcacagctcctgctcctcctccaggggagngcgccctcctcct

SEQ ID NO: 266812 - DNA, 997 bp, Homo Sapiens
  misc_feature (695)..(892): n is a, c, g, or t
gagcttgtggtcctggcaattgcaaacacaatggacctgccagagcgaatcatgatgaaccgggtgtccagccgactgggtcttaccaggatgtgcttccagccctatacatatagccagctgcagcagatcctaaggtcccggctcaagcatctaaaggcctttgaagatgatgccatccagctggtagccaggaaggtagcagcactgtctggagatgcacgacggtgcctggacatctgcaggcgtgccacagagatctgtgagttctcccagcagaagcctgactcccctggcctggtcaccatagcccactcaatggaagctgtggatgagatgttttcatcatcatacatcacggccatcaaaaattcctctgttctggaacagagcttcctgagagccatcctcgcagagttccgtcgatcaggactggaggaagccacgtttcaacagatatatagtcaacatgtggcactgtgcagaatggagggactgccgtaccccaccatgtcagagaccatggccgtgtgttctcacctgggctcctgtcgcctcctgcttgtggagcccagcaggaacgatctgctccttcgggtgcggctcaacgtcagccaggatgatgtgctgtatgcgctgaaagacgagtaaaggggcttcacaagttaaaagactggggtcttgctgggttttgnnnnnnnnnnnnnnnnnnnnnnnnnnnnnnnnnnnnnnnnnnnnnnnnnnnnnnnnnnnnnnnnnnnnnnnnnnnnnnnnnnnnnnnnnnnnnnnnnnnnnnnnnnnnnnnnnnnnnnnnnnnnnnnnnnnnnnnnnnnnnnnnnnnnnnnnnnnnnnnnnnnnnnnnnnnnnnnnnnnnnnnnnnnnnnnnnnnnnnacaaagcatctgattttggaagtacatggaattgttgtaacaaagtatattgaatggaaatggctctcatgtattttggaattttccatcaaataatttgctttt

SEQ ID NO: 266813 - DNA, 447 bp, Homo Sapiens
  misc_feature (398)..(398): n is a, c, g, or t
  misc_feature (407)..(407): n is a, c, g, or t
  misc_feature (412)..(412): n is a, c, g, or t
  misc_feature (421)..(421): n is a, c, g, or t
  misc_feature (427)..(427): n is a, c, g, or t
actcgattagtcctaattaatttagtctacttagtttaactaatcggtaactgccttagtctgttttgtgttgctataacagaatacttgagtctgggtaacttgtagagaaaaggggtttacttggcttatgattctggtggctagatagtctaagattggaaagctgaatctggtaagggtctcaggctgcttccattcatggtggagagtggcaagggagtgggcaggtgcagaggaatcagatggtgagagagaaagtaggggagagaaactgaagaaaccagactttttaacagcccactgttgtggggaattaatttactcctaccagactctggattatcctttttaatttaggtgaaggatgctaccccaaccggatagcctttaatttnttcctgaanatccncccctcggnccccancacctcccactgtctccatt

SEQ ID NO: 266814 - DNA, 281 bp, Homo Sapiens
  misc_feature (58)..(201): n is a, c, g, or t
taatttactcctaccagactctgattatcctttttaatttaggtgaaggatgctaccnnnnnnnnnnnnnnnnnnnnnnnnnnnnnnnnnnnnnnnnnnnnnnnnnnnnnnnnnnnnnnnnnnnnnnnnnnnnnnnnnnnnnnnnnnnnnnnnnnnnnnnnnnnnnnnnnnnnnnnnnnnnnnnnnnnnnnnnnnnnnnnnagtagtaaccagcattgatttacctcctactcgcagtcatttggtggctgcaaaaatgtattaagcaagcctctgctctc

SEQ ID NO: 266815 - DNA, 796 bp, Homo Sapiens
  misc_feature (72)..(87): n is a, c, g, or t
  misc_feature (98)..(130): n is a, c, g, or t
tggaattaaaatatttaaataagacaacagtggcatgtgtcatttaaaacaacagatgtccaaatgttgtannnnnnnnnnnnnnnngagatgaggtnnnnnnnnnnnnnnnnnnnnnnnnnnnnnnnnntgttcacaggtgtgatccttccacctcagtctcccaagtagctgggactacaggcatgtgccaccacacccagatacatgttttaatcacaacagcaactttaattataagtcactctaagatgcagtgatacatacaaagcattctaaaaacaaaaacaatgtttaaaaagcacacatttttacttcaacataatttcttatgcatgtgcagccaatggaaaatctattatagctattgttgccttttgaggttgagaggaaaggacagagggaaaaattatttacttagtattccttgtcgccatgatctttgtccataaaagtcaagaacgcctgtttgtgtttctaagggatcaggattgggatacattacagaagcctgtaaattaaaacacaaacctaaataatagtttatggaactcatcgcaaatcaactcttgcccaacctttgactgaacaaaaaagttttcataaatacaaccaccaaatatatattcaattatcaaatttgtgaatattttaacataaattttaacaaaaattaagctaaaaatgtttcatatttaggtagtctcataaaaatcaatctgattctgacaaatgatttcacaggtaatttcttcacttttttaatctttgctctaataaaccagtaaaaatatat

SEQ ID NO: 266816 - DNA, 809 bp, Homo Sapiens
cacatacactttattgaatatcatatttggtgtttaatttttgctaggattataggctggactccagatccaaacttgacatgtagcagacccattaaaaacatacattaagcccctagcactgttttaatctccatggcctggctgagcttctgccatctgtcttcctaggcaccatgaggtctggacatctcatttggcataactcagctgtggccattggtggatctcatccttagtactagtccctgctggcaggggtgacccaggcccacataagccattgctggcctccttggaggacttagagaatcctgagattgcccatgaggatggacatgcctttcagtctagcacccacctttagtgatgcctgtggagattgagaagctcacaggggccttggatgtctttcttattacctccattgtctgcagcgtgactcccatactcttgagccaaggtagagaatttttaggaggcttgtgtggaggtttatggtggcccccatggttctgtgagactggaagaaagcacagaccccttagacttctccccaaggagaatacgtgagactagtggaggaaaggagagtaatgaaatatgcatttcgtgtcccaggctatcagagcacagctctaaggaaaaatacagggcatcgtatagcaactggcacagctctgtgagactgggagatattgcacaaccttgaaaaatcaagatgtgaccctactgaatgaacaaaataaatctccaataattgaccataaagaaatacaggtttctggctgggtgcggtggctcacact

SEQ ID NO: 266817 - DNA, 835 bp, Homo Sapiens
  misc_feature (126)..(244): n is a, c, g, or t
  misc_feature (277)..(285): n is a, c, g, or t
  misc_feature (793)..(793): n is a, c, g, or t
  misc_feature (803)..(803): n is a, c, g, or t
  misc_feature (817)..(817): n is a, c, g, or t
gagtcgatatcttgctctgtcacacagtctggagtgcagtggcatgattagctttgaattcctgttcaggtgatcctcccacctcagtctccagagtggctagggctacgggcagtgctgccacannnnnnnnnnnnnnnnnnnnnnnnnnnnnnnnnnnnnnnnnnnnnnnnnnnnnnnnnnnnnnnnnnnnnnnnnnnnnnnnnnnnnnnnnnnnnnnnnnnnnnnnnnnnnnnnnnnnnnngtatgagccaccatgctcagcagaaaattaaannnnnnnnnaacaagtcattagttcctgggaattctatttcacttccaaatccacctcattttgcagtgccctgttcttagtagtcctggtttaggaagagtcgtgtttcacatgatcaaggtagccaacacaatgaaagttgagttcacagagtatttatttattttggtccctcacagagtatctatttatttttggtccctcacagagtatttgtttatttttgttccctcaaataattcagcacaattaaattcagcaaatatttattgaacacttggagatgatgatggaaaattatgttcacatggtgcccatttggtacaacggaaatggcatgagatttggacccaaaccagaattgtcttaaatccctggctttggtagttttaggtatgtcatcttgagcagttcacttcactttttgagccacaatttctcttccttacataaagatatttataaataccccacaggttgttataataaaggttgaagatgcttggcacataagcnaaaattatgnataaatatgtattnaaatataaaataactaca

SEQ ID NO: 266818 - DNA, 605 bp, Homo Sapiens
gaagatttagccaagctcagtgactgccttagcagttatgagtcatattaataatgcctacatctgcctccaccaaaaggctctagggtctgtctccgaagtttattaaactcttccttgggagacttgtgcttgggacttagggttctaagtcttttctttcattatttttggctgtaactcacttttacgtggttgtggccctgggcaaaattttgaaataggtaacttccctttgcattctcccagtactataagacttcatacgtcctgggttttagggggtgcaagccagtccttgcattttaccaggattcttgaaggctgcaaactcgggatgtaaacacaagccattctgggagagcatacttgagacattggaggcctcttaagatgcttgccttctcaggagctcctgtctcccaaaaacacaacacaacaaagcaaaacacagaaagcacttctaatgaaagacttttatttaaatgtaaggaggcacctacttaaagtaactcttaagaaaatcacttaataaatatatatgacttttgtaatgtaaaaaatgtcttcctaacttatttgttttaaaaattttcaaacttttt

SEQ ID NO: 266819 - DNA, 731 bp, Homo Sapiens
  misc_feature (265)..(265): n is a, c, g, or t
  misc_feature (437)..(437): n is a, c, g, or t
agcctacctattatacagcaataaagtggttaaattaatgaagtgtttcattgtataaataacaaacttgaaatttaatcaatgcttccattctgggggaacagccaccagcatcagagagctaacagctctgacacctggacaggctgcaaactgcccaggcatgcaggccgaccagccacactagggccgccttccccgccacgcagtctccgggggcggtgggtgaggtggccccacctgggggtggcctctgccttgttcnctgcctttgcttccctcctctcttcctccaaggtacccgccacagccttccaccagctcagggctcctctgcttccctcttctcttccttctgccggctcagggctcctctcttcatggtgccgtcatcctaacccgcaatgggaaaagaactccggtggaaatgaggtaanaaaccccctggatacagtcatggaagccctgcagccccacggaggaggcactgcagctcaggaccagtcactccagagaaggcctgcgtgcctgcagggaggcagcgggtgcccacagccagtggtccctgtttctaggtgggaggtggggtctgcttacatgcagcgaggggttccaaatgcagacctccccgtgccaacaatgaatggcaaaggcccgtgcccacgccgttctcaagctctgagaggaagtgtcagccctccctcctcagacaccagacttcagcacaattg

SEQ ID NO: 266820 - DNA, 878 bp, Homo Sapiens
  misc_feature (254)..(268): n is a, c, g, or t
actcagtcaagtcttctgggttccttcctgtcttgtgttgtttgtagggacatgcttcatgtgaaagtttaccttcacctgcaatagttttgagtgattatttgaataagcttaaattcaggagaagtaatgtttccacgtgtggaatggcaggaaaacttggtgcactaacttcagcttcagatgggcttgtgccaactactctgtggcaatttatatctaatactatttcttcaacttgccagtttttcttnnnnnnnnnnnnnnnctctttaaaatacattctgtcattaggtccagccagcagtgtattcttagggtgtaagagatcatttctaagaggtgtagacatcgaatggaaaggcgcatgcaggcccctgtggatgtggctttaatggaagaatagaggggatgcttctttggggcctgccttctctcctggcatctgcagtggctgaggaggcagcagaggtcatgtggtggatttgagttttcccacccatgtatttcatcaggatgaggttgggcaaatagccatctgctgctgagcagggaccgcgtgcgaccctgggtttccacacccaccctttgtgtagggaaaggtgtgcaattagacacatgtgttaggttggacacatcacctcctttccctagtatcctcagtgtaaaacagtcagatttctataccatatttgcagtatgtctaaaaaagggtacatggcaccttactagttaattttctttctagttctgcagcaagtttggggaactactttaactttttagaggccactgtgtcctcttttcatcattttgaaagaaaccacaaacattttatttgttatccatttttgttttgtttcgttttcgagatgggg

SEQ ID NO: 266821 - DNA, 502 bp, Homo Sapiens
  misc_feature (99)..(99): n is a, c, g, or t
gttgggattacatatagcaaaaccttctgaaatcataagaggcactgagacactttttaaaaaccctcaaaatggtctggccttaaaaagatttttaanaactcccaggacagttggcctccatgcagccctcaagcagggaggcggaagccctgaggccacactgccacactgggcctggaagcagagcccctgacagcctggcaaatcctctgaaaactctctcctttctaaggtcatgtcttcccatctataaaacatccgtttatatgtatttagaagaataaaagccattttttagacagtagggcctgttcttcaggattccaattacgtaaatctacaaggatccccttgaaaacaagtgaagttttctctgaaccttctctggggcagacgctaatgaatgcaatactttcattgctcctgtaagattcacttcaaggctgctggcaaaggaacttttcttccatgagcacgaattggtttcctgctgctgctg

SEQ ID NO: 266822 - DNA, 629 bp, Homo Sapiens
  misc_feature (425)..(484): n is a, c, g, or t
cagtcctagcgtagcgaacgttcctggagtggggtgaaggatatcaatatactaagttttaacagataccccatttaggtcagcacttgattcgttgttgctgtgaaatatgtccatgggacaaaagagggaatatgaaatatttgcatatgggaagattatagagcataataattttgtaaatggagcaatctcaacctttatttctagatcacattttcttgatgtcttccttcaaattaatgaccttggattacataaggatttctatgcattcattataatttgttattcctttcaatatccttgtatttcaaatcttccatataagaattagacatggcaattcttaaattgattcagaatggtctgatactattccagtatcacctccttaattctgtttctcctcgttttcctgattnnnnnnnnnnnnnnnnnnnnnnnnnnnnnnnnnnnnnnnnnnnnnnnnnnnnnnnnnnnngttccttattttttgtttcttacctcttactgtttaacctgttgcttccttctggattaatacatttagagccattcctttatatggtcacatttcctatgactttactcaattacttttaaaatcctttctattctgagactaa

SEQ ID NO: 266823 - DNA, 339 bp, Homo Sapiens
tgacacttgcacccagccttaaggtcttataactagtaaatatctgcattaaagaacgagttgaatgaaaattctgataaattcctacttaaagtgtatccaaagaaaacggaaaaagtctaggagttagtgatattagattcagaagaatgagctttgtaattcttaaaaattagtctcaggaatagaaagggattttaaaaggtaattgaggtaaagtcatagggaaatgtggaccctataaagggaatgggctcctaaatgtatttaatccaggaaggggaaggccaacaggggttaaacaggtaggagggtaagggaaaccaaaaaataggggaa

SEQ ID NO: 266824 - DNA, 515 bp, Homo Sapiens
  misc_feature (189)..(189): n is a, c, g, or t
tcaatatccttgtatttcaaatcttccatataagaattagacatggcaattcttaaattgattcagaatggtctgatactattccagtatcacctccttaattctgtttctcctcgttttcctgattttccttctcattctctccttccccggctgctgtctctctctccccggtcactctcttctccnctcgtttccttatgtttttgtttcttgacctcttgactgtttaacctgttgcttccttctgggattaatacatttagagccattccttgtatatggtcacatttcctatgactttactcaattacttttaaaatcctttctattctgagactaatttttaagaattacaaagctcattcttctgaatctaatatcactaactcctagactttttccgttttctttggatacactttaagtaggaatttatcagaattttcattcaactcgttctttaatgcagatatttactagttataagaccttaaggctgggtgcaggtgtca

SEQ ID NO: 266825 - DNA, 837 bp, Homo Sapiens
  misc_feature (55)..(95): n is a, c, g, or t
agagacaaggtctcactgtattgaccaggctagtctcgagctcctggcctcaagnnnnnnnnnnnnnnnnnnnnnnnnnnnnnnnnnnnnnnnnngcatgacccaccatgcctggccaaagacgatatattgtaagacctctatccaattttagaaatgctaaaatattaaaactgtgaaacttagattcagtgagtcatagtgtacctttatattttatatttccatcagtcatattaaataatgacattatatagagcatgacattgtcaattaaggaaaagcattatccctaacctcaaatagttaataacctaatgagacaaacagcatatactgcactgcctcaacttccttttcctatctttgaacaccacaaaaccttaacaccatgaaaaacctatcttgtaaatagatctctgttgtccctgttatgacaggggggaaataagaaataagttctctcttagtttttcattcatgcacatctagggcctgataccttcaacctgatatcttcaacttactactattccccttgggtttgtttttggcagatggtctaagcctaaaacaagacaatgagactcaaagaagacaatgagctgacaatggctaccagcagctgcttatttatataagtcatctgagaaccctagaaatgctcaatcagtggaactgtgtgcaatattttggcaaggactctccagataatgaacaagatagtactaatatctctctgtattttcaggacgaaaactcatgagaagagatgtacatctgagaaatgaaattgtgtatactgttactgctttttccatatgctcataacttttt

SEQ ID NO: 266826 - DNA, 716 bp, Homo Sapiens
tttactatatttatatatagtccatatttataatcatgattttcttcacagaaaagcatcaaagtatagagatgtttgtctcacaactctcagcaagctacttagcctgagatgggatcacttaaaatttacttccatttctcacagaattgtgtctcagtgtagtaactaatttcaagataaactttggggtcatgtgcagcacttaaatagtttgggaaataaacacttccactgttcaatgataaaaatcattgctctctggggatgcaggaaaggttttctactctttggaaatatattgagggcttctttgtgggagaaggagtcaatctgataatcataccatcttatagataagtattatcccatctcaaaaggcacatggtacatcatgacatgcctttggtgaatcatgacaatgcaattttagacacaactaagaacagcaatagtctcctggttataaattcccttcaggcagtgccagtgacagttgtatagggctcccattggtggtcactctcactaaataacatggttgtcatttgtccaaatagtctcctgagaaaaccagtttctcaccttagggaattctcctcctgaaaacattctgttaactgcatggagatgataaaactacatgcaaatacagcaaagcagcactctccataggactttctaagacaacaaaaattccctggtctgcacggccc

SEQ ID NO: 266827 - DNA, 603 bp, Homo Sapiens
tgtggaagttgttctagaagttagatggacagtgggagcacattcgtgagtggggcttgggagagctcaaaagtggcactttgattttaggctgggcaggcagaagtctcacagtaaaatatatttcactagacgtccaaaccaacactgcattgtagtaacctcttctgaagtaactggttaaattaataactggtcccataagtcagggtcaagccacatttataacccattcgggccggccatgaagggttctgactcgacattggtatttaaatgctgttactttcccaatgcttagtagcacttgagactttatttccatcgacaaaaaccaagaaggccacagaagtagcctaacagtcctccctggtcatactcgtttcaaacaggtctgcctgtctagacatattcaggcaggaggttgcttgctgctatcttgaaaaccactggaagattcagcttcttggggacctcagagcccatattcatatggaagcccacccatataagcctcacagagcaaatcacagcaatgttgaagttgttattttcaagtgcttatttcacgacattaaaaaaaatattttttcctggtgtatt

SEQ ID NO: 266828 - DNA, 624 bp, Homo Sapiens
ggaccaagcccttctctgtctcttgggactaggtaagacctgaaattcttatacgctccaaggagatggaatggacagactagaggttcagagccagtctaatttgatatgaaaaggtaaaaaaatttgatacttcttacatctcagttctgtagaagaaactcaaacccattgtgtaattctttcacttgatatttggtataatagtcatggtcatcagctcattctgagcaggagtgctaatgaaggatgtgtgtctgtcaagtccaggctgcttcatacaactcttgtgcactccaccctctatccccccatcatcctcacccccagttcttcttttgacctgaggtctgtttccccatcattaccctgcattgtttgcctctgcccttgcaaaagagactgaataagtatctctcatgtgacagctcctcaaatatttgaaaatagttgttctgtcctttgagttaaatagcagcttttgttgattgtctgtagtctttaaattagtctgtagtctagatagtgtgagttggaatagttcctgacctcaaaaatgttttgatcttccttggggaccttgtctagatctgggaaggagtaccttgaggctgaaaaaatatg

SEQ ID NO: 266829 - DNA, 831 bp, Homo Sapiens
  misc_feature (175)..(227): n is a, c, g, or t
  misc_feature (296)..(304): n is a, c, g, or t
  misc_feature (674)..(674): n is a, c, g, or t
  misc_feature (739)..(739): n is a, c, g, or t
  misc_feature (776)..(776): n is a, c, g, or t
ctaaaaatacaaaaaaatcagcctactcaaataacgttttttataatacagagaatttataaggtagagctgttctgtctaaacagtagccactaactacatgtgtccatttaaattcaaatgtaaaataattcaaattaaataaatcaagttcctccagcttactggccacatnnnnnnnnnnnnnnnnnnnnnnnnnnnnnnnnnnnnnnnnnnnnnnnnnnnnngtatatagcatttccactgtcacagaaagttctgttggacagttgatatagaggttggaaaagaatgannnnnnnnnaaatgagtgcttaatgaaaatagtcatttaagttggtaaaccggatcataaatcacaaaattctttgcccttgatatataatattagctgccatttatgaggtactagctaagtgtcagattcagtctaaatggtttatagtcattttctcttcctcttatttcatccttgggtaaggaattctgtaaggcagataccttaatctttgtttgatagttggaaaaattgagatttagagaggttaatttaatatctcagaatcatagctaagtgactgagccaagatttaaatctaagtctgtcagactactgctcccattcttaaggctttgctcttaactactgcactccttgccatatattgcacttntcctgtgcatccccccaaatattattaatcacatttgagtatctcttacattccagaaattttanatgtattgctaattcttacaagaattctaagaacccngttaggtagatactagtctccttttgtagatgtggggactcaggctaagagttgt

SEQ ID NO: 266830 - DNA, 525 bp, Homo Sapiens
cctatgtgaaattttgcaattattttctatattcacctaaaatggcattgcactggaaatatagtatgcttcttttgtgatttctacatatctctgtttttttctcatatcagattctactttacccctcagtgacagtcattttacacccctctctgtctcaatgtccgagggcacccggggaccatccggggctgtaagggcataggtgacattgctgggcctgagctggaagtgccgattaaaataaattgaaagctgaattaccttatgaacagctgctttacccaggaacaaatgtggagaggaactccttgaaactgtgttctcaagtagaccacttttgagaaattatacatttatcataacatctcaagtcctgctctacatagaatgaccattattatcaagaaaagttctccattccctgtaattcataaggcaatgcaggcctaaccagaaaacaggaactgcgacaaccttgcatcagacacattcgatctctctattcatagttgcattctc

SEQ ID NO: 266831 - DNA, 443 bp, Homo Sapiens
  misc_feature (116)..(116): n is a, c, g, or t
  misc_feature (289)..(289): n is a, c, g, or t
  misc_feature (328)..(328): n is a, c, g, or t
  misc_feature (400)..(400): n is a, c, g, or t
  misc_feature (415)..(415): n is a, c, g, or t
taaaatgtagcacagctcactaagcaattgttgaagtatggctgcctaagtgtgacaggcaggaaaaaatgctttaaggacacgttgaagcatgtccattgaggcggttagctggngaaaccacagagacaaaccaggctggaaagtaacaatcataactatatttgagacaagtcatcatcagtctaaaaaagaggcccatttcttgggtgtaataaggaaattatctttttgaaaccaacaaccaacattcacggtttaatatgggaaacactcagtattttctaantactgtttaaggaaccaaaacaggggagaccactgttcntaggctatttaagggaatttaccactttggattaaaaaccccggttcttttaccctggaccttccgggggtncctggggcacccctnccctttcctgcttcctttgggccttttt

SEQ ID NO: 266832 - DNA, 1141 bp, Homo Sapiens
  misc_feature (265)..(265): n is a, c, g, or t
  misc_feature (982)..(1036): n is a, c, g, or t
gtaaaatgtagcacagctcataagcaattgttgaagtatggctgcctaagtgtgacaggcaggaaaaaatgctttaaggacacgttgaagcatgtccattgaggcggttagcggggaaaccacagagacaaaccaggctggaaagtaacaatcataactatatttgagacaagtcatcatcagtctaaaaaagaggcccatttcttggtgtaataagaaattatctttttgaaaccaacaaccaacatcacgattaatatggaanacacttcagtatttcttaatactgttaagaacaaaacagagagaccactgtcatagctattaagaaattacacttgaataaaacccagattctttaccatgacctccagggtccatggcacccctccccttcctgctccatctgcctctctcgccactccctcccctgattgttatttatatcaaatcctggcacctggccatcagtccctggactatgccaagctcttttctgctttggggtctttgcatgtacctctccatcttcctgaacacattccccagctcttcacttgccagttcttgctcatctttcaagagcctttcccctgaccttcatatctagaggaggggctgtccttccttctctttttccttttagtgtcttttgcagcattccttatatccttataatctaataatctttatctgttcttatttattttatgtatgttcttctaaccttgcaccccacaaggacatggactctattgacacactatccctagcactcagaagaatgcctgacacatagaagttgatttgcaaatgtttgttgaaagaataagtgattgaatgaatgaatagaaactattttcttatctatgtgccaatagtagccaggtagaaaatataatggtgatgaaaagagattgataggaacaaaaattattaaaaagagcctaggagtaaactttaaaaatacgtaggacctacnnnnnnnnnnnnnnnnnnnnnnnnnnnnnnnnnnnnnnnnnnnnnnnnnnnnnnngattttaaggataaataaggcaaacatgatccttgcttgttttgaacttagaaaaatacaaaacttatacctgggagacacagggatgaagacatcatttctcct

SEQ ID NO: 266833 - DNA, 796 bp, Homo Sapiens
  misc_feature (628)..(636): n is a, c, g, or t
caatgcctagaaaatgggctaccagatatggtagtggtcaaagccccgactttcctgtctgaggtactgggtttgctctaaggtagaccttggcaaggcccctaatggtccgtccagcagagtgatgctcgtgtccctcggctgtcaggtgagcgtgggtttgtgaatcagctttggataggatcatttctcttggatttaccactaggctctgtccctaacagggtctacctacctgacccccaagctggctcagtctcagcgctaaggtgtactatggaagggtccggacaaagactaatatttgagatctcttagtagcacaacgtgaaaatggtaggggattttgtcctccaacaccaaagacacttgcttttttaagaacaagaggatgtgtaattcactgaataaaatggttttcctccgtctaggggggattctagcatctgcccttccatttttgttgagagaagtattaagctgatctcctcaaatgccagatgttaagagagtaacaactgggttgatcccacctgttgcttttacaccatagctccattttccaaaaatatatatgtatgtacatatatatatttcagatttacagggaatttttttgtgaacaagnnnnnnnnnttgtctatagaagtcacaagtgtctttcttctcaggagacctcaatgatttccatgctgcccgaaaagctagactgactgcccactttccccagctcttcccgtgacctgttctctgacatgatgctctctccaaattccatttggcagcttctgcgttt

SEQ ID NO: 266834 - DNA, 520 bp, Homo Sapiens
gatatttaaaagataggagatagtacagcacgtttgtacgctgatggtaatgattaagtaaagaatgagaacgggatgattcagaagaaagggcataacttgaggagtgaaaccctgcaacctgttttcaaggccgggcaggagaaggaatgcttacaacggaggggaggcagaggtgtgggcacagatgcaggcgggccggcggatctggggaggaaggatgaagggagttctcttctctttgtttctaatttttcagaaagcaggaagccaagtcaccaggcagaactgatagcatgggaagtgggttcccaccagtcgcatgcagctgctctggtatggccatggtgctggggatgagtcagaaatctcaggtaggtacaacagaggaacaggcagatatggtagttaagggtattttgaaagaattattatatttgataatttgagctgcttaaggagggaagaaaggacatgagaggggtacggtaaaaaaggcagggaggtctcctgtgccgaa

SEQ ID NO: 266835 - DNA, 821 bp, Homo Sapiens
  misc_feature (91)..(441): n is a, c, g, or t
tccacattctataatgagtcccctttcccctttgttttccttccttcctttccagatccaagagataatcaactaacagtcaggtaccctnnnnnnnnnnnnnnnnnnnnnnnnnnnnnnnnnnnnnnnnnnnnnnnnnnnnnnnnnnnnnnnnnnnnnnnnnnnnnnnnnnnnnnnnnnnnnnnnnnnnnnnnnnnnnnnnnnnnnnnnnnnnnnnnnnnnnnnnnnnnnnnnnnnnnnnnnnnnnnnnnnnnnnnnnnnnnnnnnnnnnnnnnnnnnnnnnnnnnnnnnnnnnnnnnnnnnnnnnnnnnnnnnnnnnnnnnnnnnnnnnnnnnnnnnnnnnnnnnnnnnnnnnnnnnnnnnnnnnnnnnnnnnnnnnnnnnnnnnnnnnnnnnnnnnnnnnnnnnnnnnnnnnnnnnnnnnnnnnnnnnnnnnnnnnnnctgtggtcactcatatttggctcagaataaatctcttaaaatattttacacttgttcggcttttttcatcaacaatttcataaaaaggaacactcagattaaagaagagctctcagaagttaaaaaaatgagcaaagatttgataaatttccacagatctattagtctcctgaaagtacaacaaaaatatagttgagacaagtgcctcagtgcagaagtactccttaatatcacctcacctgttatgatgactactatcaaaaaaacaaaagagtgttggtgaggatatggaggaattggaacccttgtatgctgggtgggaatgcaaaattgtgcagccactatctatgccaaaacagtatggaggtttctcaaaatat

SEQ ID NO: 266836 - DNA, 523 bp, Homo Sapiens
aactactgtaagtcttctgatacttgcagtttatttttttataaaatagataaaacaattaggagaataatttaatacaaatcttgtttccaagatttaagagaataagcttttattaaatcacataaattagtattatcattgtatgttatggactaaaatgtttcccatctccctaaaattcatgtattaaaatccccaataagccctccgccccacgagacggtatttgaaagtgcggcctttgggaggtgattaaattatgaagggcagagccatcacaaatgggattagtgacctcatataagaaaccccagagacgccttcaccccttctacccacataaggacaaagctagaagacagccacctatgaaccacaaagcaggcccttaccagacatcgaatttgccagtgccttggacttcccaccctccagaactgagagaaataaacttctgttgtttataagtcactgagtctatagcattatcttatagcagccaaaacagaccaaaaaatct

SEQ ID NO: 266837 - DNA, 805 bp, Homo Sapiens
gcacaaagttaatgaaataattattttttggtcaccccttgcacggaaaatctgccaatagcatttgacatttagacccactaggcatcttaagtagcctgctactcacaagacctaccttttcccactgccctattttacaaacactcttagctctgtctcctgctctcctctcctccaggaagctggagaacaatccacgaacagtagtgactaagatggcccctaatgaccatatgcttgtattatggccttcccttgagtatgggcaggatccatgaatgggatgggaatacattcctttgattaagttatgctgtgtgggcaaaagagattttgcagggtataaagtccctaaatcagttgactctgaggttaatcaaaagagagcttttcctctgtgggcctggcctaattaggtgagccccttcaaagagggtcggaggctgttcctgaagacagagattctttggttgggttttgaagaagcaaagggctgtgttgtggagagggccacacataggaaacagtgggtggtctccatgagcttgcagcctcagtgctctccctgcatgaattgaattccaccaacagttagtgagtttggaaggggatcccaagcctcaggtgagaccataatcaggctgaccccctgagtacagatttgtgagactctgagcagagaactcaggaaaaccaggcctggcctccacagaaactgtggaatgacagatatgtgttgtttgaagctattaagtttgtggtaatttattacgcagcaatggaaaatgaattcacacacctg

SEQ ID NO: 266838 - DNA, 796 bp, Homo Sapiens
taagatttgattttcttttatttgtggcactaaaagacagatagctgtgatgaagagcaattggctggtagctcgtgcctcaccaagagtttagcaacgttaatcagtgaatgcagaacagcttccattctacctgaggcctagatctgagatcgctgtgaaacattaaagtgacctcaccatacttgttttctcactcagatacacattttatttcatcaacacatcttgatttctattacttttttcaatataacaaaatgttttagagatatatatgaaaaactactgctgtagttagacctcattataaatattggtgactgggcaccatgtgagaagaccacgatatcatacaaagggagccaatgagctgttggacaaacgcgtcaaggctgaaccaaaattgtgacgctctcagcgcaactttgatctgaactcttgacaggtgggcatccaacatccctgctccttgaccctctgcaggattccagaaggctcccagtgaagtcatcaggctccgtacacaggcaccgtgggggaggcctatgtcacttcatagcctggggaatggctgtccatgtggcactgcccatccactccagtggtggtgtgacctcagccacccgccacccttgcaggaacctggcatgccctggccacatgatcacgtaggactgttttctgggtggtaatagttgatttttaaaagcttagttggtcagatcatggactgtgaccctctgtgaagtgttagccccaaatatttgaggaagaagaatccagcagttttact

SEQ ID NO: 266839 - DNA, 873 bp, Homo Sapiens
  misc_feature (346)..(346): n is a, c, g, or t
ctttactgaccccagtgcagactgtctaaatccccccagcccacccctgcccccatttgcagccttggtgttcgttctaacactgcattttcctacacccctttcctggactgctctctccagaaacagcacagctcatggagggtgagatcatgttagggaaatcaatttttatctagtcatttgttcagattatttgtatttaaagtcattaacttgatcccttctccagactggccatgccaccatatacctttccttttgtattccattgtggaagcttctaggaggctgaggaagcagggagatccaagctccagtcctggggtgttaccctggagggggngaagtcacttcccttctctcagctgagtttttcacgtgtaagatgagaatggctgatggctgagagcccaccaaccttccccaccccgtatcagtttgaccacgggccttttgctacattctatccagagagcaggcctgccagcccctctccactgagaagttgggctgagagtatggggaaaagaatcaagagacctgactgccgccaactcactagtgacttagatacatcccctccccctgctggggcctcagtttccccatctgtaacttgagaaaatagaactagatctgtaaagtctggaactagatctgtaacgtccttataggtgtcactagggggttccatgagaggtgtgtgacaggcagtctgattcctctcattctccatagtctgtttcctggaaagtcgatgtaattaactgatggcccaaaaactacctcaagagacctggccctgttaagacggcttaaccactgagatcccgttctattgatttaataaagtcaaactattggaaaaaa

SEQ ID NO: 266840 - DNA, 416 bp, Homo Sapiens
  misc_feature (35)..(35): n is a, c, g, or t
  misc_feature (51)..(51): n is a, c, g, or t
  misc_feature (222)..(222): n is a, c, g, or t
ggtctcttgaatcttttcccccccatactcctcancccccaacttcctcantggaagaggggcctgggcaaggccctgcctcccctggaaaaaaatgtagccaaaaggccccgtggtcaaaactgatacggggtggggaaaggttggtgggctcctcagcccatcagcccattcctcatccttacacgtgaaaaactcagctgagagaagggaagtgacttncccccctcagggtaacaccccaggactggagcttggatctcctgcttctcagcctcctagaagcttccacaatggaatacaaaaggaaaggtatatggcgcatggccagtctggagaaagggatcaagttaatgactttaaatacaaataatctgaacaaatgactagataaaaattgatttccctaacatgaa

SEQ ID NO: 266841 - DNA, 936 bp, Homo Sapiens
ggctttcttaggcagaaaaggagacaaactggcctttgtggaagagaaagcccctgcccaacaaaacagctatgactgtgggatgtacgtgatatgtaacactgaggccttgtgtcagaacttctttaggcaacagacagaatcactgctgcagctactcacccctgcatacatcacaaagaagaggggagaatggaaagatctcattgccacacttgctaaaaagtagctattgaagtatatttgcgacttttgaaggctcctctttctgcccttccccatttgttggatggctgcaatctcagtgcctgagggaagatgcctaggtagaggaaagcttaatactctttttccttgaaagaatatcatcctctgcattatccccatggaacgtttcacttgtaaccctgactggggagcaatatgttctgtgaaaatatcttgaaattgtacaccaaaaccttacaaccaacttatttgaacatttattacacacagggtttacgtaagacttttcttattggtatataattaatttcctttggtctcccttatccacattggcttattctggaggaaaagcagtgatctgtaaaacaaatcaagaatatattaaatctagaggaatgcagagaagaaaactataaaacagaaccaaaaacttgttgcacagcctacataattaagagatcaactggctggaagcagatcaaggcctaacttcattcaagacctaaatattatgagactcagttattcggttttatgtgacatctcttccattcgaccatgcacaggcttttccagctatctatataatgtttgcaaatatttgataaagatgatgttaccctatcttcctccatctgattcctggaatgcttgaagaaaggggaaatcttgagtaacctcattaaaattaatgtctggtggaag

SEQ ID NO: 266842 - DNA, 381 bp, Homo Sapiens
ggtatttaatgcttcttgagagcattaagagatgtatttcatggaaagtgtttaatattctgcctggcagtaaagagtaaattttcttcccactccagatcttgattcctctccttagagacagcagctgttactggtttcttttatgatgtctctgttgagatattttgatagaaaaagcagtaaaaaatggaaactggcacatttctagattttattgactttcttaagaactttgacagatctgaaattttaccccatttgtaagctaacaagttaacctgcctcagtttcatggatgctggcaggaggcagcatcctggggtcagtaggcagcatcgaacttcatgtcagttccctttggacattcatatctcacgg

SEQ ID NO: 266843 - DNA, 562 bp, Homo Sapiens
cacactgaggaatgcgtatgcccaggaaggccctgatctcgcctgtggctgccatgaggccctgcacaagggaagagaagaagagaaggccgagtggagaaccgtggggtccctgaagcttcctgtgctctagcgcacacacagccctcagcaaaggtaggagtctggtgcttccaggcctgtaaggaattcggtgcctaaccattcggtgataattagctaaccacactgagacttcaatggccacacctgaaagagaagacagactttaccagaattagtcccaagaaagtcactgaacaaaggaacagcagcagcagaagcaacacccacactgtggggcaggacatctgatttcccagagttgccacattattttttaaaatgtctgattttcaagaaaaaaatatgtaacaaagaaacatgacggtatccgttactaaacaaagactttaaatctgctgttataaaggtgcaccaagaactaaaggaaactgaaaaaattaaaagaaaatgttagagtaatgcctcaacaaataaagaatatcagtaaggagagata

SEQ ID NO: 266844 - DNA, 787 bp, Homo Sapiens
  misc_feature (776)..(776): n is a, c, g, or t
tcttgactccatgttaaaaattcatgttaggcatgattttacaagcatttggtgtcctgtacaatgtcattaaaggagtatctgtaaggggaaacgtgagatattttctgtgaagttggaagacacggtactcaagaccatcctcactttgaataccagttgtatgtttgggggtttcccaagatcactctcagatttaacaagtcactagaaagacccagggaactcactgaaagccgtgatatattcatggttatggtttattacagagaaagaatatagaataaaatctgccaagggaagaggtgcacagggtggagttcaatgaagtgggggtgtgggtgtttcaaatgtgaggcttctattattttcaggatgcattaccctcctgacatcaatgtgtgacaatatgccatagaatattgcccaaccgaggaggctcctcagaactttagtttcccagagattttactggaactctatgtttgactgcccacatggctgacctctagtctatggactgttggaggctgaatggataccatgtggcccaaagacgtcatcataattcacatgaacagcagcactatttcaatttatgacatgtaatatgtatggatcagtggagcttgtggttttcattgttctgtgtgtgtgagggtgatgatagaaaccatgaattattttgcctaatgacagtattttaatgcatatcttttgaatttagcaggccagtagattttttgttgattctcagatcagctgaggtctccccncgtgccgaata

SEQ ID NO: 266845 - DNA, 391 bp, Homo Sapiens
  misc_feature (298)..(298): n is a, c, g, or t
gcaaaatccagtgtgttctttggtcagtgatgtctgagatcccaagttccaatgtctgtctgaaattatgaaaatcaagtcatgggagatggataccctattccctgcgatccacttatttcacattgcatgcctgtatcaaaacatctcatgtactccataaatatatacacttactatgtaaccgcaaaaattttaagaatatacaaaaaattttaaaaactgaattaaagagcattgtagataattgtatttttcaaaaaataagtaaaatatctggtatataacagttaaaaanaaactgtattatcaactctgtgaccttagaactacctttttacattttcaaagattaactctccttaaaaaaataaatgtacaaattattacc

SEQ ID NO: 266846 - DNA, 521 bp, Homo Sapiens
agactgcatagggctcggcgtggtgtgtcgacaacatctgcacctgtggatagggccttaccacaacaggctcttgcttctcctcccgggactggagggagctgctggaactcatgtgctccctggcactgacttcagaatctcgaccagattcatcattgactagtaaagacattaagagtgagacagtatgtcacagtctcccagtgtaagatagcagcacagacaagagtggtacctgaagttaaatctcaggattgacaaagtggccatttccttgtgatgttttcttaacaaggtcaatatgggcactggattctcctgatggacatcagacaaaagagccacaactgtggaatatagaatttattctggatattgtagccttatgaacaaactacctgaaaatcatctaaaatgagctgaaatagttaaaagtacaatacaggatgtaagacaatttcatttaaaacatcctcttagaaagttataaaagcctgacattaaaaagatattttatg

SEQ ID NO: 266847 - DNA, 294 bp, Homo Sapiens
  misc_feature (19)..(19): n is a, c, g, or t
cctaaaagtttgaaatccnctttaaccccgggattttttagccatatgtaaatttttagaatagttaagagactttgttgtttcccatgtttaatattaatttcctagttttattctattttagagaatttagcctatagtatttcaacgttttggagttccttcctctattaatatataactaacttttgtaaatgcccaattagcactgaaaggtatatttcttttttccaagagtatcagttcttcttaaccctttttacttgtctattgcacaattaaaaaggtatgaca

SEQ ID NO: 266848 - DNA, 912 bp, Homo Sapiens
  misc_feature (146)..(154): n is a, c, g, or t
  misc_feature (705)..(869): n is a, c, g, or t
ctgtataaagaatgctttaagttgtcttctccgactgccccttattcacttaaagacagactcatatgactggggcagtgacttgtagagcttctggtcctttgcaaataccatgctgtcctgtcttaaaagagctgactaaattnnnnnnnnntccacctcaaaaagaagtgaatggctgttatgatcacctcagaagtatctcaggacaaatatacacacacaccccttcatctgacacctgtggcttttaaaaagaaagccagataacggatagccatttaatcagtttgtatccacacaagcacttctccgatttccctcatgcattaggtaatgacactctcccctgagattgatatgtatattataattaataactagcgcagcgggttctccaaaggggcagctgcaggaggaataccacagcctctgctgtgacccgcagacctcagtgggagggacatgggacatggtggctcgcactgtgttgaccagcagcccctgttcattgcatggctgggtctggttcctacctagtgggtcaaggctgatatattaaagttctgatgttttgtctcaaaaagaccaatatgacctagttggagtacgtatatataaatgtgtatgtgtatgtagcattctatattcacaagcctttaagtgatttttctaggaattaataagaagtaaaggcccaggcannnnnnnnnnnnnnnnnnnnnnnnnnnnnnnnnnnnnnnnnnnnnnnnnnnnnnnnnnnnnnnnnnnnnnnnnnnnnnnnnnnnnnnnnnnnnnnnnnnnnnnnnnnnnnnnnnnnnnnnnnnnnnnnnnnnnnnnnnnnnnnnnnnnnnnnnnnnnnnnnnnnngtcactccatacactccagcctgggtgacagagtaagaccctg

SEQ ID NO: 266849 - DNA, 567 bp, Homo Sapiens
  misc_feature (105)..(145): n is a, c, g, or t
tctctgactgaagtactgttggatttggtaaggaaatccacaaatgccctcaggaatttaggcaaacatttactaaactcaaggctgagaagacccaatataagnnnnnnnnnnnnnnnnnnnnnnnnnnnnnnnnnnnnnnnnngtttagaggtttagttaaaaagataactgcaaaagaatataaacaagttcccctagtatgtaaggaccccggactgagacactgtgatgaaacatgtccaatgagaagcttggatcttaacgggggagggggagagaaacataaggagtttgtatgacagagtgatcaacagcaaaggtctgtactcagattattttagttcatatccttattttgccactgtctaggcaagctgattaactttgctcggcctcaatttcctcaatcgtaaaagagataatagtttctatatcttgatactgctgtgagaatttaaaaaataataatgcatgctaaagtccttaattaggtgttagcacatacttaccatttactgaatcctgcaactacagtagatgctaactgctgccacttctactact

SEQ ID NO: 266850 - DNA, 421 bp, Homo Sapiens
  misc_feature (30)..(30): n is a, c, g, or t
  misc_feature (44)..(44): n is a, c, g, or t
gatccatggcccactgccactcctagcccngggtgaacagagtnagactcccatctggaaaaaagctttcctaaaaaaatccccatatgaacacccaaaattcccatcttggttccttcaaaatcctgttcccactgtttatcccacaaaccctatcaatagcaagagaacaatcagagaggtttagaacccagggaatccttgccaccctaaccccaaaaggagagggaatagttacatttcttggcattctaagctggaacgctgaacttatagaactacttgctcaaaatgttttagttaataatggtaggcacttcagaaataccacaggtaaataagcatctgtagcaacccagggatgacttacacatttacgtgacattgcttatatggggaaaaatgttataatgttctaaaa

SEQ ID NO: 266851 - DNA, 492 bp, Homo Sapiens
tctttgaccatatggtcacagatccagaagccagacgtctgtggggctttgctcctgagactgtgacctttgaatccctgcactccctcctcttgcccatctgaacgccggtctgcgcctgtgactgagtgaaaatcgtcataactgtactcggaggttaactctggcatgaactgggatggaatcccaggcaacatgctggaggcaggaaagaaggccagccggcaagtcagaaccaaacaccctggacggcacctttccttacaaatgcggttcacaggacccttggggatcctctgcgcacactgaggcaagcagcaatggaagaaattatcttccactcccttcttgttgaaaatgtctgttttccagaaatgaattacagtaatagattatgaaaattgtttccattgcctacataacacagcagggaattctaaaatttcaaaacatgtaatatactcaacctgtgcttgagactgtagggtatta

SEQ ID NO: 266852 - DNA, 517 bp, Homo Sapiens
  misc_feature (158)..(168): n is a, c, g, or t
  misc_feature (402)..(457): n is a, c, g, or t
cttcacagtaacgcacggacgatccctaaactgccttgtaaacaaaaatgagagcttgagtcagaggaagccgagacaatatccttcctcgacaacgtgcgagaaccctgacgtcccccagcaaaggaagacgttgcaagcaggcaaaatgcgtcgannnnnnnnnnngtcagtatgatgatttttgcagccacttggctatggagagcagccgacaccccctcttacagccgtggatgtttcctggaagctgactcagtctgttcactggttgagctttgagtgaaaagataacacaggtctattgactcacacacatgttttaagatggaaaactttacttctgttcttggcaggacatggagagagggagggattccaaaaagtctcagcctccatcannnnnnnnnnnnnnnnnnnnnnnnnnnnnnnnnnnnnnnnnnnnnnnnnnnnnnnnctgattgagtccgggtgttcaagggccaacctaggcaacacagtgagaactcatctctgt

SEQ ID NO: 266853 - DNA, 466 bp, Homo Sapiens
  misc_feature (185)..(305): n is a, c, g, or t
  misc_feature (376)..(376): n is a, c, g, or t
  misc_feature (384)..(384): n is a, c, g, or t
  misc_feature (400)..(400): n is a, c, g, or t
  misc_feature (407)..(407): n is a, c, g, or t
  misc_feature (443)..(443): n is a, c, g, or t
gctagccatgaaaggatcaccacaatcaagataatggacatacccatcaccgcccaaaaaatgcccctttagaatcttttcttcccacctctctccccaagcaaccactgttattatagtttccattttctagagttttatataaatggaatcatatcgtatgtactcttttatcagacttctannnnnnnnnnnnnnnnnnnnnnnnnnnnnnnnnnnnnnnnnnnnnnnnnnnnnnnnnnnnnnnnnnnnnnnnnnnnnnnnnnnnnnnnnnnnnnnnnnnnnnnnnnnnnnnnnnnnnnnnnatgagccactaatgcctagtggatcaccattttaaaatagtaaaaaaaggaattaccaattatttttcggnaatttggnggattcactcacggcnatggggnaaccaataatggattaattcccctttttaatccacnggatagggaatttccattgggaa

SEQ ID NO: 266854 - DNA, 680 bp, Homo Sapiens
  misc_feature (125)..(137): n is a, c, g, or t
  misc_feature (151)..(215): n is a, c, g, or t
  misc_feature (224)..(266): n is a, c, g, or t
  misc_feature (291)..(404): n is a, c, g, or t
ataaaatgaagaaggtataggtaactataatatgaagaatgcattggaagtgtaaattttaaaggagtttgctgattaataactcttttgttgtaacttttgttcaatgatgtttgacaaatacnnnnnnnnnnnnnaatttgaggcagannnnnnnnnnnnnnnnnnnnnnnnnnnnnnnnnnnnnnnnnnnnnnnnnnnnnnnnnnnnnnnnnttgggctcnnnnnnnnnnnnnnnnnnnnnnnnnnnnnnnnnnnnnnnnnnnccttgtgccaccacgcccagcaaannnnnnnnnnnnnnnnnnnnnnnnnnnnnnnnnnnnnnnnnnnnnnnnnnnnnnnnnnnnnnnnnnnnnnnnnnnnnnnnnnnnnnnnnnnnnnnnnnnnnnnnnnnnnnnnnnatgagccaccgcgcctggctgacaaatactttttaaaaatatccaagtttctggattttattcacctctacaaaaatgatttaagtcctgtagaaacatgtgcccacaaatgacacagtaatctccagcaatgtgttcaacagcacgttgagcataattgagcataacagacatttttaaatttgttgtctcaaattccatttagatttggctattgatgcaaaattagggaggtcatttttcactagattactttcaatgttggaatccatactt

SEQ ID NO: 266855 - DNA, 632 bp, Homo Sapiens
tggacacgctgtcatcatttgctgcttctcttgcaagaaagcacctccgttgtggacggtcctcgggcacaggggatgagcgctaccagtttcatttgtaggcagggagttctccgcggatgcatggtggcagtctgctttgatggcagcagtttctgcttaggtgacctagaggtcctcagcagtatcctccacacctatttattgaggtgcacctgctggggattcataatgagaatataacaagaggatctcggtgaaaggccttagtgggtgttttgtgtgaggtggcttgtagctagctacttccttacagatggtagagtattccaatcctctttgtgttagggttcttgcttccagtttgggatgtattaaaaccaccatttcactgcttcccttcctcaatatgctctgcagcttttcttgctgtttaaacctctcgcctcagctttatttatttgtaagctgcattactaactgcccagtgattcggtgaaagctttttactgaaaaagttaacatttctagtcatcccaatcaactggcttttttcaaccaaaattttatatcattctttgtctatcagatacgagaggaaggaagataatacgaagacatgttgaatagtg

SEQ ID NO: 266856 - DNA, 742 bp, Homo Sapiens
gtacttcaatcgtagtttttaaaggaagcaataagaccagctactctagtatttcaaattaaaggaaaaaactgatgcaaatattctgtattcaaaccattttttaaaacagtcaagatttataatgaagggaatgttgcatatagttacatatatatgcattatttatcatgtgtgttagacttgaaagattcccaagaattaaattctaaaaagagagaaaactaaaacatgatttcagttttaaaaaaggaaagacatccaagaaatgaatgtgcatgcataaggagctctaatcaactctttctttaaaatgacatgtataaaaatataggacaggcagactttttaccctggagtggatagatattagcaagagatttgtgagccatggtcaaacacccagaatggcaaaggcctggaactagggcatgtacaataaggggagaggaaaaaagcaacatgtcaaaagggcacaggctgtaactgaaaagacttagctgtcaccagtgtgaccctgaacgagtagagcctaagttttctcatccatagagtatatctgccctctcaacctcatagatttgtgagatctgtaaaataatataaattttaaaatacatattgtaagtcacacaataataatggctaagtttcaaaacaaaaaagggaagggccctctgtatttcatgtcgtaacaaccccactcctaattttttcacccaaagagaataacccttcaatt

SEQ ID NO: 266857 - DNA, 797 bp, Homo Sapiens
atgggaaatgccccttgaatcctcacagccacctaggaacatatggagtttttacaaacgctgcatttgacccgagtccttaagagacctgtccttttcctggtctcctcattcagcctccatatgatcctgttgtgaacatcaagtttcctgctacactggacttaactataatgcatttgctgcaggtttccataaacacccatgaatcaaagacatggaattaccttagattagctctggaccagcctgttggacccgctctgggaccaaccctgtttcctgagtttgggattgtggtacaatctcaaattctcaacctaccacccctccctgtcccaccctcttctcttcctgtaacacaagccacagaagccaggagcaaatgtttctgcagtagtctctgtgctttgactcacctgttacttgaaatacccagtgaaccaaagagactggagcatctgactcacaagaagaccagactgtggagaaataaaaatacctctttattttttgattgaaggaaggttttctccactttgttggaaagcaggtggcatctctaattggaagaaattcctgtagcatcttctggagtctccagtggttgctgttgatgaggcctcttggacctctgctctgaggcttccagagagtcctctggatggcaccagaggctgcagaaggccaagaatcaagctagaaggccacatgtcaccgtggaccttcctgccaccagtcactgtccctcaaatgacccaaagaccaatattcaaatgcgtaattaaaagaatttt

SEQ ID NO: 266858 - DNA, 766 bp, Homo Sapiens
  misc_feature (539)..(552): n is a, c, g, or t
  misc_feature (664)..(712): n is a, c, g, or t
gaaagtgtccattaagtacaacatagtggatgaaagcagactttcagcaagttatatcattgtgacattttagagcactgaaaacaaaaacaagattctataaacttccagagaacaggagaaacagtcacacacaaagaattaagtagagtggcttcaaacttctcaatagccacattagcgtccagaagacaattcaataatgcctccagaatgttgaatgaaaatggcctagaattctgtctctctaggcaaactatctagtgtaagagtaggaatgaagtttttgtatatacaaagtctcaaaaatttgtacctctcccacactcttcctgacaaagcagctgagggactttctctgccaaaatgagggagtaaacttaaaaagaagacaaggtgggatattgcaaacaagagatacaacacaggagggagccgaagagaatcccttgatttgaggtgaagcagctgtacacaaggcatagatggcagctattccaaattggagtatatgctaaggctctgggagagatttctcnnnnnnnnnnnnnngttacaaaacacctattgtgtctgaaaatcttaagaggagaattcgataactggcaaaaagttcagaattgaattaacaataagaacaataaaaacacaaagcaaatgttannnnnnnnnnnnnnnnnnnnnnnnnnnnnnnnnnnnnnnnnnnnnnnnncttgagcccaggagttcacgttcagcctgggcaacatggcaagacctgatctct

SEQ ID NO: 266859 - DNA, 751 bp, Homo Sapiens
  misc_feature (12)..(12): n is a, c, g, or t
  misc_feature (342)..(342): n is a, c, g, or t
attcggcacagnaatggtttctccttatccccacctccatcctcacccctgggagatacatgcctgcttaccaggaccaattttctacttatttagctaaaaataattgacctttgaaagtcataacccaagtaattgaatttgaactaaaatctaaagataaacctaatctttcaggcattctttcctcccactcttttgatctttttgacccccactaagtcttaccaggtatattggagtagaggaaatttcatactagaatacagtactgtgtcatgtttcattaatgtcaaagatttcatgtagtaaataggaacaaggaaggtaccactttgtatnaatattcaaaatctatacagcacattgctaaggcagagtatacactcaagaaatgtagaattggtaatattatactagaaaatgaacttccagtattgctattattttactaatatgcatagtcactgacctgtgaagagtgaacagtatgtagaagtgcctttgagataggaaattgtgagagtccctaacttttacatacatattagattaatttgagcctacataaaaagaaaacaaatttgtgaggatttaaggggggaaaatcaggggacttcctgtttgcagctcttatcattgggagaacagtaaattagatctagactaatatatttggtttctctaatttatggcaattttgttaactttgtcattgagtggaatgctgaacaaaatttctatggcacat

SEQ ID NO: 266860 - DNA, 438 bp, Homo Sapiens
  misc_feature (65)..(65): n is a, c, g, or t
aataaccagattttctagttattccttgtttaatgcaaaaactaatcaattctatctcactgtcnacctttgttagccaaggttccatacctgtctaacagaacgccctggccccgactccgagttctggacgtgcactaggtaagaggtaagacaatctgtccatcacgtgaggacgccacaggtaaggcagcaacattttgatttattttcttgagttcatttacaatggcactggcaatggacttcaacacatgatgaggaagatgaaatgtaactgtggcccactgaaagaaaatgggagtataagcaaaggaaaatgtactcaacagttttaaccaaaatcataacttaaccattatcaaataaagaacactcatcagtttcaagtcagttttcttcattagtttatcatttaaaacagaaacttgcagttat

SEQ ID NO: 266861 - DNA, 633 bp, Homo Sapiens
ggaaccacagtatctgatagcttaaaagtaatgaaaagccatttactgttatgtgttgctataaaatctactgtttgtccagatgcctaaactgagttgctttgtgtagtaaacacactgatggtcacaccttgagatcatgaggtaaagtctttgtagaaggtgctggcaacttagtttatcctacctcagaaaacggaatctgcctgctttggggactcgcagaacacaggaagcctgggtttgttgttggtctcatctctcacatgatttcagcctcgtcgttcatgctacctctttccacacaccttctcttgcagaggagatggacgttgcggttcaggcttttcagttccgagtgggttagtgtgtgtgagagtttcttaaggaaaacaaccctagcatgtgagaaagggcaggattccaacaaagctctctgcctagcgtaagaaattctattactctcatagaagtatggtcttattctagcaagttttaccttctgttccacttagcctgtctttactagttctatattgtagtatgtggagaaaaacaacttaggattatagttttttcctcctatttttattaagggtctgaatatgaaggaccagcatatttcttgcttgc

SEQ ID NO: 266862 - DNA, 469 bp, Homo Sapiens
tctagaaatgacaccattaatacaggcaagactgaagttatgtcaaagggaagattactatgtgtagaccaggaaaacaaagtagttgtgcaggctgtgatctctatcaaatattgaggactgtgtgtttgataaagctcaggttaaattcatcatataaattgacattatgtgcctgagtttggtcaataagattaaatacattttatgagaaagctttaaggtacttaattattttgttaatgcttacagtatttctaataccagatagtcttaagtatctatcatagataggatattcagccaaaatgaagtaggattatataaattagttgatggaaattctgtaggttattaaggggaaaatcagagatggaaattaagttgcaattatttgggttagatccacatggcctctattaaaggtgatttacatgtaaaaataagtctaggcaacacagcatgacct

SEQ ID NO: 266863 - DNA, 510 bp, Homo Sapiens
cagctggagaagatgggatgggctggtttaaaacagaagtcatgattgaccctcagtggagaggcctcacaaaggtaccaagggcatcctctcattcccccaaacaaaactacaagtattgagtatacaagaaaccttaataattcatcttttaatggctttcaaaacattaaccaaataatgaaactaatttgtaggtccaagccagtcagttttctttttaatgaataaaagtgttttacatgtagtgagggaggagcatggtgtcaggttttcacaaaacacaggaatgcgtgtacataccagggagtggagtaaaatgtatttctcactactaggagcagaaagttcgaaagccactgatctaattcaacactcccattttagaattttagaatggagaaaacagaggctcaaagaagccaaacaacttgtccaacttacttaatagcaaagccgagaagagcatccaagtctttaatagttctctggtaatttcctcaccaaacc

SEQ ID NO: 266864 - DNA, 1025 bp, Homo Sapiens
cggtattgcctactacaaggtactgtgtgacgcttcacccgtcggtttgggcagtttatgggccaccctttaagtagcaaggggtctggggcactcttctcaacattggctgcacactgaaaactcccacagagcttaaaaaatatattgatgcctagatgccacccccagagcttccggtttaatggatatgcgggtgtagcctgggggtagtacattttcaaagttcgccaggtatttctacacaacacggaacagctggcctaaggcctgcagaagcagatcaaaccaactcggctctcagatgcttctttgttgcagcataagacatctacatcatcaagcccactgcataggctgaactgaaccccgtaaccgcgcctcactcctggccctgccaaaccctcacactactgcggctgatccatcaaatagtttatttttcacctttgccctgatgtcacttggacatctgactgtctcctagagaaagttgtttttctgccagagaaggtacagcaggcagggcattgcttcctatttagtcgaaggcttattttaaattgggactaggccaagttcaagtccaggagcacactggcccctgggagagcctggcccaggtacaatttggcttgtgagaccagccgtcagcactttggctcatggaacacacgtctgtccgagcagtgcagacctggcttgtgtgaactggactctgtgtgccctcagggaaaatccgaggccacatctagaaattctggctgaggctgagagccgtgtgcagagctgcccccacacatttccttgtgtatattttgggttcaggctgacatttcctcttagcatgggtggaggtaatggctgaatttttaggaggcttgaatcccttctacaaatatgcctcctcgccctgtaaccaagttttgctgggttgcagttcaggaatgtatcttgctgcttgtacagcctgtcatggaatgtgaggacttagctcagaagactaaagcactattccttctagg

SEQ ID NO: 266865 - DNA, 955 bp, Homo Sapiens
  misc_feature (149)..(150): n is a, c, g, or t
  misc_feature (154)..(156): n is a, c, g, or t
  misc_feature (158)..(161): n is a, c, g, or t
  misc_feature (169)..(171): n is a, c, g, or t
  misc_feature (173)..(173): n is a, c, g, or t
  misc_feature (175)..(175): n is a, c, g, or t
  misc_feature (180)..(180): n is a, c, g, or t
  misc_feature (182)..(182): n is a, c, g, or t
  misc_feature (185)..(185): n is a, c, g, or t
ggcgaaaatttaatgactcaaacttataaaacacggtacctgcttgatctgttattccgatttacaacttaggtaccagttttcttaagtaaatatgccttccccgcttgcgtggtgttttaaagctcttcattccgtgagccctcagnnccannntnnnntgactgtnnngnancatgncncgntccccggcaaacactcttcgcattctaaaagaaacccaggggcaagcaattcttctttctgagaccctggactgtctacctctgagcggtgttaacaagctgtaccttttcatttgttttttaccaaacaaactctttagcagcgacatgaaatatcatgtctcttctttctcactcgcaagtgggaaaaggaaaaaagaaatgttccttggtcgttctctttgtggattttggcatttcattggagtgccaataggtattcattttttatgttgctctggaaagctgtaagcagccttcaaagtcacaaagcaaactcagtccctaacggttctccaaacttaggtcagaaaggtggggaactttatttttctgggcagagagtgcatgaataatacacttgcaacctgctcagcttccctaagttctctttagctagcttctccactcgaactacacatcaatctgtcaccagtggtcagcagctcagcagagagccagtgttattgtgaacctacggtggaatgacttgcttcccagctggtgatcaatctgtgttagacggcaacatgtttgcttctacaaatgagctggacccctctgtaacatatctctgccaacttttgaaagaaagagtctgtttcaattcttttccggggtaaagacaaaaagcctgtctccctttgcacaaccagctattgaacaatccgtgcaaatatttacagccagtatcctaaagaaattgttttcagaggtcaggaagttgcact

SEQ ID NO: 266866 - DNA, 654 bp, Homo Sapiens
ggcacgagatcacagagaaaataaattgggcagtctttcccacctgtttatttcggggtggagaaaatgggtgagaagatgagacgactgcttcggagccgctctgctggtcctctaagagaatagtgtcagtaattcattttgatcaaaagatgacgtgacccattttaatcaccactatattcaacatatgtttccaaatgactttagcttttgaaagtggattcaatttttggacatagctatcagttcgccaccattgcagatgtatgtatttttttaatgtgacatagacacttgatatgcctgccaatcacatttaccaaagagtgtcgtgcagtacagtccaagccgaagctggttggggcctagccttccttctttcaccccagctaggttgactagtcccacatttacacattctgggatgttgagtaatgagtagctaggaaattaatgtttctgaaacataagtcaagcaataaataagaaaacccagtatacatcagtgtgggtgaaattgccttccattttaatcctatgtgagatacctgaaacatgttaactctattatcaacagaatgcataaatctgatgttcttggttgatataggtataataaaggaaaaaagcattttcgggggaaatgccaag

SEQ ID NO: 266867 - DNA, 855 bp, Homo Sapiens
  misc_feature (797)..(797): n is a, c, g, or t
cacaggagaataaggagacttataaacccagtgaattccttgtgcaagattcctggcatagcttctgctcaagtacttctgtgctgaagcacgatgcctatagcagcccattcagttagtagagagaatctgttagaattcatattgggataaaatcctattccccgaaacatccatttgtctggatttttcttctaagcaatacggtatgattccagttaccttgtctatagattgagaagccttgcttcttatgatggtttccagagaaaccatttatggttgtgggctcgctcctctgggatatcctccctgtaacgttagtgtctctctttaaaaacagagcccagttccattaggagtacgtaggcattaattttgatttggatgtggacatatttatcatttcctgttattacaggatggagatctagtttcaggcctttatgaaagcatttatctcctgtatgacataggttctctgatcctgtttctttaacataattggatagtgaaaatatattctacttgatagtctcaaatgaagaacatctgtatataaggagtatatgaaataccatgactgttgatcatgctgagaggcctttagcataggggagtgtgtaacataccatgactattgataacgctaagaggcatttagcataggtgatttttttgactcattctacctaccacctacaaatcgtaaccaacctgtggaagccagcgtcccatcttatccttatgtagtagggggagtaataaatgttttcaacctattatttatgtaagtnaggccgccttagggagcagctattatttggggtaacacagagggattaggtaggggga

SEQ ID NO: 266868 - DNA, 755 bp, Homo Sapiens
  misc_feature (614)..(622): n is a, c, g, or t
  misc_feature (729)..(729): n is a, c, g, or t
ttgttccagccctttagaagccatattatgatgtggtagaaacagtcccggtctcagccctcgggggtcaaagtctggtgggaggcacatgggaacaacacctgatcccagccctccctggtcacagtctggcgaagggagatacaggaccaggcctggtgtcttccttcaagggtcacaaactgctcacgaccaccaaacccagtcctgggctccggggtcacggtttggtaagagacacaggaaccaggcgtggtccagttgcacaggtcagcgtcttaaaccgttcaacaaaaagctattccctcccccacgtagtcctgaaaactgcaactgggggacagaggaaagaaaacgaatcagaactacaaccctcggtgccagcgtttggaaagccagagcctccccgcgagagcgtgcaacgccgtcaacctgcagggaagagacggatattgaaaggccggtgtctggcgtgcagcgctagaacggaacacaaagccggtcaatccgaaccagaaccctccagtcccgctgcccaatgagaagacggatcttctgtcctctggacaaccgtgcggtagctgggggtcgcgcgcaggcgcaaaaggacggtnnnnnnnnncgggtggcaaagggtctcgcgctggcacgccgagggctggccgcgtagccgaggagagctgggggagggagcaggggccgggtggagggcactcaccaaggcgcgcngacggcagcggcctcccacgctggct

SEQ ID NO: 266869 - DNA, 756 bp, Homo Sapiens
  misc_feature (657)..(715): n is a, c, g, or t
  misc_feature (744)..(744): n is a, c, g, or t
ggagaatgagtctggctttgttcttgttgggaggtgttcaagccatggctggaccagagcatgagccatcctcagtgtgagaggcagttactgccgcggttgggctgcctggtaggcctggagctcaaaatgagtcagtctctctctggaaagcgcaagacagagacagcgctggtggcagctgggctgaagccagcagcttggagatgaggctcaggccctgacgggggaaatcttacccagcctccccagatggctcagagacaggtctggcaggtgcacggatccacaaatctagaagagtctggggttgtcacatccaccaactaggctggctgtctatatacactttgtcactgtgtaggcccaggatttcacccatctacaaattttctctgccacacggctactgccactttaattcaccaagccaagcccttgcactcaggaccctggcccaaccctctttggccaagcaaagaggaaacgagaacaggacagaaaaaaaagtgggaccggaccaggcacctggctgtccattgaggccttgctatgcgatcccaggacggaaggtgccggcagcaagctcatacactctagctgcgtgtcatgtcattgaagagggcgcgtgatccagctggaagggtggataaaagnnnnnnnnnnnnnnnnnnnnnnnnnnnnnnnnnnnnnnnnnnnnnnnnnnnnnnnnnnnggcatttgcaacagagaaaaggtaattcnacgcaaagctag

SEQ ID NO: 266870 - DNA, 753 bp, Homo Sapiens
  misc_feature (261)..(261): n is a, c, g, or t
  misc_feature (351)..(351): n is a, c, g, or t
aggaagttaagaacagtcctaaaatctctttggcttctttgtcctgatatgcaccggcattttcacagtaggaactagggtttctgtccagtttttttggttctttaaggaattaatgttattctgggtacaactgcttacatacatagcacatatagatgacatttttacaggccgtcttgttagactgacatacatggaggatagtgccacccgcctcacaagaacatcaggtaagctcaggcacagagtgcccagganatctgtaagggcttcgcccacgcacaagtcagggctgccagtcacctgggttgtcttcactttatttgggctgcgtctaatgacaccttnccaactttttgaccccacccctggactgttgtgtaaacattgtatttctccatctgtaatgaaaaagctaacacatctctaactccagagacattttccagaacatgctgttctcaggcactagtgaggcggtaccattattcctcatttgttatccaaatgttggccatgtgaccacaccaaaagctcatcctgggccactgagactggtaattgaatcagaatatagtgaaatattcattctcatatatacccagccatcttacatctttggcttttttcagcagatccttgtggcactcagaacatccattttgcactgtgtatttttttcccttctgtgtatcctgctttgtaaagagtcacgagtggttttacaaataaagcctgttcttactcaga

SEQ ID NO: 266871 - DNA, 732 bp, Homo Sapiens
  misc_feature (600)..(612): n is a, c, g, or t
cacctaaccttccttggtacaaaaattaaatctttcttaatatagaataggaagaatctgctaattcaataatactaatttcttttttgctgattaaaaaaggaatgaaaaaaatctcctcatctagtcacttcctataaaatgcttgaaatgctttgttcaccattggctttaataattccttccttcagttggtggaaaatgtatctgaatcagtaagaatctacttctgccaattcctttcaggaagacaaccttccacctactgaaatcacacctccactccaggctgtagccattcccagcctccctccttcacctcagtgggaccttgttatcctgatccgcacagcattatgctgaactcccaagataaggggaacagaaaataaccagtaacaggtatacatgtttaaactatcattaaaatagttctataaaatagaaagccagagtctcaaggggggtagctggccaaggataaataaaccacttcaagtataatataaattcaaaagtgttaaataaataataaattttacttaaatctaccaaataaaaagataagtagttatataaatatggtcaatacattttttnnnnnnnnnnnnntatgcatttaatttgttaaaccaaaatactcagataaatatagcataatatattcaatacatatttcgacatattgctgactttaaaagttttttattctaagtataaaagtaatcttct

SEQ ID NO: 266872 - DNA, 635 bp, Homo Sapiens
gaaagacagaccaagcagaatgcaaataaaaggtctgaagaacaagttttgttaatttgccacaacagactgtactccaggggaagctttgttgtccattaaagtgagttctctgggaagacgagtagtaaccgacttgcacgattttcctgccttttctatattctctacttactatgacaatacagcactagaatttccaagtgcttataccagcatagtgcaatgtatttaatgagaaaccacgtccaacaacaaagcgttataacttctccagctgagttagatgttttagtctgaaccaggaaaacagatgaagaaagttgaaccaagaattaaaagatttagagtttccactcagacctaagactctccactttgtttcagagggagtgggtatggttattctgaagaagaaggcggcccttatcctgaatgcccggtagcctccgtgggctggtgggtggttcctccggtccagcacctccataatttatgatcaaatgcccaagccaacaaactaatcctccccttctcccccacaaggaggcaacctttatgtcagaacaatgtgcccagaagaagccaaagacacaaggcacatccaaggcaaagacaatcttaattaagcggcc

SEQ ID NO: 266873 - DNA, 552 bp, Homo Sapiens
gaccctcaccagaagcagatgctggcaccatactccctgtacagcctgcagaaccgtgaaccaaaataaatatcttctctttataaattacccagcctcaggtattccttaacagcaacacaaacggacttacacattgctataaaagataacaagctcaggtcaaagagaaatgaacttgagaccagagaactctcctaagacagcacaagtttacctttgtgaggcttcctagcccaagtctgtttttcttctttaaattttttattgagcagcacttaaaacctgttactgtaaacctccacccactttattttagtactgaaccaaaaagcaaatacatgcctcaaaaaatcactgaatctaaataacaaactaaggttttgaagaaattagcagttctctaatattcaagcaactatgcccaaatcagcattagcccatttaaatatccctgatcagctggattccaaagacctgtcaactatttctttaaaatatctagcacaaataatcatatgccagaaaaatatgcattttaattaagcggtc

SEQ ID NO: 266874 - DNA, 818 bp, Homo Sapiens
  misc_feature (470)..(546): n is a, c, g, or t
ttaagagggtctcattctgtcacccaggctggagtgcagtggtcaatcatagcccgctacagccttgaactcctgggctcaagcatctctccacctctgccttccagagtgctgggattacaggcgtgagtaccccgtccggctttagggctgggttttgaggaagttgtgtcctcgtggcctgagctttccttttcttcctgcatctcctcccctatgtgatgcctcccccctgctcgttgtttgggttgcagggtgagagagagaaccttctccaagtcctgactgctccctgggcccaagttcaggctgagctccttcactggccctgcaattttacacatgccgctcaactccttggaaacaaaggtttcctctctgtaagatgaaggtgatacgtaacccctgggggttgtgagaattaaaggagggacattttaaagcactttttaaactgtaaaactctgcannnnnnnnnnnnnnnnnnnnnnnnnnnnnnnnnnnnnnnnnnnnnnnnnnnnnnnnnnnnnnnnnnnnnnnnnnnnngaagatgttactgtgttcagttttattattttaccctggctgccctactcagggtcctgtgatgttctctgtaactgctctagttcagaaatgaagcctcgagtaggaggtgctggcactgcctgccctggcttctttctaccaaagtgacttagatgtcttggagctaaaacatgagaggcaaaaaatatcttaaagataaatgccgtgtctgtgttgcatataaaattcaataaatatccagtaactgttgagatatgagcccatgaaca

SEQ ID NO: 266875 - DNA, 621 bp, Homo Sapiens
tcttttgatttaaaggatccatgtatgaaaaccaggggatgacctgtggtattatgtttttgcccacaattcctggcttgtaacttccatagcccttgttacagtcttttgttgtaatgttgagtgtgtcaggcctcaggagcaggcctcaagaaaaacaatttctctgacctagtcctgccctcctttcacctgccccaaggcaggatctctaaatgtctgcccacttttctgaattgtgggtcctaagaccttcccccagagagagtcttgccctataccttgggggaaggaatgctgacattatgaagcttccataaaaacccaagaggaccgcattcagggagcctccacatagctgaacacctgcaggttcctggagagtggtgcacctacggagggcatggaagctctgcaccccttcccccataccttgccctatacatccctttatctgtttccttgaaataccctttatcataagccagcaaaattttaaaaataaacaatcctggaggagtaaaataattcagtttccagagcttccccagtgtaaaacttggaatgttcagtttccaacaaaaaaatacaaaacatacaggaaaatatagcccacaggaa

SEQ ID NO: 266876 - DNA, 712 bp, Homo Sapiens
cagatatgaaagtctggagtaaggcatgagaggttgagagctccgcatagttgaatggaggaatgaggaagaggagcatggtgccctgggctgggatcctggaactcagtggtagagctgccctccagagacaagagattctgattaactgatgagcgttaattgaactctcagaaccagaataaaagaccttcttcagtgggacacaaacgccaggtcataaaggaaaagagtgattaatttagccacatccaaaatctaagacatcgtgtgaaaaaaggcacaataaaacttgcaaaagatgggaacagattagaaaatcttttttgaacatgttaagaaaccaaggctttaatatcttcaatatattttaaaaaatagaaagtgatgaaaaaagccttttcagaggagaaaaccctcaagccataaacagctgcaagatgctcagactcatcagtgatcaattcgctcatcaataaaaaaggctgatgctgctaaatattggcaaggccatgaatcagtggggaatgtccctacccatttggtggaagtgcaaaattgcacagccatttggaaagcagtttgggagatctgttttaaaatgtaaaattaagatactctgtggcccaggaatttaacttctgggggtctgacctttctcatgtgcacatagagacacataaaaagatgtttgcttcagtagtctaatgtc

SEQ ID NO: 266877 - DNA, 806 bp, Homo Sapiens
ttcattcattcattcattcattatctctgtctcttccatttctgcctctcgtctttcttctcacatcatctcaacagccttccttcttaaagtggacccctggatcagcagcagcacatgagcccttataagaaatggaaatgctctggcggacccttccacctagtgaatccaaatctgcagtttaagaagatttccagctgattcctggggcatatgaaagttggagaagcattgcttaagtggtccttgcatgcaaaaaccggtgggcgataaatcagaggacaagctcaggggtctcagtttccaaacagctcacattaaagtttgcggaaacaggtgttctccatcattttcaggaccaggctgtctagaggggctttaggatactactttgtttcggctattggcccctaagacacaaactatggccaacaatgacagatgcagagaaaaaagagaacccaaccaagaggattcattccatcgaatttcatgtgcatctgaatgttcccattctgtcttcggacccttcttggatttacccaatttgggattcatggatccgtttattttgctgagtcagattagtctctccttattatccacttctcgcttgttttaggcaaaattatcttctctgaatccccagatcatctctttattcttatacctactgtgtgctaaaaatctcttttaaaattagaacttaccccaactaagacacatgggtccctttgattcaattttctcttggcctggagccatttggtctttctatgggagtaaatgaaataactctattt

SEQ ID NO: 266878 - DNA, 960 bp, Homo Sapiens
aataatcacagactgaaaatttaaatttttattatacaaataaacttgaaaacatagataaagttggtaatactcttaggttatataaatgacaaaaactgattctaaaacaaattgaaaatatagatagaacaattcatgtagaagaaataccataagatattaaagaggtaccttatcttctatccccaacttaggcaacccccaacccctaacataggcaccaggcccagatcatttcacacgaatactattaaagctttactacaaagacaaaattgatgctttatctgtttcctaaagctttataagtttcttttattaaggcctattaaattctttttacatacatagtatttcaaaacttgatagcatccaaaaaggagactacaggctaaattaatttagagatatcaacacaaagctcttgataaaatattaacaaacaggaaccagcaacccaattaaagagtatgtaccttcactcattagtatcaaatgacagaataaagaagcaaatgttttttgtattaggataaggcagcccgttacatacatacacacagagacttcccactaattcccactgactaggattagaataaaatgcccaagccatagttgtgaggaaagctaaggaagcgattactttgtattttcagcctgtaccatcaagggaggtaggttcttccagcggggaagctggttgaaagaatgcctgtcatgtaggcaactaacaatgtcaaccgtagttactatatcatatttattcttcttaaatatctatcctttttgtcctcttgttcattttcctactgccactactttaatcaggtccttatctttttttcccccttaggaccattacaaggaactcttacttactcttggcttccaattctgtgctctcctccaaactgttatctcagtgttgtagtagtggatcttccctaattggca

SEQ ID NO: 266879 - DNA, 853 bp, Homo Sapiens
  misc_feature (382)..(382): n is a, c, g, or t
caaacatttattgattgcacaatgaaacaatctctcctttcagatatatacatcagtttactaaaagagtagatacaaaggtcaggaagtaattacaatgcaatgtgataagtttaataatataggtgtgacagcatacagaggagggggtgattgggtttgaggtgatggtgggatattggccaggtaatatttcatggaccaagtgatgacaacatagggtttcacagatggataagagtcttccaagtgtaccagggggaaatatacatgtgtgggtgccaaaacagagtatggcatttcctgaaagtcagaaatttatacaagagtataaagttcaagagaatgggataagtagctagggaggtaaggccagaaaggntaggcaagtcctaggggcctttcaggccatggaagaaaacgtgggcttcaccctacgatggtcgtgttggagctcgtggcacatttacagagcttaactactcctttatgtattttttctagaagatgtagacccttatcccatcatttcagaaacccacattttacttttttgaatcacagaaggatgcaagaaaaaataccaaggtaaataaatacaagcagggtcaccatcctttgaaaaatctcccaatatggatgttactgattgtgggtcagcaattacgtctttgtatgtatcgagaatagcaattctatttaaaacatctgtagaccatggactgtaggtcgtattatgggagataccaagaaaatctggcatgtctgtctctcaagaagctttaacatttttagcggatgcagtcaagaatatagctaactagaaaagggagatctgcattgagaaccctat

SEQ ID NO: 266880 - DNA, 971 bp, Homo Sapiens
  misc_feature (224)..(224): n is a, c, g, or t
  misc_feature (290)..(290): n is a, c, g, or t
ccggtctgaatatgcttgtgtctcctagaaggggtgaagaatactcctcttagcccattttgcatgtatgagtgggggccacccacttggcaaagcagcctttgagaaacaccagtaacatgtaaccagggtagggatgtggcaatgggcaggagggtcccccttgacatctattcagaggtccatagcctgggactcctgctgaggtgacctggggcgcttcntggacctgaaacctccttgggtggcattgtgtatggcagcaccgaatatggccagaggcctccgcnatttgccaagcgggatccctatccccaagcacaccagtgttttccttagtttcttgcgtagcaaagcccctcccctgggttcttggctcgctgcccctgtctctgccccaagactgtctgctgggtgagcctgggaactgacctggttctttgactgtgggagaaaagtcaccagtcacaacccaagatgctgccaaagtgcccaccccagttccatggtcttggtaatatttgtggttagtatgacctacatatcgtcacagctgctttcagtggccgcgtagaaaagcaagcaagcagaaaggaaccttcctggctgcggagaagctgtggagtaggctggctgcaagcaaggcctttggagcagatggagctggttgcggctctagctgtgggactttgagcaagtcattggatttctctgatcctgtttcctcattcgtaaaatgggcatgaaaagagggagttaagtgaaatgtctgtctcatgctcagggctaacagcacacaacaaatgctcaattcatggtaaatggtaatattcttgttagtagagggcacaaacacttgtatatcagctcaggagtatgtcagtttcacattcattgacatttactgtttctactggttaaaaaaattaatgcatacttgtaaaaaagtttaaagttcagaagagaaaaaa

SEQ ID NO: 266881 - DNA, 991 bp, Homo Sapiens
cctgagactccggccattgacccagccccagggaatgggctggtcttttgtacagaggcagaaaaaagcaaggcaaaggtacagcattccaggggctgcacggcctcaacagagcgctcaacttctggctgagggtctgtgtgaccttccccgagatgcagagctgagccaaactaggtggccacctacaaaagggccaaggccaggcaagttgaggccctaaataaaaggctccaaggcaagtgtgtagaactccaggcctcgctgccggtcagctgctcggcacttctgcgtcaagaggcactggggatgcagcaggctggcaggtggctggccctgctaatgcaagactgctcaggccatttcagcagcagccaggtgtcaccttggtgagctggggaaggtgggaaggcacaaagccagggtttctacaaccacactctcagcccgactgacttgctgcgagtgctggtggagctcacagacggcggctggtggatggtggactgtgaacctcactttccctatgttcagcagcacaaagggaagaagccaccacatcagcccaggagccctgagcagcacaggcagtagggccactcactttggccatccgcacccaaatgcaatcaacccagcttcggaagctaccctaggatctcgtcaataaactgctaagaagccatcaactggcctaaagaaagagttcactgaagaacgcaattgctttaaagaaagaaaaattagtttcctatttaagtcttaaaaaaaagcaaaccatgtcctgagatgtctgtgttaatagtgcagagagaacctagggtttgaggttgctgtagcaatggcattggagaactttaacttgaacattctcatcgatacttcctggacatattttgtgtttttaacttacttagtatttatttgccttgttcatatgttcaattttctgaaatttcaattaaactattggtgtttcactttttaccca

SEQ ID NO: 266882 - DNA, 679 bp, Homo Sapiens
cttcacttgatctaggaactcttcctctgttctaactttgtcttcttctctttggttccatcaatgatgtcgatagaggaaggcattaatatgggctcagcaggaagctcttggctcttgtcagaccagcagagcacatgtatatccacaagagctctcaagacctgaagtagcttatttttatcccagccagccaggaggtgctgcagcaaatctatatggaaggagtgacccaatgattgcagcacacttgaccagcaactgttcctctgggctcagttgatcccagttggcttactgctatttctttcaaaaagggtaggagaagtactgtatccaagttcacatcatccttgactgtgcaagacataaagttcctggccttccctcagagttggcaggggagaaatactatacattatggatttcatggcattggctgagagggtttcccacttgctgttttcctcttcctccttttgtaggacatgaaagagcaacacgtccttagagagaaggtcctggcataggacctcacaataaagtgggtttccaaagcacctgtgaagggtagctatgcccttctttctgtgccagaaagtttatttcagccaacagctggctttttccatagccttttccaccttcatacagaactgcttgtcccttcttccagtgc

SEQ ID NO: 266883 - DNA, 582 bp, Homo Sapiens
tagggacccattagcagaggcagcgtctggcctcagacatccactcatcaggtccagaccagaccgtgggccttggctgtatcttctgatccactccgttgctaagttcccctctgtacctaaactctgtctccctttacttcacttggctttttagagatttctcagccttggtgtgtgttgtccccagccctgtgatgtacaagtaattgcctgtatacgtgggattagccagcttgctcaggaagtcagtgttgtggttagtgggaaattcagaccggttgagtccaaggaaaccacttttccttagttctgttttctgaaccaaagtccatttgagatgaggggttgtgactagatcttctctggacagttgaatatagagcagggcccccatctgtgtcaccggggctcatgaatcctccttgccaatgactagagtccttgaaggaataagggctgggtcagtgtttcccaacccagaatataactcggagacctcttaagttgtcaggaagccatcccagtgttttgcccgtatcttctaattaataactaccctgccccctcactccgtctcaa

SEQ ID NO: 266884 - DNA, 885 bp, Homo Sapiens
  misc_feature (314)..(323): n is a, c, g, or t
  misc_feature (472)..(590): n is a, c, g, or t
  misc_feature (746)..(746): n is a, c, g, or t
  misc_feature (838)..(838): n is a, c, g, or t
  misc_feature (873)..(873): n is a, c, g, or t
cccaggctagagtgcagttgtgtggtaataacttaactgcagactcaaactcctgtgctcaagcaatcctcccacctcagcctctgcagagtggctggaactacatgtgtgtgctactgttcctggtttgtattatagatctcttctaactactaatgattcacatcaataattgatacttctctatcacataagttataaaatttcttcacataaactgttgaattaaatcctcactgtcactctgtaatcatactttaacctaggtcaaccagcggcacttaacattccatcaagcctgctcccctattttnnnnnnnnnngtcctcaccagaactaaccgttttacactaagaaagtgacatctaatgataataaatattattaaactatttggctaggtctaaataagagcatattcacataaatatcactagtggttctaggacctaaaactttacctggtacaaannnnnnnnnnnnnnnnnnnnnnnnnnnnnnnnnnnnnnnnnnnnnnnnnnnnnnnnnnnnnnnnnnnnnnnnnnnnnnnnnnnnnnnnnnnnnnnnnnnnnnnnnnnnnnnnnnnnnnncaagtacaaatgtttttgtaacactttcctacaaaacagcttatgaaacaaattaaagaaaatatgctcacatgaaaacttttaatagctattatgattattttagaaagagaatgaccctcaaataaaatttagtatattttctattctttaggnaacacattaaatttcctcaggtataatttatttctttggaaacggatattggaaaaaatagggataatggtcttaaaatactggggtggggncccatccaaaacagggatccccccactttaacccntaacccaactct

SEQ ID NO: 266885 - DNA, 327 bp, Homo Sapiens
attaatttttaaataattttacatttaacatttgggatgtggaatggatttattttgtatctaagtacatgaattaagtaataaacagtaattattggcaggagcgtctagagtttaaaattgtgtctctttacaatatttcaatttttaaaatatatttttcccatattaatctgtgaaaaaatatattaatgaaaaactgacgcaaaggaaatattttaaaataatattttttatttcagttatacaaatacttggctagatatagtttttattttgacatgttagaaggatagttttgaggtaaaagtaattctttattaaata

SEQ ID NO: 266886 - DNA, 763 bp, Homo Sapiens
agactctatactctaatttctcatttaaaagaaattggactcttacaaaataaacatgatatgaacccagaatttaacttactattttcttactgttatcccaaagacattacatgatattgaacactttgaggtaattatggtactgggggagcataattgttcctactaatagaaacaaaatactaaggatttttctagaaactctcaagagccattacctggctaaggatttttctaggaaactgtcctttcaagagccatttacctgggaataaaagtgatgtgtatggataaacagttggctatacagacccaagatgaaattcaaaatatgacttctgaaaattctgaattcaaaatcaagtttttgatactttaggatcagctagatgatcatcataaatttgtctcctttccacttcaattttttttcatcttcaccaatctacactatattcaagccaacttaccatttcccttactccgttttccctgcaacttccctaagctgttagtgttattgtactactcttctttatgccacttaggcttgaattcttggcccaatttctctcacttctgcatgaagtcaccaaatgccagtgattctgcttctaacatatttcagacatcatttctgtccattcccactaccagaaagaaactctgtgttagtttttcttttacctttattgattttttataatagcatttatggcgtgttgaattgtggccccccaaaaatatgtccaagtcttaa

SEQ ID NO: 266887 - DNA, 747 bp, Homo Sapiens
  misc_feature (257)..(257): n is a, c, g, or t
tttgagtgcaaatgccctgctggacacaaacttaatgaagtgtcacaaaaatgtgaagatattgatgaatgcagcaccattcctggaatctgtgaagggggtgaatgtacaaacacagtcagcagttacttttgcaaatgtccccctggtttttacacctctccagatggtaccagatgcatagatgttcgcccagggatactgttacacagctctgacaaacgggcgctgctcttaaccagctgccacagtccatnaaccaaaatgcagtgctgctgtgatgccggccgatgctggtctccagggggtcactgttcgcccctgagatgtgttcccatcagaggcaaccgaggattttcaacaagctgtgctctgttcctatggtaattcctgggagaccagaatatcctcccccaccccttggccccattcctccagttctccctgttcctcctggctttcctcctggacctcaaattccggtccctcgaccaccagtggaatatctgtatccatctcgggagccaccaagggtgctgccagtaaacgttactgattactgccagttggtccgctatctctgtcaaaatggacgctgcattccaactcctgggagttaccggtgtgagtgcaacaaagggttccagctggacctccgtggggagtgtattgatgttgatgaatgtgagaaaaacccctgtgctggtggtgagtgtattaacaaccagggttcgtacacctgtcagt

SEQ ID NO: 266888 - DNA, 454 bp, Homo Sapiens
  misc_feature (31)..(31): n is a, c, g, or t
aacagcaaatggtctcgtgcagcccctcagnactttgcggcactgccttgcggcaccgcaccaagaggtgcccacagttatccagcttaatgtgatagaatctctttcatttttcttaatgaaggtgaacttaataaaagcaaacacatgatgattgttgatatattttatttctctgagccttctctgccacataatcccactgcctttaactttcttggcctcgttgggcacatgctgtttatttaacatgctgatacgagtgttagagaaatagcacattgctgagccctcaaagaaaagcttcaccctagccaggcccagaaacgaagagaggctgatgatcagctaaagcacgttagccaaaagcattcttaggtgcagtcgtactgagaagccccgcgtgaagtcctgactcagtgttccctgacattaagccccctgaaatgtgagc

SEQ ID NO: 266889 - DNA, 497 bp, Homo Sapiens
  misc_feature (108)..(108): n is a, c, g, or t
acggcagcaaaaaggccctgaattctgtactttcttcccccagcctccttctccagcaaggagaatagcactcctccctccagaagccagctccctaagttggagccnctatgtaagagaagaggaacgttcactttttaaaattcatatatttaaaaatcaagaccaaaaagtaaatcctgtactcccattattgactgtagtcaatccaaacataaaaaggtgaaagtaaaatttaattttttaccccttattttaactgacccaatatggaagttccttggtatctttaaggctgaccttccctggtattgtgtaatgattgaatgtatctaaactgtaataatttgaaactgacaaacataaccttctcagacttacaaaactatgttctttctaaagatacagatttttattattttattttgactaggaaggatttataaataaatgtaatgaaaaatctttgatcttaataaagtaccttcaaacagtga

SEQ ID NO: 266890 - DNA, 475 bp, Homo Sapiens
  misc_feature (67)..(120): n is a, c, g, or t
taatagagatggatttcatcatgttgtctaggcttgtcttcaaacccctggccatcaagcaccattnnnnnnnnnnnnnnnnnnnnnnnnnnnnnnnnnnnnnnnnnnnnnnnnnnnnnnccttgcagtactttctaattagaacctcagaggttcagaactggctgagcctttagcaaaagattaccaaactcgcctacttcactttacagatagggaaattgggatccagagaggggcagggacttggccacattaatggaagacctgaaattaaagtccttagttggaagtgttttccactgcttaccccaaggaaagcagcttgcataaggttggacctgccatgcatactcagtgaccctgtacttacccttgcctaggattatagggaggctgggaggaggaaacagccttggagccatcaaccagaggaccttagcttgtgcatggccttcagtgggccgctgccctt

SEQ ID NO: 266891 - DNA, 950 bp, Homo Sapiens
actagtatcaccctactcgacagatgagaaaactgagacccagagagtgacttgcccaatatcacacagctgttaactgacaggactgggatttgaactcagctcatgctcttaaccaccacaagtccccaggctggaaactgaaaaagttggggggtcaggttgctgcgagtacctaatgggaaggagtcacagagagacatgagtgaagacttggggacagcagtcctgggaaagtcaatgagggctgaaaatttggagttgccccaggagagagggcagaaaaggggataaccatcccccagcactcccttgcccccacagcccagacttgaccaactcccagctgggcctggggacttccagatatggggccccacccttgcaggccttggggacgctgaagatattgactatctgcgtgccccaaaagggtggaggccaacaggaccccactctgctgtctcccttggagggactctgaaagttcttctctaggtccataactctccccttccccagggagaccacgtgaggatcttgacttgtggagaatggggagctgtgggcctctcagtaaaaaccagtttgctgataagcatttattcgggagtaatggagaaggaagtaagagagagaagttgagaggcgctgagtcacctggaaatccactaattccaccgaattccactcgcccaccctgctggtcatagctgggactgcactcagagggttaagaactggagcctagggagctttcagagctgtggctctgaaaaatctcttcccagctctcagctttgctgtccccctcagcaaagggaagggctggccaggcacggtggatcatgcctataatcccagcactttgggagccaaggcgggaggatggcttgaggccaggagtttgagactagcctgggcaacgtagcaagaccccatctctacaa

SEQ ID NO: 266892 - DNA, 992 bp, Homo Sapiens
  misc_feature (49)..(119): n is a, c, g, or t
  misc_feature (126)..(126): n is a, c, g, or t
  misc_feature (643)..(643): n is a, c, g, or t
  misc_feature (738)..(738): n is a, c, g, or t
gccccccccattcagggggaagataagtggcccccaggcaggggttggnnnnnnnnnnnnnnnnnnnnnnnnnnnnnnnnnnnnnnnnnnnnnnnnnnnnnnnnnnnnnnnnnnnnnnnttttccngggtccctttgggtgaaaaatggagggaatcctgggagacctcaaacctggatccaataagcctaattgccttcctatttccatatggatcattagaaaaagacataaagcagtcatggtcccctacccatcaaggaacttgcagtctagagcacatgaataaatgattgaattcagcatcgtgtgttcagtacaaagacagaaactgtatggagacttaagcttaatttgtgttacttcccttttattgttttgtgagttttaatgccaccatctgatcagctgttcattgacagaagagaaattgttgttattatttgtgttgtttttaccttgctaagaataaataattagcttctaatataattggtctagaaaaacataagggttttgggttaaattccttgttattgtgtgttataatgttataaaatagggaattagctaaaatagattaagatacagaaactctgggaatcaaatttctcttgggcaggcttagaaaagacaaaactgnaaaatacttacgggcatagagagcagattgcctagggccccaccttctgtccccagttctgccccagatcccaccctctgctgaaccttgtccanggtcttacccccacactgaaatctctcacagaactgcttagaggagatcagagtttggggtggctacccctactgcctctccagagctggtgctcacaatttcctgatacccaaaagcagataaatgaggaaaagcaatatacttttgtgccttaaattcttttttataaaattaaagtcagtgtttctagagacatcctatccagcaacctgttccccatctctgcagtttcagtggtttttttcacaagtct

SEQ ID NO: 266893 - DNA, 512 bp, Homo Sapiens
  misc_feature (35)..(35): n is a, c, g, or t
acagttctccctgcccctagtatgcagcagcattntgtttccccttggtaatacacccgagtcagtaaaccccttatttgcttgttggttcagtgcccagaagggcccaaaacagcaggtgagcctcaatgtacaattcagtgagctgttgtcttgtgttccccggaagcattcctcctgtaaaaaccaagccctccaaaccagtagaactccagttgaggggacaggtgagaggaaccactcctacttctatcccttgattcctggacccgtgaatcctggttataggagagacaacacatgcaaagcagaaccttgggggcagcacccaaaagttgtctcccaagtggtgctgtaacggagtcttcacgaggccgtttcactctaatgtttgtccagctgcttcctcctgctgagatacgtggtatgactgtgattacctggtcacaagcccattgcctcactttctttgctgtgaaatttgtttcttgattaaaagcaatattgaatac

SEQ ID NO: 266894 - DNA, 812 bp, Homo Sapiens
  misc_feature (654)..(654): n is a, c, g, or t
  misc_feature (662)..(662): n is a, c, g, or t
gaactcatctgtgtattgggatggtattagagagagaatcaggaaagaccaactcatgaagtgaacttggtttgatcttactcaactagaaagcttgaaaacatccctggggattctgaaggcttaattttgcaaaggaggatgcattgtctgaactttgcaacttcatccagtgcaagtttgatgcaagaatgtattaggacataaaatagaggctgaccttaaaagggccaggacagaagcggctgccagctctgaatctttaactgaaatgcacatggcaccaggaggtgtctctcatagttggttgctagcctaaaacatcagaatagaacccaaaggcttaggaaggcctgccaggataacaagaaggccctgtattcattgtgtttcatctgcctaggcctactcattattttagagaatgaatgaagcaacaaggaagagagaccatgactctatcgatgacactgtttatagaaacacaggagaggaagaatttggaatgaaaagcacttcgtcagaaccttctgtgggagccattgagagaaaagcatggtccagtgccttctgagaaaggccagagctttgggctttcctgctctgcttttggggtcgtcagtttgccatctctggttctgtgctataatcagnattgtaanttatgttctccagaggccaatttcattaactctgattaattagaatcagctagccagattagtaacctctttgtccagccttgatttacagtgcagggtaaagtgcagaccttaaaaacagctaagtacctagaagagctccctgcaggg

SEQ ID NO: 266895 - DNA, 520 bp, Homo Sapiens
  misc_feature (176)..(468): n is a, c, g, or t
ttcggcacaggtctagcacagcattgcccaatagaaatacaatggaggtcacaaatgtgacccatatagttaattgtaaattttctaatagccacattaaaaagaaaacagcacaaataaacaaatgagaaaatctatttaactcaatatattcaaaatatttcatcatgcaatcnnnnnnnnnnnnnnnnnnnnnnnnnnnnnnnnnnnnnnnnnnnnnnnnnnnnnnnnnnnnnnnnnnnnnnnnnnnnnnnnnnnnnnnnnnnnnnnnnnnnnnnnnnnnnnnnnnnnnnnnnnnnnnnnnnnnnnnnnnnnnnnnnnnnnnnnnnnnnnnnnnnnnnnnnnnnnnnnnnnnnnnnnnnnnnnnnnnnnnnnnnnnnnnnnnnnnnnnnnnnnnnnnnnnnnnnnnnnnnnnnnnnnnnnnnnnnnnnnnnnnnnnnnnnnnnnnnnnnnnnnnnnnnnnnnnnntgagtcggtcaaattccatttccccctccgccccatacctcttcaaatgttt

SEQ ID NO: 266896 - DNA, 608 bp, Homo Sapiens
  misc_feature (98)..(210): n is a, c, g, or t
  misc_feature (508)..(541): n is a, c, g, or t
cacaatacactcactgcagccttgacctcccaggcttaggtgatctttccatcacaacctcctaagtagctgggactacaggtgttgcaacaccatgnnnnnnnnnnnnnnnnnnnnnnnnnnnnnnnnnnnnnnnnnnnnnnnnnnnnnnnnnnnnnnnnnnnnnnnnnnnnnnnnnnnnnnnnnnnnnnnnnnnnnnnnnnnnnnnnnataagtgtgagccaccgtgcccagtctgatctttacttcttatgaggacttgagtcattggatttggggcccaccttaatccagtataacctcatcttaattacttcggcaaagaccctgtttccaaataaggccatatttcacagataccagggtataggacttcatatcgttttgagggacacaattcaacacataacattagttaagcgtctcatggagttcggactggttggggtgataatatttgtttctttttaagaatgtgcatttcctgccaggcacagtggctcattcnnnnnnnnnnnnnnnnnnnnnnnnnnnnnnnnnnaggaggactgcttgagcccaggagttagaaaccagcctgggcaacagcaagaccctgtctccattta

SEQ ID NO: 266897 - DNA, 420 bp, Homo Sapiens
tctgtaggtcagtaggtggggctgaaagttccagccctgtaatcacctggtccctctgtagctctgtagactggtcctatcatgaggatacccaggggacccacccttagtaatcattagcataaactcaaaagttatcagaggtgatcagtaacaaaagacattctatcacttaagaaattccgatggttttaggaactcaagacaaagaccaaatgtatttcatattataccacactttacttttatcagggaaagaacatttgaacagtccaatagaagataggaatacattttagatcagattctctttcatatgatagcccatcataacaggggctcaaacataaaatgtttattccatgataaaacagaagtgtgtaactagacaatctagggcaaaaatggtagtcagaggga

SEQ ID NO: 266898 - DNA, 910 bp, Homo Sapiens
taggcctttcagcttctgaacgcagatattttcaaggaactctgaggcccaggagagcctaagtttttctccacggaagggcaaactactagcctcccccgcttcccctctgcgttcctgcctctttctagaaggaggctgagagggggaagcctgaacccccaaatcaagtccgccttctttctctgtgcctgacccagggcaaaataatctctctgatcctgttcttgaccattgaaaaagcactttctctggtcgggatactactggcactttacatggggggcagtttaaccgcaggagtccgctttctgaaaggtgcagagggaggggattccgccaccagccgactgagaggagccccggccccgcgtggtccctcccagccaccctccctctgggattagctgccctggctctgctctaggcgtccccagcccgtgcagtcccggctggcgcaccaccatcgcctctgcagagcgcggccgcagccctggagcccgcagcccggagcccgcagcctggggcccgcagcccgtagcccgcagcccgcagagccgcgctgtccggggcatcccagtgcacggcgtccgtggacctgggacctcgaacctgggacgggcggaaaatccactgggaacacttgcatttctgtaggtgcttatttcacattcttgtcttttcttgcttgctcgagctgttcgtgggttactttctgccttagttaaaccaaaagggaaaggcggaagaggggaagccctgaagaatgatttagtggttgcccagcctcctttccaaggagaggtgttcgctgagcggctctccccgtccccgacactggcccctttaagaagccaagtcagtcctgatgctgctgtttgtattgctaatccccaggagccccgtttaa

SEQ ID NO: 266899 - DNA, 840 bp, Homo Sapiens
  misc_feature (576)..(585): n is a, c, g, or t
tggttctgtaagtcaccaccctcccaaagggatgaagtttcgggggtgcactccccttacctcagcctagtagggggacttccaggagataatgagagagttggatgtttcctcaaatttacagacacaaagactggtgcctggcttctcctgataaagctaaacctgcatgtggctggtctctagttggctagatagtagtagttaaaatgaaaagaaacacttaatgttagatgccatccaatagggccacctaaagggatggaaagttctcaacaacaagagcccagaggtagaagcaagactcttagcggggaaggatggagtcgcaagtgaaaacctagacaaagaagcatctgtcctggtccagaggcttccccaataaagatgtctcacacaactctaagaagttagaactcgagaaaaagactaacaagaaaaagagtaaggtgtgtttgtggaagaggtgaggcagttgttttcctataaataatgttaaattaaactaaatttggtctgaggatgcctcgtaacttgagtcgctacataacaaactgcaacctaacttaggagtannnnnnnnnngtactaacgaggtgagtctcagccaatcacagcagccaagctacagccaatcccatgtggccaactgagcagcctatgcccagtaagacaactgctcacctgtaactactcaagctgcttctggacctcatttccatttgctgtttataagtgctgcctgcccactttgctgagcagaactctctgaacttctttcgtttttgagggttacttgattagaaaattgttctttgttcaattaaattttgctaaata

SEQ ID NO: 266900 - DNA, 969 bp, Homo Sapiens
  misc_feature (267)..(447): n is a, c, g, or t
  misc_feature (638)..(638): n is a, c, g, or t
  misc_feature (732)..(732): n is a, c, g, or t
  misc_feature (763)..(763): n is a, c, g, or t
cctattctctcctctatcacatgttaaatacatgttaaagatacatgttaaaaaactgtttgttaaccaaataactacagcccttttaagtaaagaaatatacagatttagacacattacatacacagaagtacatctggttttgttgcaggatatacctgcatctcaggattttaaaatctgcaatacatcaaccagttttaattctttttacagaaataaatggaggtgacctaactagtagcatatttaaaatgctgtttaagnnnnnnnnnnnnnnnnnnnnnnnnnnnnnnnnnnnnnnnnnnnnnnnnnnnnnnnnnnnnnnnnnnnnnnnnnnnnnnnnnnnnnnnnnnnnnnnnnnnnnnnnnnnnnnnnnnnnnnnnnnnnnnnnnnnnnnnnnnnnnnnnnnnnnnnnnnnnnnnnnnnnnnnnnnnnnnnnnnnnngtctataagaatatctttttttaaaaagcagataccttcactaattcttataaaagaatgtaaaaggatgtgataaagcaaagatccttcattgcaggcagtatatatgctggataatccactggagggcagcaaagtgcaggatttctttttcttcaacatctgaactctgtaaaattgcctttaagccngcaagttacaaatcctacaaaaatttaggttgaagaacacagactaaaactacaggcaatgaaacaagttataaaaggagatatgatttacatnaatagatgctataaatacagaaacactgtgnagacaagataatccatctgcacattggaatagatattaaatctcacgtatatgatttgaaaattctactttttgttccagagacaaaagatatcaaatatgtattagacagagaaacttgcagacaattacaggaacacctaaacattaaagtctgagttcttctgcataatatttattcattctttctaaggatctgggccatta

SEQ ID NO: 266901 - DNA, 689 bp, Homo Sapiens
agggcttggggacaactgtggggacatggcccagatgatctgatcctggcagtagtgactgttggggaccagccattacagcagcagatcatcagactccaccaagagcttgggagacagaagtctctgtgggctgatgttcatggaaaactccggagtcatatagatgctttgagggagcagaacatggagctccgagaaaagctgagagctctgcagctgcagcggtggaaagccaggaagaaatctgcagcgtccccacacgcggggcaagaatcgcacactctggcattggaacctgcttttgggaaaaatttcacctctgtcagctgatgaagagacaatacccaaatacgctggccacaagaatcagagtgccactctcctgggacaaagatcgtcatctaacaattcagctcctccaaagccaatgagtttaaagatagaaagaattagctcgtggaaaacaccaccacaggaaaatagagataaaaatctttccaggagacgtcaagacagaagagcaacacctactggaaggccaactccctgtgcagagagacggggggggtgtctgaagatggaaaggtggcctcggacacctgtgtcactctacactggccccttggaaaattcagattcagataaagttccacttaggtctaataaaagtactcaatttgttattc

SEQ ID NO: 266902 - DNA, 680 bp, Homo Sapiens
cagttcattctttacatgttgtagtaggtagcctctaaactggctcccaatgatcctcaccctcctggtggtgccttgtacaaactccccttgaatgtaagctggagttattgccttgcttctaacaaaaagaatatggcagaagtgatggggtgccacttccaagactaaaatactgtggtttccatcttgggtgttttctcttactcccttctagaaagccagctctgaggcctgctacatccacatgagggagcacaaagcagtcaagccttcaaatgactgcagccattgactgattacagcctcaaggccctaagccagaaacatccaattaagcccactcctcagtttcctgacccacagaactgtgagagaaatgttatttcaaactgctaagtcttcggtaattacacaacaatagataactaatagtgtgtgttataagtatcttctattccttgccttgccttttgagtgtcttaatggggcttaatgaaaaaagtttctattttcaatgtagtcaaatttgtccattttttatggctagttttttgagtcttaagaaattcttctctgccttaaataatgtccctttatttttctaaaagctttcagggtttccccttttgtattgaatctttaacctacaagaaattgatttttatgcataacagatg

SEQ ID NO: 266903 - DNA, 484 bp, Homo Sapiens
  misc_feature (399)..(442): n is a, c, g, or t
aatacttcttgaaaacttagtttactatacatcttgccctattaatatgttctcttaacgtgtgccattgttctctttgaccattttcctataatgatgttgatgttcaacacctggactgaatgtctgttctcagatcccttggatgttacagatgaggcagtctgactgtcctttctacttgaaagattagaatatgtatccaaatggcattcacgtgtcacttagcaaggtttgctgatgcttcaaagagcttagtttgtggtttcctggacgtggaaacaagtatctgagttccctgggagatcaacgggatgaggtgttacagctgcctccctcttcatgcaatctggtgagcagtggtgcaggcggggagccagagaaacttgccagttatannnnnnnnnnnnnnnnnnnnnnnnnnnnnnnnnnnnnnnnnnnnctgaactgtaagggttagtggagagtttttaattaagcggcc

SEQ ID NO: 266904 - DNA, 724 bp, Homo Sapiens
aagtagctaaattttcaaactgcacaatgacaagctcttaaatgggggattctggtcaaaaggcatttggtcagcaaaaacaattttagatactgtagttttctgctactagttaacacacttgaaatttatatgatacacaattgtgctcacagaaaatatattcctcaatcatggtctaaagccagaaggttattagtactgatgccaacgaccaaaagtagggcctttcctgtcatttctcaggcacctgcttgtcatttaccctcaaatgacagcctgcggacagccaggtcccttgggcacagagttcttgattccaacgtttcaattcattacactagtcagcccactatttccccgcaacacactttcaaactttttcctaacttccacagaacttccccaaaatgtaacttctttcaaagaatggcaaactgaagttgaataattcagtcttaatttcctagttaatattaatcataaaatattacatttttatattgctaattcattttcaagtagattaatttctacccatgtagctgcagaattagaaaggcaagtctctgtagagctggtttactaaacagctgaggaatgatgctcgaagtacccttcattatcccaaagcatttattacataagaaaacattatgtagactttatgtgcatattatctatagagaacgtaaagtaggttttactaaaattaatgtcacta

SEQ ID NO: 266905 - DNA, 839 bp, Homo Sapiens
  misc_feature (388)..(388): n is a, c, g, or t
gtaaattgtgaaacccataaacaaaaagattttgaagaactgtcataattgtctggtgcagggctattaaactgaatattaaattttcatgaaactgccatttgtaaagagaagtgccaacagtaacaatccatttaattagttttttaaaattcacactttaatactgaaatacaggtatacctctgttttatataggcattatacacagttctattcctgggaagaccaaatgtatatttaaaatggaggagaggcatgccggatgttatttttcaaagatgggccacaccagtctacatcccatcccacctgctcttcttagggggacaatgacattccacctaaagagggctgcttccctccctcagtgggaccgggggtgggncatttgtaactgcctcaattaatagagtataggggaagtgacactgtgaattctgaggtttggtccacaaaaggcaaggcagatgtcgcttgtctgtcccatgtctgtctgtctgtcactgtctttcccctcaggattcacaacctgcctgcaccgggagctctgagccaatgctgagaaaacataaaagtgctaggttaagaattgagtagtatattttaccattttaaggaaaggaagcacagaaacacttgtaactcacacagaaagaagaaaatttaaccaaatttttttaaagatttgaggaaaggaaattatgaaaattatacatgggattataggaaaataaagaggctatgcttgaataggaaaacagttgtatcagtttaccactaaaggaaaacagtggataagtaaaaagacagataggaaaagaggccaaattaaggag

SEQ ID NO: 266906 - DNA, 646 bp, Homo Sapiens
tattactaaaccactaggatcagtagaactgacaacgtacagaaaacgatctaaatatgcattaagcagttagggtcccgggtcaaactcttgcaaaggaaaaaaatcactttctttctacctaaggcgggttctccgtagctgtccaggctggtggtcactagaccaagagcagctgcccaactacagagaagcaaactccaactcccagtagcccctacgcggaggcggggcggggatttgccaggccccgaaatgccaacgcctgagctcgcggaggatggcgggaactggaagagcggcggtctgcagccctaccctcatacccttgcccccgcgacccggccccttctcaagccctcgtgcacggtacctgtccccaggactctctgttctctttcccgctgcagcatgggcggtactaccgggtctcagatggcagcgcgggggcgacgaccccggggctggggatgaggggaaacctggcctagcgggcatgcagcgccttgtcatgtcggcgccgctggcgacaggcggcatgagccgtggctggagaagttgggtgcgtggttgccgtcttgctgctgggactccgggaggctgtcggagcagaggtgggcggcacccccttctctcttcatggcgc

SEQ ID NO: 266907 - DNA, 337 bp, Homo Sapiens
  misc_feature (165)..(291): n is a, c, g, or t
  misc_feature (294)..(294): n is a, c, g, or t
ttgagacagagtctctctctataggcccggctggaatgcagtgagtggtgtgatcacggcctactgccgcctccatctcccaggctcaagcaatcctcccacctcagccacccaagtcctgggaatatatgcgtacagaacgatgcccagccaatttcttaaatnnnnnnnnnnnnnnnnnnnnnnnnnnnnnnnnnnnnnnnnnnnnnnnnnnnnnnnnnnnnnnnnnnnnnnnnnnnnnnnnnnnnnnnnnnnnnnnnnnnnnnnnnnnnnnnnnnnnnnnnnnnnnnnttnaattatccattttctgtataaaaagtttttgcctatttatgat

SEQ ID NO: 266908 - DNA, 793 bp, Homo Sapiens
  misc_feature (194)..(194): n is a, c, g, or t
  misc_feature (234)..(234): n is a, c, g, or t
  misc_feature (760)..(760): n is a, c, g, or t
ctggaagagctatggtaactgtcatagacccaggaaagacgccgtttactacgcagaggtgctgcggtgagtgacaggagactcagcagcattgtcatatcacagagcaaaccctgcctgctgggcttccaggccatgtgaaggtagagataaccgatgacctgcttgattgaatgtggagcccatggggctgngttaggggtgccagggcttcagatctcttccagtgttctnggggtctgcctgtcccagggagctggcagcaattccaacacattcctgagcacttattgctaaggtgaatccaagttcacgttcccagaacaggttccgagttcaaccacgccagaggtctgcgccagctgcacttggtctaggaggcctgggaccaccgtcagcccattcttccttgaggctccggaacagcgtgggacattagctgagctgtgctcagaagcaactctctcgctgattagggctgccgagagtcccatcgtctgctcacctgtcaatcaatcaagcctcttcactgccatcctgaccatcctgtcagggctgatcaccttggctgctcacagaacccatgaggactgagaatttcccagatcctcacaatgactgagcagccctgcttccctggacctttataagcatctggaacatgcccaggtgtgccaggtgtggcctccatggcctgccagaggagggggcagggggagtgcaaagactgaatcagacaaagactaagctttgcttctgncccttcttcacccttttttcccatgcaagagtc

SEQ ID NO: 266909 - DNA, 289 bp, Homo Sapiens
tctaaagagccaagtctgggtgctgtcgtgagaaggaaacatgggtatggaagaggcacaacttgccgtctcaaggccctggtccaaaagtggcccatatcactcctgctcccagcccttagcagggacataggcacatggccatactccactgccagctgcaaagcagggctggggaacaaaatccttacagggcatttatgtgaccagcaatagctctgtgctatgggagaaaagagaaaaggaattttgctgggacagctttcggtctctgctaaatttattgatt

SEQ ID NO: 266910 - DNA, 1090 bp, Homo Sapiens
  misc_feature (1077)..(1077): n is a, c, g, or t
cacgaggaagaatgtggaaggatctcccattggccggttggggcaaaagctgaggaatctttcatccccttttgccaaggcgagactttcccagtgacggtgatgtagttggccactctgactatgggtggactcgggtgtagacctctgaagctgagatcacacgaaaacctgggcctccccgccatgtagctgttgggagagtagaaaaatagagcacgcctgatgtttctaaatgaggaagacttttcaatagtaatgaagaatccatggcactctcctcaccctcaaacacatggcagtcattcacatacaggccccaaagccactgttagtgctgcagtagctcctgtggacattggaaagcccggagagggcgtcggaagaaatcagctggcccccggcaggttctctggggttttgtgcccaaggctcctggagccctaaaaactttcaaaagttaactccccacgtccccatcctgcttgggtttctggacttttctgaggcaccggcagaggggtctcgttgctcccttgagtgtaggggcagccctttaacctggctccttgagtccctgctttttctgcttctgttgccttcttcctcgtcttcctctctctcaatatcgccctctctttgtccctccccagttcctgacctggccatcccggggtgcccttgaccagccccgtgtctcctcagggtgtcccagcaccagcctggcacagagtggggctcagttagagtatgtgggatgttggtttcgccaggtgagtgaatgaaaggactcgaccaccacagctgagccactagctgggccatgcgaagagttctaggtgcaaaggctggagggtggaattcatttttgagaggtgtgtgagcagcttccgacccctgccccatttgaacgggggccttgctggtcgcgtccctgcattcacccgcgcggccatcccgtcatccaacagttgatcctaactgagcacgcccacggccctggtctggcctgggcaccggccaccgtagcccatcccttgatggcctctgtgtccccaggagggcgggccggggggntgcccaggggctg

SEQ ID NO: 266911 - DNA, 488 bp, Homo Sapiens
acagaacctacatgtgtcatttcactgctttaaaacctcttgcctcctacatgcctacagagaccctttgtaaatagtctctgagatccttcctttaacccattccccttccctgcacatacaaacgctgcttctctttactccctggactgcaggcctcttgataaatttgagtctctgaacacactgttctttctgtttggaatgtcctttcacccccattttgttgcccagaaaattcctactcatctataagccccgttcacgtggcaccttttttgatgaggcatccctagttcccctgtcccattttcttatagcatctagtagacctctgtgttctcacactcatcctcagtaccacggttgtcccctgaaaggtgttgtgtccctcaccagactgggagcacctcaagggcagaacccatgtcatgttcctttttgtatttccagacctgaaactgccagtaaataaaccctaaaagtag

SEQ ID NO: 266912 - DNA, 612 bp, Homo Sapiens
agtgcattagaaacacaaattacagatgtctagggttaggatttctcaaagtgacactattggcatttggggccagataattcttgattctgaggggctggcttgtgcgtttcaggatatttagcagcatgcctggcctctaccccttagacgcaagaagtatgcccctgttttgacagccaaacatgcctccaggtattgccaaatgttccttgagggacagaattgcctctggttgagaacctctggtctctgggggtaaaggctttgtatggtgcctgatgtagagtgggcacttaattgccatagtaaaaaatatatacattattgaacatttaatgaacaatataaatttatgggtagtaaccctgaggaaaattacctataaatgtacaaaaacctgtagtatataatatcctaacacaaggcctgcagcatacaaaaatcactgtacttagaagttcagaatgttttgaaaggatctttaatttcttgagtctttagtcctgaatcatctaaacaaaatatagcattatcgtaaaatgctgaaaatttataaagaaaagttacctttgaagtactctatcccatatagtctagaagttaagaatt

SEQ ID NO: 266913 - DNA, 457 bp, Homo Sapiens
  misc_feature (365)..(365): n is a, c, g, or t
  misc_feature (393)..(393): n is a, c, g, or t
  misc_feature (401)..(401): n is a, c, g, or t
  misc_feature (406)..(406): n is a, c, g, or t
  misc_feature (434)..(434): n is a, c, g, or t
  misc_feature (446)..(446): n is a, c, g, or t
tagaaacacaaattacagatgtctagggttaggatttctcaaagtgacactattggcatttggggccagataattcttgattctgaggggctggcttgtgcgtttcaggatatttagcagcatgcctggcctctaccccttagacgcaagaagtatgcccctgttttgacagccaaacatgcctccagggtattgccaaatgttccttgaggggacagaattgcctctggttgaggaacctctggtctctggggggtaaaggctttgtatgggtgcctgatgtaggagtggggcacttaatttgcccattaggtaaaaaattatataacattatttggaacattttaatggaacattattaaatntatggggtagttaacctggaggggaaantttactanttaantggttaccaaaaacccgttaggttattnttaattatcccntaacacagggg

SEQ ID NO: 266914 - DNA, 710 bp, Homo Sapiens
aacctctgttggtaaattacatttatgaagcccttttctctataacaatattataaataatagtttattttctaggttaactcctcaaattctaattcatatttatcacatggtaagatgcaccactagataaatggcaccatgacacttagaacgtaagttctgcttatcgtatcatttttgtggaaatctctgtaatccagttagaacctggcacagtgtcagagagaaaacaggcacttcccaaaatctgaataaatggaatatggtattctcgctctgcccaggttgtcctgaccagaacagccaagtggaatagatggtgttcactttctggactatgggaggagagttgcgggtgacagggagggcacactggattagcaggatttcctcactgtttgtatctttgacacttgtcagcaattctgcctcagcgaacttcataaagaccaccaggaacttgtttatctggtggcaaagttgggggtagtggaaatgaggatgcaaaagatacagaacacttgaacaacaaacttgatgtaattgatacttatagatcattccacccagccccagcagaatacacatttgttttaagtgcacacagaacatttaccatgttctgaaacataagacaaggaattgatgggcattaaaaaaagcatatacctttcatatataggcattccacttctaggtgtttatcc

SEQ ID NO: 266915 - DNA, 468 bp, Homo Sapiens
  misc_feature (69)..(69): n is a, c, g, or t
ccccatagtcccagaaagtgaaacacccacctaatccccacttggctgttcctggtccaggacaacccngggcagagcggagaatacccatattcccaataaatccagaattttggggaagtgccctgttttccacactgacaactgtgcccaggttcctaactggattacagagatatcccacaaaaatggatacgataagccagaacttacgttctaagtgtcatggtgccatttatctagtggtgcatcttaccatgtgataaatatgaattagaatttgaggagttaacctagaaaataaactattatttataatattgttatagagaaaagggcttcataaatgtcaatttaccaacagaggttacttgaaatctggggattatgaacaaaaggttacttaatataaactaaggttcatctgtatcatacaatgaaatattacacagccaataaaaatgacgt

SEQ ID NO: 266916 - DNA, 800 bp, Homo Sapiens
ctaagttaccccagttacctccaagtttcctgaaaaggggcagtgtttgggataagcaggttaaatatctgtttcattttctccaagttctaccctgtgatcacatatgaaatcacccagaagttagttttcaggcatagaccaggaggagaaagagtcttcaaactaaaagttagaaaatgctatgctttgtattttattaaacattgtgtgaacgacacacatcgtttggttacctgatctttttttacaccagactaggaaatacttttttgagaggtgatgacagtggtcatcaatggtttagcatcaatctgcttgactggattatgttgattgtattattggccatcacctggcaaggcacaattatagctgagatagatctggaagtcgtagtggatcacaagctggaggagtattgtgttgtttatttttaagaaagcatgataaccaagctgcgttaaactaggaatgatgtggaaggtctgggaagcaatgcttcagctctatttaatatttgacaccactgtgtttgaattagcggaaaaagactgtgggaaatccaaaaagtacagaaaagcttattaacaatatgtttaacaggatgaacaataagccctttaaggaaaggtttgtggatttggggggttgtttaacttggggaaaagaattaggggtcacttaatagctgttggtatgtgtatcactgagataaaggcactgaccagttacatttggtctccagggagcacaggagaaacaccttggtgcctaaaacaaatagacaagcagttctt

SEQ ID NO: 266917 - DNA, 490 bp, Homo Sapiens
  misc_feature (47)..(59): n is a, c, g, or t
  misc_feature (219)..(349): n is a, c, g, or t
  misc_feature (373)..(433): n is a, c, g, or t
ggccgcttaattaaggagttatcactcagtacatttaaatagggagnnnnnnnnnnnnncaaagaatggaataaagtaaaagcatggataggttttgttactctttttgcagttgatcattggctattcttaattcttatagaccagttagtactttagcagcatacagataagatatattaaaatcatacactgagtttttaaaaagtagatgggcannnnnnnnnnnnnnnnnnnnnnnnnnnnnnnnnnnnnnnnnnnnnnnnnnnnnnnnnnnnnnnnnnnnnnnnnnnnnnnnnnnnnnnnnnnnnnnnnnnnnnnnnnnnnnnnnnnnnnnnnnnnnnnnnnntagctgagtgtggtggcatacacnnnnnnnnnnnnnnnnnnnnnnnnnnnnnnnnnnnnnnnnnnnnnnnnnnnnnnnnnnnnngttgcaggtgtgatatggtcatgccactatattccagcctgtctgcatgtaaaaagc

SEQ ID NO: 266918 - DNA, 429 bp, Homo Sapiens
ttcggcacaggttgaaggccagccaggattgctgctgctgctgctactcctgccaacacccctttcattggcatgacggaatgaaaggatgcatgtctccacttcctgaccctccgcccacttccttctccctccaccacccccagtcgtcagctccttccctcatttatttttgttaagttgtgtgaattatttttaacccatttatcctgtttgtgcatagggtttttaagaagaaacagcacagtgcaacgaggcaaatctttttggggtgtgtgggaagcaagggagggaggacatggagaaaagttctttaaacaaatagcaaactattgaacatgtgtaaaatcctgtatcatttatgaaatatgtataaaaagcaatgtaccttctggaacaataaattacttatttcatttttggaaaaaa

SEQ ID NO: 266919 - DNA, 354 bp, Homo Sapiens
  misc_feature (291)..(291): n is a, c, g, or t
atgaggtaataaaaggtaatgcaaagggagaggaaagcatgtgtcattaattttctgcctaggacacctccctgggttaaattgccatttcctttcttccttgcataatgattaggaaacacatcctcctgacctgcctgccctcttttgcctactttttcatctgcagtcaaggtctggttttaagactgactgttacttttacaaatctgtgtgtattgggtgggctaagggcctgtatgggtccactggctgtattcccagggtcccaggcatgggtgcctggacgcntgccggggcaaatagttagttcaccccgaggaaatgggctggatggaatttcatggagggcct

SEQ ID NO: 266920 - DNA, 501 bp, Homo Sapiens
ctggaagaattaattctggaatatttcttaaacttgcttgatttgtgtaaggtctggctgctgggctccctgaaaccttgcacatatcttactgtatgactgtatttcgttttgagtctctggattctggggtttggacagatgaccatagtgaggcctgcagaaatatgcatgtcctcagtgtttggactgccagctgcaaggcagagccaaacccaatatggccccatcatcccctggctcagctgtgctacctggccatgctggaaggggtttgatcttccaggaatttgcttcacagctctttcctgtcccaagatctatgcctgatgtgtaaattcaggacccaaaagggcacaaaaaagcaataactactaaatataaggaaaacaactctgtatacagcatgtataaagaaaagcaagatatatttggggagataaaagttgtaaaggcattaagatgtgtgtttgttgagaaaaaataaatttgtgcatttaa

SEQ ID NO: 266921 - DNA, 777 bp, Homo Sapiens
  misc_feature (339)..(377): n is a, c, g, or t
cacaacagcctgttcctgtgacacccaaagggtcacaattagtggccgaaagtttcttccgtaccccaggtggacccaccaagccaaccagctcatcctgcatggattttgagggtgctagtaaaacctccttaggaactctctttgtcccacagcgaaaactggaagtctcaacagaggatgtccattaatcaacagatgttggcttagtttaattttctaaagagttgtttaatagagaaaatgtacacagactgatttggagaacacattctctgaaaatactgtaaatacgttggggatttgttcaatgtgaaatcagatagttgttttcatacnnnnnnnnnnnnnnnnnnnnnnnnnnnnnnnnnnnnnnntatatttgtataaagctaagtttagctttcaatcctacaaaataaaagtaaaatgttgaactctaagatatattaacttctagggggaaaaatccattattttagctatgcctatactattatgcaaagtaactgtattaaagtttacttccctctaagcaagtatgcttgacatgcctaacacagcattcccttaaacattttgcacaaagaaaatgctgtgtgatgtataatgttgtatttttaaataggggtatagctatattttttgtaattccctttaatctgttggtgcagtgtatctttttgtaaagtttgcaacaatcctcaatcaagtctatggaaaaattatttataaaatgtatttttaatcataagttgttcaaattaaaacttttct

SEQ ID NO: 266922 - DNA, 681 bp, Homo Sapiens
  misc_feature (110)..(119): n is a, c, g, or t
cataaattgctataaggccaatctcccacggctagcatttctgggttttggattttttaaatttaagcacaagactttcaattttcttccagttaatgtcatattgtcannnnnnnnnnaatttaaaaatattttgttggtaaaaaaatgctaatgatcatctgggccttcagcaagttgtaatctttttgctggtggagggtcttgctttgatgttgatggctgctaactgaacagggtggtggctgttgaagattgggtggctgtggcattttctttttttgcaattcaacttttattttagatacagaaggtacatgtgcagatttgttatatgggtatattgctgtctctgaccaatcattcctgaccaaaaaatctttcaggatagtctatcacccacctgactatatgcctttatccgtgtcaggacatgcagacacatgactttccagtgcatgtctgccatgtggtacatttaaaacgctaaagagggccaggcctgggacaggctgagtctcagctcctcaggaagcccctctccatgtgacagtaatcatgtctcttctagtgttcctgttctgccacctactaagccaatcctcacacttagccaaaagtactaatttattgaattatagctaaaaaataagaaatgtgtattctaaaaccctagcaggt

SEQ ID NO: 266923 - DNA, 806 bp, Homo Sapiens
cttccacagtatatattattatataataaaatgcttagaatatacacacagtaactaaacactacttataaaatatggctctagatatgtttgataaatatttccttcatgaaaacatggaggaattaattagcagtatctctctgcagcctttagccctcgagaatcatgtagaaaagagggagctgtcttctcttttagcagaacatctgtcagagatgggttcccctgacttagacaatttgtgtttttttccctacagaatgattgagtctcagaattgttctttaatcctcagtatttccattaagaagagcttctatcaagtgcttcaaaagtaccccaatgtgaaggagtaataatgactccctgctggtgaagcgaagtgtggaggacacaggtccctcagccgtccactggatgctgcaactgtttggcctgagcccaacatgggcagaaatacaggcggcagcataagcagatgccaagaacctgtcttgcttctactgttttcattgggttgctatatctcctttgtagtccaacctgcaaattactttgagaaggggagatacacccctggaccaatctaggactatatttgttcccttgctaaagtaggaaaaaaaatacagaacctttaaatattgaactcaagggcaactaatttaaattcctttcctttcatgttgaaagtcttttgactgggttattctgaagccatagcaattaggttacagtttacttctctgttactttaccatctttaaatttggcaccttcaaaaggttgttctgtgcgtttaa

SEQ ID NO: 266924 - DNA, 656 bp, Homo Sapiens
  misc_feature (211)..(385): n is a, c, g, or t
  misc_feature (407)..(423): n is a, c, g, or t
tttctttattatacttttattgtttgtttaattcatttttgtctgttacaaataaatttcaaactagagagtcacagatgttaataaactcgcccaatgcatcacctgcctccgaattccatagtttccactgccttgcgctacttgcattctgattagagaatggtaatgtgtgcctctctgaatcaagttcaagaataaatgccctatnnnnnnnnnnnnnnnnnnnnnnnnnnnnnnnnnnnnnnnnnnnnnnnnnnnnnnnnnnnnnnnnnnnnnnnnnnnnnnnnnnnnnnnnnnnnnnnnnnnnnnnnnnnnnnnnnnnnnnnnnnnnnnnnnnnnnnnnnnnnnnnnnnnnnnnnnnnnnnnnnnnnnnnnnnnnnnngacagcgagactccgtctcccnnnnnnnnnnnnnnnnngaataaatgccctgttagggaatagttcaaagcctgttgtgctttgtgtgggtgagctaaggccaagctaatcaccacttctctgggcagcacctctcagctgcctactgagttcttggtggattgcttaaaatacatactaaaatgatgactcttcatagtaaaagtaaattaattgctctgttattcaaagaaaaactgcgggaaaatatctggattagcaatgtgttgaa

SEQ ID NO: 266925 - DNA, 239 bp, Homo Sapiens
ggccgcttaattaagttaccccacagttgcttctgtcttcctgcagtttgtataaaagataaaacctctcacatggcatatgtatttatactacacatagaaaatataattaggcaataagctaaaatactactttgtaataaactgtgtagcatactgtttaagagtaagtactggtaactttaattttgttgataggtttttgaaataacctgttatagccgggcgcgggtttgtca

SEQ ID NO: 266926 - DNA, 652 bp, Homo Sapiens
  misc_feature (454)..(463): n is a, c, g, or t
  misc_feature (613)..(613): n is a, c, g, or t
taaaattttaataaaaaataataattgctcatagtaaaaatttgaagagttaagaagataataagaaaagccacttcttgacctcctcttcttctaggcctactccctgatgctgaagaccactgtttataaatctctcaagtcttctttcaaaaatttccattaaatgtagatgttgaatacagtggcctggtcttgttcaccttgtgtccctcagatgtagaatagagccaggcacgtcgcagggctcagtgtctgttgatggaatgaaccacatttacagtattgtcctatgcaacacgttattactctgtaacatgtttttacttatcattgtatcttaggcaaattttcatagcagtacctgtagggtaactttactttttaaattagctacatggtattccatcatatgaattactataattatttacccaattcaagttactcccannnnnnnnnncctgttagaaagcttgctgcagggatatgactactgattgtcccctcagtatccatttttcagccaggcacaatggctcacaccagtaatcccagcactttaggaggtcaaggggaaaggattgtttgagcccaggaatttcgagaccancctggacaacatggcaagaccctgactctaccaaaaaaa

SEQ ID NO: 266927 - DNA, 154 bp, Homo Sapiens
gatctaccatgcccagctgattttatttgttgagcttgagataaaatttgggttcatgtgttatggaaaagctttctgataagattgagaattattactgttagaatatcttacaaatattttgtttgtttgttttttgagactgtcccccccc

SEQ ID NO: 266928 - DNA, 692 bp, Homo Sapiens
aaaacattagggactttcccatttagaactgcattattcatacaaattcttagcttctgaaaaggggctcttgataatttggtggcttagagaagttagatcacagctgtgaagctctggctttggtatttgagccccatggcctgattgaggaagtggcagggacccatatctgaggccttcccaccttcctttttccctcttccccctccaaggagaaacaagacctttaatttccacagtagagcaatgggtttgtgcttgcagttccttctgctcattctttattccctctttatttcctttttttgtcactcatgcctagttccctgaaccccttacttacctgggccttacctacatcttctgaggcccccagcctgcagggctccttctttgactattcacctggtggcttttactcctccttcaagaccccaactcacagatgacttctctggagtcttccctgaatgctctaggcaggtataaatgagaaaattgttcctctcttcccctctttattcctctcactgtgcctccaaagtactttgtccatacctcggtgatagtacttattctactgtgattttattgtagctttgtgattgtctgcccctctgcactgagcatctaagaacagggggccaagccttattcatttctgtgttaataaatatttgttaaatgtg

SEQ ID NO: 266929 - DNA, 850 bp, Homo Sapiens
gttaacagcttcttgctatactttccaggaagtaaatcagtggcagacagctacttacttccttatggattcaaagcccagagcattgctgaggcctctcatacctgccccttggtcgttccttcctgtcaaagccaagaggggaaggagagaagagcctcctctcaccatgctcaggaaggcattcattctcctgagagtagatgagcccatctgtattctggggccctgcctgcatctgggaaggtgtcatggtcccaacagagaatgaatcagtcccatactggtgagggctggagtagaacccccatctttgagcacttccctgacacctgaccccctcccttagttacagttgcctggttctaccaaagccactggctaccagactgtttccttcacaccccaaacttctaggtgatctgtgggatttatacctgggcagccttcaggtacgtctgaagtcccacccatgaggctcctcaaagtggagtggagtggagtgaatgaggcctgctttactccaccggaagaatatgcatttgataggggagtaaagaataaatcagactaagaaaagcaatttggtctacctagcactctcagtctatgtggccagtgaatatccacttcagtggggctgggattttcagatcaaaaaaccagaataagatgtatgggagccaggccacaagactcaggtataaaaaaagactgaggaaaactttcatgccttcctctccctctgccaggatcagtgagtgggtgtcacagaaataccctggcattaccccctggcaagcagttgataatccacagaaggtcactttgtgggttttgaggacaagac

SEQ ID NO: 266930 - DNA, 777 bp, Homo Sapiens
gatgaaagaatgaaaatggcagactgcctagcagaactagcccttcccgatgtttcattgttgctatagtgacgatccagtctgcacgaagatcccagcttccttaaccttgttcctacctccagccagctcacccattggccacctgtatctcctgctgtagcagccagaaagctacaactcccaaccggctgagcgccaccagggctttcgcgtccaagtccctttgctgagtgtgagggcctgcgcagtagaacccgcgggcccagagctccatctgagcatgtgcaggctgcggggtgtttccttcgtctgctggcgggagaggagtggggaggagctctttacccgctgagcattgtggggcccgcttggatctccttgtccaaagggtctgggcgccggggctgcagtctctgtgtgaggaaggcggacgcgggaaacctgcttcggtctccatggttacgagccgctcagcgcgcaggagggggattcaaaggtttgcgttgccacagtaacccgtattggatagtgaagatctagagcagtcccaatgagtctggataacagggatttagggtaaccaagggttaaggcacaagcaggtgcagccagttctaggcaagattgggcagcatccaggccacatcctcactcctgagaaaggaggaggggctgatgcagctacaagctggagatccactggcttcacctcagtatcccacaccaaagtcccatgtcttttttcagtaatctcaagttgaatgggttccttcc

SEQ ID NO: 266931 - DNA, 852 bp, Homo Sapiens
  misc_feature (717)..(798): n is a, c, g, or t
agcaaacatctttatttaagaaatcaaatagggtaaaaattatgcaatttcacacaaggatacaagacaaagcttagaattacttgctcaaaagttactcagaatggaacaaaattgttcaagtgctcccaattagcacaggctgtattacttgcttttcaatggacatttactattttacattaagatctacttataggaacaaagagacaattcccagccccctctgggtgtatcacctaaaagactgaatacaaatgttaatgtaatccaaggcttttctttgacaacaatactaaaaattgccttacaattttttacaagtacgagtatcaacagtttactgtctgagggaaaggaaatataagaatataaagtgacagaagcaacacacttcactgtggcctgcaactgctcccagcgtcctattttataaacatgatttgggttctcacattatagcaggatcactattcctagcctctggtggaagcagacatgtgacacttagcactgcacaagtgtttctttggcttcttgagtagtgctgtgtatactgcctatacatttttataacatctctaaatgcataatgtcaacgtatgtgctatcacatttcactcccaactgcagaatattttaattttaaatttatctaccaaatcttgactatgacatttatttttgggttgttacattaagatcaacctatctggnnnnnnnnnnnnnnnnnnnnnnnnnnnnnnnnnnnnnnnnnnnnnnnnnnnnnnnnnnnnnnnnnnnnnnnnnnnnnnnnnngttacggtgaaacaactgccattgcactccagcctggacaacagagcgaaactc

SEQ ID NO: 266932 - DNA, 933 bp, Homo Sapiens
  misc_feature (270)..(270): n is a, c, g, or t
  misc_feature (586)..(586): n is a, c, g, or t
  misc_feature (615)..(615): n is a, c, g, or t
  misc_feature (644)..(644): n is a, c, g, or t
aatgaaaagcacctaaattcttgaaaattacaagaatattgagagatatttaaagggttgcaaaagcagtcccatgggactttgaaattactagttcttaaaaaaactagaggctggaacatgatcatctttgaccagatcatcagattgtccaactttgcatttagatgaattgttcccagcctaattataagctcttctcttgaccagcctccccaggaggtgtgggtgtcttgccattcaatggcatgctttctgtttgggtagganaccactgggactgggctctaaccctgaggtccacaccagggtgacttatctaggatttctccatgagttgagcatttatttctcaggatcgtgagaacctgagcagtgctactcaaagtgtgggccacaggcagggactgggctgtaatcccatgattatagcaagtgagagagagtaagtgttggaaacttgtagaaccatttgatattgccacacattcaagtgtgtgatcatatttctagtttattttcattgtatctggaaataacaggccataatggattaaatgtttaaaaagaaaaaacctgtcattangcccacagatagtttgagggagaaatgangcttagcagaagccagctagttagttaanatccctcactctgaagagccggtaaggccgtcctgctgtcaagaaatagaagataacccttgatgcccagggcaacattcaccttcacattggcctttggggttggcttcaaaggctctcccctcatcccaggagacaagttctccatcaccttatttccctgtggcctctcaaagaagtgctggtctacctcttggtgattctggaatgcatttcatcaggttgggaagggcaggtaggagacccagtactgatttccttaagggtgcttccatttcactttaaaaaa

SEQ ID NO: 266933 - DNA, 892 bp, Homo Sapiens
  misc_feature (165)..(389): n is a, c, g, or t
  misc_feature (514)..(514): n is a, c, g, or t
  misc_feature (581)..(581): n is a, c, g, or t
ttaattgtgtgttaattatatgtatagtgagaatatgcttgttccattttcacctagtttaggaaatttaatataaattaagggactgtaattccagaagtagtagaagtgctgcaaacagatattgtaagcagacattttagaaggggattccactttaaattnnnnnnnnnnnnnnnnnnnnnnnnnnnnnnnnnnnnnnnnnnnnnnnnnnnnnnnnnnnnnnnnnnnnnnnnnnnnnnnnnnnnnnnnnnnnnnnnnnnnnnnnnnnnnnnnnnnnnnnnnnnnnnnnnnnnnnnnnnnnnnnnnnnnnnnnnnnnnnnnnnnnnnnnnnnnnnnnnnnnnnnnnnnnnnnnnnnnnnnnnnnnnnnnnnnnnnnnnnnnnnnnncaaagtcgtagcagagtactttgattgtagaagtaatctctgacctgagaggttctgtagtgattatttttgctgccctttctctaggctgctcttaaaatggggcagtgaattttataaatcangaacctaaatatgttttaaagcaccttgcctataatgccctcagcactgcgaaaaaatactggtatntcctaaaagaatttagagttacaaatatagcaactgaaaaaaatcttcaaaaacattttctgtttccactaataacattagtttgagatgtttagaaagcataaaggattaaacatgattttgttttagttgttgattttgagaatgagggctttgtgttttccactgagggatttgggtgcatttgaaaagatcttaatgttattctcataacagcgacttttgggtaatgtaaataagataacaaattgttatgtttagtttaaactcatgatacttaagcactgtttactcattgtcattaactaatc

SEQ ID NO: 266934 - DNA, 583 bp, Homo Sapiens
tgcagggtaggcatggcatctgcatgttcactgaagggcctgcctgcatttccagggagagaaagccttcaggccactggtgcataaagatctttggaaatgtccagaagatcccaaacattgcctgtcctgcatgccaggcctcacttgccaccagcctgctccccagccgcacatccagctgtcatttcctagagaacccatcccacgcagttgttttggacacatagcgttccttcagggaatgtggccccggggccacaggtggagtagagggcacagtatcccgaaccatctaacggggcccgactcaccctcaccatgcaccaggccagttatggtttctttctgtgtcttatttccccctccatcaaatgagagttattgtagaaaccttatagtgctgtgttgggattagcagtaaacagtttggcatgtggtagatgctcgggaaatggaagctgcccttttttcctaatgggaaagaagggattttgtttttgagacaattcccttcctctgctgctgcatagggacacctgggtgcctttctaaaattagaccagggcatggtggcttgctc

SEQ ID NO: 266935 - DNA, 795 bp, Homo Sapiens
ttttttttaaaaacagcagcattaaacttagtgacatgacaccgacatgattaataccatcttaacacactcagaattccgcctttcacattataatcaagcatagtggtaaactgttataaaagtgactttgctacgagagacaggttagggaacaaacaacctgacttatggtagaaacccatagctctgttcagattgcaataaaccatacacattttaaacacaacgtaacactgtaacagctggtacaggggaaagaagaaatcttcactcaagtagtgtctctttgagcacaacacggtggtagacaagtaaaattggctgtagactttcattacaaacacaagcacacagagagcgacattcacaccagtgtgttcactttgtgtctctctgaagcaacaggctaaaaaaggatgatggaagtaaaaagttggtttcagaaaaagctttttgtccatttcgtacgtcatattttttcagtttcatatggtttgacttcttcctctctcttccacttattttcatttctatttggacaacaagcactgcatatatgtatttacgtgacgctgtttattacatatatacacactattttgggagtttgattcctcccataagatcagggtgaaacattctgcccttggtttatatgcagagcagtttacaaaagtggggtgaatgcactgctggctgctcctgctgcgggccggagacagagtgaggctggctggggaggaagtgtcgtttagggtgaaagtgagaaaagctgggaagaagcaaaatttc

SEQ ID NO: 266936 - DNA, 920 bp, Homo Sapiens
  misc_feature (398)..(419): n is a, c, g, or t
cctggaggctgagggcgaacagtaggtagcaagggagtgtaaaggaatttatctagataagtttgtttacttatgccctccggaaaccatgcaagactgctccctgcaaaggggggcgacaatgttcattactcacaaattgtgttggcttcaggcctttggtattctgtctctactgaataaatacaaatggttccagcctatcaggactgcactctcttctcggctgcactaaagctggcactcccccagccgttctcatgcaaaatacctgtgtcagaatactcctttcatcgatcactcagccagagtcttcaggacagactcggcatgggacttgtccaaaaaaattctaatcaaaagaggaaaattttggaatatgccaggaatagtggaannnnnnnnnnnnnnnnnnnnnntaggcccatatgctctatctcaagaaacaagatgattgtaacatgtccatgattaaactattggcagattattgctgtgttaatctctgtagtctaatgagttctttgttctgttctgctgcctttttacgttttcttgtcctttcaaaagtgttcttgaaagaaacaaagcgaataggcagttagcacagcacagctaccccttaccaagcagtctatggaaacaacccctcatccaaatcatgggttagttaagaatctaactggggcaattaagatgaattccactcacttcctggtcacttcagcagcccagcggcattgagccaaaatatacaattctgtgttattagtgaggaaactttaaaactcatgtttgttattacttactacccaatttcattatcctcccttcctctttccatttctattctctctcacttgaattctggcattatttttagtggcctctactgataatacctacccgtagagtactcc

SEQ ID NO: 266937 - DNA, 674 bp, Homo Sapiens
  misc_feature (429)..(429): n is a, c, g, or t
  misc_feature (598)..(598): n is a, c, g, or t
  misc_feature (656)..(656): n is a, c, g, or t
acaggtgtgagccactgcgcccggcctgttggagttctttacatttattttataatcaatgctgttttattaaatgcggattttattttggattacaggatgtagaatgccatatttttcttagatcatagggcctttcacatttgtaatttggccttgtatgagttaccctgcaatccctttgttttccccataacccttccaaaggaaggccgcaatagaaacacaaagagaaacaaaataattagaattattttttaacttctaaagtttcaaggttttggcataagtctggtttagaaggcacatttggcctaggccctttccttcccaccaagggggaaagtcttcctctagacaagaggcagagggctcctcagagtcagatcctggtgtgggctctcacgtgctgctgctgaatcccagggnaaggagggaggaagggcagttgacacccaaaataagggtggggaactgtcagcagaggaggtctgtgtcatgtttttcagcgctggggttggggggagcccaggagagcaggaagatccagagatccctcgccccagctcggccatgtgtgtctgggacagagcctgangtggcctgagcttcctgtggctccagagtaacattatagagaagctgaattctcctgnttttctgaaaagggcatg

SEQ ID NO: 266938 - DNA, 940 bp, Homo Sapiens
  misc_feature (661)..(669): n is a, c, g, or t
attgtacggtgagagaatgagagcaaaacctcagagcccccttcccaggaaccctgtcccagcctggtccccacccaccacgcaccactgacccgatgctagagaaggatgcggctggaggtgacttcccagccaacttggtcctccaactaatgccactgaagacattcccagctgctatccggggagtcatccagagtgagctcaactattctgtgatcctgcagtgggtggtgacaatggaccctgagcctgtgctgagctggaccttcagtggggtgccctgtgggatgggagagaagctgttcatccgacggttgtcctgtgagcagctgggcaactacatgtgcatagccacaaacagcaagaaacagctggtctctgagcctgtaaccatctcgctgccaaaacccatcatgcagcccacagaagcagagcccatggagccagacccaactctgtccctgtcaggaagctctgccatcgggctccttgcggctggggaatcctgggagccggggcactgattgcaggcatgtgtttcatcatcatccagagcctaaggactgacaggcagagaataggaatatgcagctgaaatgtgggcaactctcctgtcagctgaagagatgggtgctttgtacctctctatccacgtggnnnnnnnnncccatcccatagcttccaagtctacaacatctctgttcaagggaacaacccaacgtaaccagactccctttgccctgtttctgaaacacctgaagaaaacatctgatgggttgactcggtgccatccttggtcccatcgccgtgacacgttgtgcaagcaaagcatcagaggttcatccctgtctgtgggagctcagtgctcagaaaacaggggggaggttttaccttggaaattggccagaccccaaaatatgtcttttacacatgctgc

SEQ ID NO: 266939 - DNA, 549 bp, Homo Sapiens
aaatgtcaaagttctcctgttgcttctgtgagccactatgggtatcagcttgggagtggccatagatgaccgcatttccatgacctaactgtatttcacccccttttccttccctactgttcttgccccaccccaaccagttcctgctgctgcttttggcttcttggaggtgaagggcttaaaacaaggcttctaagcacccagctatctccatacatgaacaatctagctgggaaacttaagggacaagggccacaccagctgtctcctctttctgcccaattgttgcccgtttgctgtgttgaactttgtatagaactcatgcatcagactcccttcactaatgctttttgcatgccttctgctcccaagtccctggctgcctctgcacatcccgtgaacactttgtgcctgttttctatggttgtggagaattaatgaacaaatcaatatgtagaacagttttccttatggtattggtcacagttatcctagtgtttgtattattctaacaatattctataattaaaaatataatttttaaagtat

SEQ ID NO: 266940 - DNA, 901 bp, Homo Sapiens
  misc_feature (13)..(13): n is a, c, g, or t
gttgcttccaagnaaaaagaatctcattctggggagtgtgttagctagggctttcactttgaaacatgcatcatttatttgttattattattattatgcagaaagaacaacaaatggcttaaattaggcaccaagtcacaggagttaaaatgtgtccttttgtcaaagagaatcataatgcaatcttacccgtatatgggcatgtaactatatagtttacaaagagcttttatacgttcatcatcttgcttggattctccaaaaccaccctgtgcgtgggaaaggtcaccaaccccacttcacatatgttcagagaccttggatatgttcagagacttgctcaaggacacacaagcaggacaagctggcagaggaatctaagtcttcaattttcttctctgcaaaatggggttaatggcgcttactgtcgcagaagtgtgttaaacataaccacatagtaaaagtctagacagaatcagtaaatgttagctggtttcattattcataaaaagaacattacaatgtctatttccaatgatatatattttaaagatatttagttgcaacaatagaaaccacttatcttgctaacttaacttgccaacaatctgctaaattaccttccgtatttcctccacgtgcccattgttcatgggcaataaaaaaggaatttattggaaggacacagaagagcttcagaatcacaggaagagcagaataatgtggctttggaaaatacaggacacaggagagaggctggctaacctcagggtacatgtatacgccatagtgaggggaggcaaggatccctggctgatagtcagccagggggacaagttccctgaaagggaaattgggatgctattttagaagagaagaagaaataagtgcctggtaggaa

SEQ ID NO: 266941 - DNA, 760 bp, Homo Sapiens
tgaggaagagcaagatggatggattctggataggaaattggcagccaaaaaccacttttaataaaactgacttttagaaaacatataaaacacccattgtgcttgtttgccttaagagttctcaggaccaagaatgtaatacctcaattcaatagatatcctttccttccaagccctcccactttgcatataccaagaattagccattttcaagtgcttttcctcataaataaataaaatcatttattttactcacctatttattacatgtctgaggccatgtttatccaaggcagtaaacacgactctggaaaatccaattcaaaataaaataacttcatattaaaggagttgtttaaaattcagctgtttgtggggtggtagaaccagtgcctcaggatgcatttaaaaaacaaaagccttcattacaagatagaaggaaatgaaatctaaaagaaagaagtaagcgtgatgtctgcctgatttatttcattgccctcttctcaaagtcatgccaacacacacctgttttttagtccattttcatttctgacttgagaaaccagacttactatagtcaagaggaataataaaagcttatttctagcatgactcagagcttttgctattcccttacatatacatagtctgaatactttgttttatatatgatttatattctacagattttaactcatctatactccaacagatcttaactgttatgaatattttatctataccatggtctcagtattca

SEQ ID NO: 266942 - DNA, 863 bp, Homo Sapiens
tttgttttaatgttgcagaacaggcatcaccaaggacctaattaacttagattaaaaccacctgacattatatattttgatgaatttcaagtgtcataaggagccaaataaaatccattttaagcaactcaaagaaaagcagcttattctctggctttgagaaaagaaatttgtgataataaggtatcagaggaaaacatgaatgtgtccaaaacttacgttaaacttttgcacaatacaatatgggaaagcaaagaaagaaaaagacacaattgataaaaatcttatttacctaaaatacattaagagctgatatgaagacagaggatccaattccactggacaaagaagttgctggagaggaacaaacagaagaggagatggctgggcagagacaggaatgctcactaagttctacctgctaagccagactgtgttggtagtcctggccacatcagtagtgaaaagtccacacaaagcccccagcctctcctgtctactgtgttgtcccactgagccaggcctcgaagtggcagctccccagagagtgctgtctccttaatcagccctggcctgagggactctgtggaaccgcacccccagccatcctacaagggacacacagatcaagcgagaaagacatttgtgttagtttaagtctctgagacttggggtttgcttgttactgcaatgtaacctagctaaatataatacaacaaattcccatgcaggaaaaaaaagcacaacttcctttaaaatatggaaataacttgtaaaataaggaaaattaatatgacaatgccagttttggtggggctacaggaaaacagaaatgtactctaattgctaactctgtgccgaaa

SEQ ID NO: 266943 - DNA, 488 bp, Homo Sapiens
  misc_feature (47)..(245): n is a, c, g, or t
ggagacagggtcttgcgtcggctgcactcaggctaaagtgcagaggnnnnnnnnnnnnnnnnnnnnnnnnnnnnnnnnnnnnnnnnnnnnnnnnnnnnnnnnnnnnnnnnnnnnnnnnnnnnnnnnnnnnnnnnnnnnnnnnnnnnnnnnnnnnnnnnnnnnnnnnnnnnnnnnnnnnnnnnnnnnnnnnnnnnnnnnnnnnnnnnnnnnnnnnnnnnnnnnnnnnnnnnnnnnnnnnnnnnnnntacaggtgtgagccaccacatctggccttttaaacaattttttaatccggaaaggtttaatacaccaaaactttgtgaagcctttggagaggggtcttacctccagatgacagttttctcactgtaattactaagaatttaaattttcatttttctgaaaatactactgaaaggtcccaaaagcctgttaatgaccataggccagaaagaaaaagaactgaaatatccatttctcatttatca

SEQ ID NO: 266944 - DNA, 779 bp, Homo Sapiens
cttagcctaccttacatgtgcttagtacacttacattactttatagtggagcaaatcatctaacacaaagccagttttataataaagtgctgaatatctcatgtcatttagtgaatactatattgaagtgaaaaacagcatggctgtgacaggtactcaaagtatggtttcaacttaatgtgtatcacttttgtgccatcataaagtagaaaaatcataagctgaaccattgtaatcggggaccatctgtattaactttgaaaactgaagtaaatgcaaaattatcttctgtatataaaaacaagccccaaggacaccaaaaaactccctacctccatttgctaactggaatagcaaatattctgccactcttctgtcccaagtccacaggagacacgactaatgaattgcaacacacttacttctggctcagaaagttgcctgagcatagcatcccaaggcaggcagttcaatcacctggagatggcataagatggaaccacctgccctctctctttcacatgtctgtatgcattcatgcacgcatgcattcatcagctggaagctacagcagtgtccagcagtatctccacgctggcatggacctcagtctgccttgtttcagcctgtttggacacttgcccttcaccagatcctcacaaacaactgtggtaacatacaaggtggtgattatcacctgcttggagactgagggacccagaattggtcaggcctagggttcaaagccagcttcatctggagccaaaatcactcccttt

SEQ ID NO: 266945 - DNA, 670 bp, Homo Sapiens
  misc_feature (495)..(534): n is a, c, g, or t
  misc_feature (615)..(615): n is a, c, g, or t
ggattcccacccaggtctggccgactgtaaggctgcccaccatgacaccagctgcaatgtttccatcctcgtccactgttgtgggcatattggggcatgtcctcaaatactccagtctctcctaccctgccccctttgaagtcaggggaggctgcgtggcctctgtggcaaatgcaaagtgagctgaagtgacgcagtacttcccggcagaagctttttcttgccatggtgagtgaggaagcacgtgctgcaatacaaactccatcagcggggggcgtggtggccacagcaagaaaaaccttcctgctaaccccactggatgcacagcatgggggagaaatgaatatatactgttaagaccgtgggcattcggggctctttgttactgcagcatacgctagccaccctgactgatataatgctgtcatttgccacatgatgtatgtgatctcctgtcccatccctgatcttcccactcagaaaggctcattgccnnnnnnnnnnnnnnnnnnnnnnnnnnnnnnnnnnnnnnnngaaagcactgagttcaaggtcctggagagaggacctggttaacacaggtgcttcctaaaccctggctggtagaaccctcantctgcagctatgcctcaaagctgactaaatcaatctgtctgggattagaattgag

SEQ ID NO: 266946 - DNA, 709 bp, Homo Sapiens
  misc_feature (173)..(187): n is a, c, g, or t
attgaatctgtccatctatccctaattgatctggactcacatatcttttttttctagtagtttagaatgcattaatacatttaattattttgattcacaaattgtcccagctttgatcagtaggagcccttttaagctggattctgtgtccttgtaacttcctctcatcctannnnnnnnnnnnnnnaatttcagcacttgttatttttaggcataacaagatgttcagtgctcatcttgaatttattctgctcctgccctgaaatctaccatttcttcaaggaaccctagttgctttttgtggataatggtgttaaagactatgctgcttctcagtttattgtattttagctccacatccatccttcattgctttgtcagatctccttttccagctggtatggatgagcttagtcagtagaaggtgttggaaggacactgtaggaagtagggttttgggtgtgcctccgttcctatttgctctgtgctgccagtggcatggtgtggggatgccaagtggtactcatcccccaggaaaattttggtgtcagttactgcctgcggctccttgcctttcagcctggatctgctggcaccacaacagagcttcctgcttgccagtctcagcctgtagttccttgcccatgaagtttgaccctcctactatcatattagaacagctatgtcagggacaaccagtgggttacag

SEQ ID NO: 266947 - DNA, 809 bp, Homo Sapiens
  misc_feature (23)..(23): n is a, c, g, or t
  misc_feature (94)..(94): n is a, c, g, or t
  misc_feature (98)..(98): n is a, c, g, or t
cgaaatgccttgttctataaggnactaaaccacccaccccctacccaaacctttctcggggaagcagaaggggaacttgtgccttgtgaggaancganaaaggccccttctggcccctggagacttcacgccaatggagcaccagctctctgtccttgcaatagcccgagtgcaggcagaacgcagtcatttgtgtttatctgagaggagctttgggatataaatagtttcaggccccgctgcgctgtcattccagcccagcctcctgattgagctgcttccgggcgggctttcttcttgttggcggtcccatgctgtgttcagatgggctctgtgacaggtttggatgttttctatcactgaataaaactttccactttggaacatattttctacactctattatctcatgtaagtcctgcaacaactattaagtaggcccattttatggactgaaaaagcgaggcacagagtatttgcccaaggtctgagtcactgaagtatgataatgtgtgaagtgaacagtataataataatggactgaagcacagttaagaatccagtcatgctttctccttccctgatctcactaagccacacttttaggggcttacaaaccagttcttattgccaagccctctactctaccctatcctttcatgaatcggagcctagcctctgataacataaataatttacttctcttgatgtagaaagagatgacgttgttaccctgagtgacagtcacgacagaacaaaaccacaagaccagaccacatttgtggataaatatattagcaaataaatat

SEQ ID NO: 266948 - DNA, 373 bp, Homo Sapiens
  misc_feature (137)..(137): n is a, c, g, or t
  misc_feature (171)..(171): n is a, c, g, or t
gcgaggccacagagtatttgccccaggtctgagtccacctgaagtatggataatgtgtgaagtgaaccagtataatacataatgacctgaagccacagtaagaatcccagtcatgctttctccttccctgatctcanctaagcccacacttttaggggcttacaaaccagntcttattgccaagccctctactctaccctatcctttcatgaatcggagcctagcctctgataacataaataatttacttctcttgatgtagaaagagatgacgttgttaccctgagtgacagtcacgacagaacaaaaccacaagaccagaccacatttgtggataaatatattagcaaataaatatatttcttaacataaa

SEQ ID NO: 266949 - DNA, 467 bp, Homo Sapiens
  misc_feature (67)..(128): n is a, c, g, or t
tgaataaaactttccactttggaacatattttctacactctattatctcatgtaagtcctgcaacannnnnnnnnnnnnnnnnnnnnnnnnnnnnnnnnnnnnnnnnnnnnnnnnnnnnnnnnnnnnntgagtcactgaagtatgataatgtgtgaagtgaacagtataataataatgactgaagcacagtaagaatccagtcatgctttctccttccctgatctcactaagccacacttttaggggcttacaaaccagttcttattgccaagccctctactctaccctatcctttcatgaatcggagcctagcctctgataacataaataatttacttctcttgatgtagaaagagatgacgttgttaccctgagtgacagtcacgacagaacaaaaccacaagaccagaacacatttgtggataaatatattagcaaataaatatatttcttaacatagtgcctg

SEQ ID NO: 266950 - DNA, 919 bp, Homo Sapiens
atggaaggtattagacaaacatgcccatgaaaccccagcttcccttttctatgtgctaggcatggaaacttatgaaattttagcactccaaagtcatttggacttcaaggcatttaaaatcatttttctaaggatttaaacagctccactataagtcttcacctgacatgaattggtgagagaccaggctgatcctggcaaaggtcttgtgtctttctgccaggcaaaatcctgggttcttctagcaggacctaagccagtctggggacgctgatattgaggatgagctgggggactctgctctgtcctctgtgaacacacaggaggcccatccagagtgagtgaggttgattctctctccctctttgcccagagcttccctttctggccgccagatgggtggagatctgttttgtctggagtcctggagttgcttttcttaggtttgatataagcaagctccagaaagaatgctgacagaaaagggaccctagctgtggtaggaagtggccctcagagtcaaggaggcaggatgaatttaaattctgcatgtagggccatattttggggagtgatgggattatgccacacccttcaggtgtcaagataaagagataaaacccagagtttgtacagaatgagcttgctgacacacagcctaaatttgtaccgcatgtttcatactaactccctctgagtttgcacatgggacccatgaggaggcatgaagaggtaactgcccatgcccgaggattttccagcccttccttttctttctgtcaatcacctactaatcacagaatccactccctacaccttttctactaaaataactctttaaaataagtacaatgggacagatttgagctgggctcctgtctccttgttaatcaaattgcaataaaatgttttcttttgt

SEQ ID NO: 266951 - DNA, 776 bp, Homo Sapiens
  misc_feature (62)..(62): n is a, c, g, or t
gtgaccatccagaaagcataatagaaatcgctcagatctcaagagtgggcttccaaaacaancagcaacaatcacctttcactttacagcagagccatgctgcacgtagcgagtaaatgttgagccgagtttcttccgcccatcagaaaccctctgcacaaggtttccgtgtttgtaaagggcagggggaagggaaatgaataaaacgtaaagcatcaggctcatccacgcccactcagtgataacacaggaatgtgactaatcacaaagatcaagtgacaatgcatagcccaagtctctttccatgaagaggtggagactggtggctatagcatctgcagggcaactttccattgcacgtgactttgcagaccctccatggaggaagcacccagtatgggcaacaagtcacaggaccaaagagcaggcctccccctagtctaggcacccctggtgtggagtggggggtggccctcagacaaagagccctgcggagcacggtgcagctcaggactccgtgagaagtgacttgactttattttgcctgtaaatatatacatagagaaaaaatagaatttcagaaataactttttacataaattttatttctaaggaaaaaaccattttcaagggtttagaagtacgtacaaactggagccacagcatccagagtcgttcatgaactgccctccacagtcacctaagcagcattcattctcaaaagaaaactttaaagctgaggaactgtgcacactcacactgctaaggatgtttct

SEQ ID NO: 266952 - DNA, 803 bp, Homo Sapiens
  misc_feature (12)..(12): n is a, c, g, or t
  misc_feature (83)..(263): n is a, c, g, or t
ccttgtcttagnagtctgctattgggggaacccaaactaaaactggcctctgtacagcaggttgagaggcaatatagcatggnnnnnnnnnnnnnnnnnnnnnnnnnnnnnnnnnnnnnnnnnnnnnnnnnnnnnnnnnnnnnnnnnnnnnnnnnnnnnnnnnnnnnnnnnnnnnnnnnnnnnnnnnnnnnnnnnnnnnnnnnnnnnnnnnnnnnnnnnnnnnnnnnnnnnnnnnnnnnnnnnnnnnnnnnnnnnnnnnnnnnagtccccaataaatgctgttatttctaagagcatccaaatgtagaggaagtgtgcccctgaggactgagcacaccctgcttttagcctgtcctgcccccagctgaaggtgaaaccttggccgcctgccctcctgaagtcccgccactgctgctgggggttggccaactccgctaccgactgtctctgctctctaagaataggtttccctcacagatggcatctctctgaatgctgctagagcatctggtgcttccaactgcacactccagggaggaaggcagtgtggtctgtgccggggagcagggctctgccttccagcagatctgagaggagtcccatttggctccttcctagctgccctccattctctaagacctgtaaaacagggatggccagagggctcttgttgcacagtaagtgctatgcttcctaaatgctagttcctgaaatagaatggtttaacctctacttactaaacacctgctacaatcctgttaattcttttgacatgtaagactaaaataaataaataaataaat

SEQ ID NO: 266953 - DNA, 614 bp, Homo Sapiens
  misc_feature (199)..(199): n is a, c, g, or t
  misc_feature (230)..(230): n is a, c, g, or t
  misc_feature (264)..(264): n is a, c, g, or t
cagtgatctacactccaaggagagagacttcaccagacattgaccctgctggcactctgatcttgatttccagtcttcagaactgtgagaaaataaattttggttgtttaagctacccagtctatggtattttatgtcagcctgagctgactaatatatttatcatgaggtcaagtatcaatttagatttgtttctggnctctgttataattgtttatacctacatcctngcatccttgcctactatcataattattctgtccntacaataaatcttgatatctgagagtataagtctcccaattcttatttttttcttcaagattgtttgaactatccttgctcctttgcatctcccatatacattttaaaaaacaactttttaatttccacaaaattttatgcaggatttttatcagaattagatttaaatatatagatcaatttaggaggaatcttcctctttacaatatttagtctctaatctataaacatggtatgtccctctattgacttaggtcttctttaatttctctcagcaatgtttatgattctctgtgtaacaatcttacacatatttctgtgagattattttacctgggtatttgatgggt

SEQ ID NO: 266954 - DNA, 351 bp, Homo Sapiens
  misc_feature (138)..(138): n is a, c, g, or t
  misc_feature (156)..(156): n is a, c, g, or t
catgctttaatgaggaataagagaaacggtgaaactatgaataaccctgggccttgtatcattacattagaaacactgctctaaatatgagtctatggctaaaatattaatttggagaggcccagggaatttattaanacaaatctcctcctgcangagaactttaaagttccaaatttaaataaaacaaaacagaaccaatccatgtccaaaattgtaaaatgaagtatgccatccagttttgccaatactgaaatattaaattaatataatttattggtaaaactaccttagctacctaagtattaagtgtctataataaccaaatcttaattatccatttatgggtga

SEQ ID NO: 266955 - DNA, 775 bp, Homo Sapiens
  misc_feature (23)..(23): n is a, c, g, or t
  misc_feature (26)..(26): n is a, c, g, or t
  misc_feature (273)..(273): n is a, c, g, or t
  misc_feature (369)..(369): n is a, c, g, or t
  misc_feature (730)..(730): n is a, c, g, or t
aattcggcacgagcggcacgagnagnacacagtaaaaatagaattcatgaaacatttctaaataatgggtgtatagagattctctttatgtgtggtatcagtgctctgctatgtaattatttgttatattttaaatttcaatttatgtgttctctcttgcccccttcagccccgtgccacataatttttgtttttggtggaaccattcagccttaaatacttttagtatatatcgtctgaggaataggggacataactccaaaactacttatncacacccaaggaaatttgactttggattcagtgccattcttaattatattaacccatatttcaaatttcctcagttgtccccccaaataactgganttttctaattttctttgatccagcatctaataaaagttcatatgttacatttagttgttctgtttcttcatctttctttaatctaaaacagttcccatgccctccctttaaaaataaaaataatctatcttgacatttctggagtctagaccagttattttgaaatgttcctcattcttgatttgtctgattattttcttactgttaattttaggttaaatctttctggttaccatatagagtctgattattttttaagaagtgtagtattcagttatagagaatcttgacttgttctgcctgcttgcacctgcttttcttagagtcctaacctctcaactcaggtgcaaggaagcagagnttgactacttttgtgggtactgaagacctagcttattgtaacaac

SEQ ID NO: 266956 - DNA, 746 bp, Homo Sapiens
gtcaatttaccgtttttggacttgttctcccataatcaaatcctccctatcgtgctaacaatgtggtggtgtgtcaaaacattggaattctgcttcaatcagcaacccagagcttaataggaaaatgaagcaacaaaatgttgctcttactgttaaccttaggctaggcctgtccttaggatggggactgtttgcttctttatggtaaatgggccaaacgttcagttttgtgagagcttgcattgtcagcagaggcccacagcagtgtcttgagcaccattcaggcacgcttctaaagctcaagtaccgcaaactgaagtacgaaggcatcccacaatttagtaagcccagagaagagttaagaactaaatttgtttgccaaaaattttaaagacacattccattttactggcagcaagtccaggggtctggctcctatgacactcatgtcctgccagttatcacaaaagggcttgccgtgaaattaaagtggttgttttgtttcttgtttttaaattaaaaatgtgtgcaatatgtaaaccatttagggacaacaataaggtgccacaattccaaaccaaaacatttgcaagtcaccactctatgtcctcagggagtatgtgatatagttaatgtttctaatattcatcatcaatgaaaacatcagttacaggtagagaatttctgatttagcaattttttaatcttttgtgattaactgggtaaattaaactgtttgaaggtaa

SEQ ID NO: 266957 - DNA, 468 bp, Homo Sapiens
  misc_feature (201)..(201): n is a, c, g, or t
aaaactgcagacaggagtgcccaaagagccaagaccccctgactggctgcccagtaaaatgaaggtgccctttaaaaatttttggccaaaacaaatttaaggccctaaactcctcctcctgggccttacctaaattggtggggatgccctccgtaccttcagtttgccgggtaccttgagctttagaagcgtgcctgaatnggtgctcaagacactgctgtgggcctctgctgacaatgcaagctctcacaaaactgaacgtttggcccatttaccataaagaagcaaacagtccccatcctaaggacaggcctagcctaaggttaacagtaagagcaacattttgttgcttcattttcctattaagctctgggttgctgattgaagcagaattccaatgttttgacacaccaccacattgttagcacgatagggaggatttgattatgggagaacaagtccaaaaac

SEQ ID NO: 266958 - DNA, 711 bp, Homo Sapiens
aggctgatagtgtatgccagaagcaatgttacacggaataccatgaataaaggtttctgggttcacggatgattgtgttagcaaaagcattagacagggaaagtattaatattatattaataaatccagatatccagaatgcatgtctattccagtgaggaaaaactggcatccctttgatgatggaaggggtccaacgtaattaacctgtcaccaagtggctggcttgtaacctcaggaaatacaccatatcagggaatggcagatttggcaatcgcaatggcaagtagccaagtgttcaggtcacccactactacatagcaaaccactccaaaacttagtagcttggaacattatttatctgactcacaagtctgccattagggtaggagctggaggggacagctcatctctgtcccattctgcatcagctgggagggctcaaagactgggagctattaatcatcagaaggctcactcacgtctggcaatgagaccctagctggggacgtggttaaaacacctacaattcttcttacacgagatgacacatggaagccttgtctaccatgaatgccctttggtgaactttcatacaagacactaatatcttcactctggatctaaagaggcccatctacataactcctcctcagaaatccttgcatcagtcttccatattgtgtaaggcaggtcaatatttgaaaaatt

SEQ ID NO: 266959 - DNA, 461 bp, Homo Sapiens
  misc_feature (433)..(433): n is a, c, g, or t
  misc_feature (448)..(448): n is a, c, g, or t
catttagggtaaaataccaaaggtaccagaagaagacacagctctgactgcaagtattatcagagcctttcccaccctccccaaggaaccccatcctgttgcagttgctagaatggtgaggccagtgtgtcacccaaggagagatattggggctgcttagtcaagtggatgtcagccagctgtgtcatgtgggacagctctgtactttctgcagacattagggctagtgctcagactgccctctatttatatcccttagtaattctgaggcatgggatacaattgctcctctaagaactcttgaggcaaattaaagaaggtagttaacatccaatggacccaactgggggtaggaccttcaagtgttcaggcaaaacttttgttaactgggctgcttacccctggccatattgggtgtgttcccggggagggntgaggggaagacagncaggagatttaac

SEQ ID NO: 266960 - DNA, 766 bp, Homo Sapiens
gaataatgaataggtcacatctggttggtggaaaactaggtgaagtgcttctttaatatgcactgtcttgtcttcccacgcaagatgtgacaatgtttgagaaaaggtgtgtcatactcagtgacttcaatttgcaaatgtggggcctaaagaaagctctgcagctctgaacctctcactggccagagctcagcctattggtcccatccatgatgctgagacaaacagaaactggaagctgaagtcagtgtctctggtgctcagaaaccctgtggatttccctctgaaccaagatttttagtagtaaaataaacaactcatggacatctgtcagatgagaagttttggtcctgttagagaggagaaagactgtaatgaaactactagacccatttgggctaaagtttggcttttccttccttgagtcatagaacgtatccatctcccaggaaatgtccttctctggcgtctgcttgcccttctgagtctgccttttttgcactgaacataagcactttatactaatgggtcacaaatcttgcagcccttaatttgggataagaccagattttcctgacattttcctctaactcattgaactatcaaattataggcaaccactgactagactgatatgagatgagctaaaagcctttgaacaccacgctgtagtctccaacagaaaaacaccaccaaaacagatacccatgttgaggggttgaatgttttactacaaacaagccacaataaagtgtctatcaacatg

SEQ ID NO: 266961 - DNA, 406 bp, Homo Sapiens
cgcaggaccgggcagttcctagtgagtggcagcacgagcgggggctgtctctgtgtgggacacggacgggcctgtcaatgatgggaagccggagcccgtgttgagttttctgccccagaaggactgcaccaatggcgtgagcctgcaccctagcctgcctctcctggccactgcctccggtcagcgtgtgtttcctgagcccacagagagtggggacgaaggagaggagctgggccttcccttgctctccacgcgccacgtccaccttgaatgtcggcttcagctctggtggcgtgggcgggggccagactccagcatccctgatgatcaccagggcgagaaagggcagggaggaacggagggaggtgtgggtgagctgatataaaaaggtttttatgataaaaaa

SEQ ID NO: 266962 - DNA, 737 bp, Homo Sapiens
  misc_feature (63)..(75): n is a, c, g, or t
  misc_feature (392)..(442): n is a, c, g, or t
  misc_feature (700)..(700): n is a, c, g, or t
taatcactgcaagtccagcttgaagagggtgatttcaggatctacatgagaataaggcgcaannnnnnnnnnnnnctgaaaaatacggaagggttcatttacagctgttaaagatgggccggttttagggctaaagcaagactctggtcagatgttaacaactcagttatcctggggaaaaaataactggctcccaaccctttcccttttcagcatttgcaggaaaagaaggagtaggtaaaatgctttatttcctctcattctccatggtgggcaggagttcacataacaattataaaccatctttaacaggaaagccaagtaaatcctgtagggatttatttggagctccctttttgctagaaaatgagtatcatgaactaaaaatggannnnnnnnnnnnnnnnnnnnnnnnnnnnnnnnnnnnnnnnnnnnnnnnnnncacccaccgccatggtggaaaatgactgtggtcaagaagattgaacatttgagcaagaccagatgcctttatatccaatagatgccacggagagtagatcacaacacatctaactgctgtatccccatataaaataattttaattttcctagactgcagaattgatcacatttactgatgatggattgggaagtaggtgaagaggtgagagttggagagtatccattcattcggccagattattctcatttataatgnagtcttccaataagtatttatttccagaaatctattc

SEQ ID NO: 266963 - DNA, 540 bp, Homo Sapiens
cacaatgtacaaccaatccctaatcagttatttttgtaagccaaaaagaattcctgacaaaccactttgtatcagtcccactccctgtctcccttttcacctttaaaaatctacctgtaatggctgccaattgaagtgaagattcaaggcaacttgagtctatgcccctaggctgccagcctcaagcctggcccacctgaactctctacttaaatcaattttgtctcagcttctttctttcaggtagatgaagctggcagggggcaaatcacagaggtggatgtgtaaaccatggcaccaagtctgtccctctttgaacacggagtgggaacgcttataagccaggtcaggctctgacacgttcattactcctagctgcctgctagtgcatggaatagaaggtgcaacgaaaagcagagggaccagtgagtagagaactgtaataatccaggtatgagatgaggatggtctggactagagtagcagcagggatgagatacaagatctgtgctgacagcaaaatcaacagtaagtggtaag

SEQ ID NO: 266964 - DNA, 555 bp, Homo Sapiens
  misc_feature (273)..(401): n is a, c, g, or t
ggccgcttaattaagagggaatattgaattaataatcagatatttgatggttatcctattgtactgcttcttctggtcaaataatgttgccagtatgttttctgcattttggggggaaatattagaaaaaattttataatctcttcctgcttttttgacagctgtgctttctactactcatcatattttcagggtttcagattggtaaccgtttattttttattttgtaagacagagtctcgctctgtcacccagtctggagtgtgcagtggnnnnnnnnnnnnnnnnnnnnnnnnnnnnnnnnnnnnnnnnnnnnnnnnnnnnnnnnnnnnnnnnnnnnnnnnnnnnnnnnnnnnnnnnnnnnnnnnnnnnnnnnnnnnnnnnnnnnnnnnnnnnnnnnngacacacatggcctggccagtcttatttttttaaataagtttattctggagggaggtctattaagattttacacctccagttaattctgatgtcgtcaacttattaaaaatcacagactttttccagattttcagatatattataaaaatgtct

SEQ ID NO: 266965 - DNA, 713 bp, Homo Sapiens
aagaagcaattagaagattccctccctgggcttataaaaatgatgctagaattttttggaataaaactgactgataaaactggaaatgttgctcgggctgttaactggcaggaaagatttcagcatctgaatgagtcccagcacaactatttaagaatcactcgtattcttaaaagccttggtgagcttgggatatgaaagttttaaatctcctcttgtaaaatttattcttcatgaagctcttgtgggaggaatactattcccaatattaaggcagagtgctctaggagtattttgtttatacaattagagacagaagagaaaggagaaagctcctgcggttcgcccagaaacactacacgccttcagagaactttatctggggaccgcctcgaaaagaacagtcggagggaagcaaagcccagaaaatgtcttcccctctcgcctccagtcataacagtcaaacttctatgcacaaaaaagccaaggactccaaaaattcctcctcagctgttcatttaaatagcaaaacagctgaagacaaaaaagtggcaccaaaagagcctgtggaagagacagacaggcccagcccagagcccagcaatgaagctgccaagccaagaaatacagagaaggacagtaatgctgagaacatgaattctcaacctgagaaaacagttactactcccacagaaaaaaaggagagtgtatct

SEQ ID NO: 266966 - DNA, 650 bp, Homo Sapiens
  misc_feature (93)..(104): n is a, c, g, or t
  misc_feature (221)..(221): n is a, c, g, or t
aaacgtgggaggaggagattttcctactatctacacaactacctggagatggagtcagatcccacaggttgagggctcagtccccaagactgnnnnnnnnnnnngaccccttcagacaccagtcacagatctggacctccaagaacttctgatagactggtttcaagttgggatcccacggtttcaattaatttgctggagtggctcacagaactcaaggnaaacacctactttaacgtttaacggtttattgtaaaggacattacaaagcacacagatgaagagatgtgtaaggtgagatatgggggaaggggcgtggtgcttccatgccctccctgggcacaccactctccctaaacctccacatgctcagctatcccagaagctctctggagacccagtcctcttgggccttttatgaagacttcatagtgtaggcaagattgacaaccatgtagaaatgtgactggacaaaaagggtatgatctaaatcaaccaacacccttcagttcagatttttcttggcctctctgtacagcattccttcctccagagtatggggcaggaactctctggaataaaagtctttagacttacaattagattagagtcctgccttgggcaagtgaaaggaagataagagaaggtca

SEQ ID NO: 266967 - DNA, 403 bp, Homo Sapiens
  misc_feature (368)..(368): n is a, c, g, or t
accggtcccatttttttgagccttcttacacatatttccagagtatattatcttctgttctgtccaaattgagagataattatttttaattttgtatgtgctgcttaccagaaattttattccaagccataagtacatatttgctatttattataagtacataattaaccatttaattatgttgctttttataactgattcacaaaaggttgttttacaacaatatgaatataaggatcagcagggtgtagggactcatggcttgcaatctcaggcacttaggggagggctgagggcagggtaggatcatttgaggcccatggaggtcgggggatccaggccggggccaatggtaggcaaaagtgtcntctaccaaaggaaaaggattattaagggtcattat

SEQ ID NO: 266968 - DNA, 465 bp, Homo Sapiens
  misc_feature (27)..(27): n is a, c, g, or t
  misc_feature (32)..(32): n is a, c, g, or t
  misc_feature (48)..(48): n is a, c, g, or t
  misc_feature (115)..(115): n is a, c, g, or t
  misc_feature (140)..(140): n is a, c, g, or t
cgcctttttaataccggattcacaaanggtgntttacaacaataggantataggaccagcagggtgtagggactcatgcttggcaacctccaccacttagggaggcctgaggccnggtagatccatttgaagccccatgnagtcggagatcaccctgggcaatgtagcaaaagtgtctctacaaagaaaagaatataaggtcatattccttggaataattacaaaatcttgattaaatttatatgtctccttttctactgatttacaacatattaacaatgacctagaaaatattatcaaaaaccacttaatgagttgatagaatccacctttgtggtagaggggcctgagtgatataaggaaaacaaacattcaacataagtgatggtagagacttttatttccatcaagccacacaatgaacagctctcacatgcctaaacaataatacagggtattgaagct

SEQ ID NO: 266969 - DNA, 884 bp, Homo Sapiens
  misc_feature (818)..(818): n is a, c, g, or t
  misc_feature (863)..(863): n is a, c, g, or t
gaaaactcaagaaatggcatcgaaaagcaagtcaaaaccgtgagatttcagaattacagccctcctcccaccaaacattacacctcccatcccacctccggaaagcctgaacagccagccaccctcaaggcgtcccagcctgaagcagcgtccttgggcccagagatgaccgtcctatttgcccaccgaagtggctgccactccggacagcagacagacctccggagaaagtcagctcttggcaaggccacaaccctggtgtccactgcctcaggcacgcagaccgtgtttcccagcaaatgaacctacgggtggcttttcctaggaccccaaagaggtgaattgcatttaaatacagtcttgcctccactgagggcatcctgccattctttggggacttgagcatgggtccttgttcttcctatttcacctccaggaaagcaaaagtgggagcagaaattcctgccctgggtgggaggatagatggcgtggcctcccaaacatacaaacataatgatttgaaggcccacaaagctcgccttacctcagacccaaggagtgaaaaattgtcgtgccccactttaatgccccagcatggagtatgtggcctcttgtcatcccccgtgttactgtgtagaatttctatggtgtcctaaagggggctgcagcaggggtgtgacaacggtgggattgttggcgttgcttctttgaccttacaatatcctcaacaagcattagaacaacttctgccatcttctggggcctgtacactggccactagtagctgccatatctttttccctctgtaaagtcataancctggctgcaaagggaggatttctgcgcggggtgtgaggtggatnctttgaacattctgagaaccc

SEQ ID NO: 266970 - DNA, 734 bp, Homo Sapiens
  misc_feature (40)..(40): n is a, c, g, or t
  misc_feature (43)..(43): n is a, c, g, or t
ttgagtgtatgtggattttggtgtatacgagaggtcctgnaancaatccccccatggataccaagggatgtctgtaattttatttacaaaaagaatgcaaattcttgacagactaaaaatgagaatgaaactaacaaaattaggagggggaggagaaaagacgagaaagtaagaatgtaccaattcctcacctctcctagtagggagccaatatacagtgtgtaaaatttataaataatgatttaggtaaacaacctaaagtcatgaaagcttctagcaaaactaaaagtaatacaattttttaaattaggagttaagaataagtttttgtccctttgaaggattttcagctggtgagtcaagatgtatatgtacagtatttaaggttataatgaaaagaacccagaaaaactaaaaccagaaattgttaattgccagttgggtcctaggatatggtaacagataaggtaggtgggtaggtaggtagagtagcagggagacccttacttttcttttaatatgttccccccttttgtttggatttttaacgattattatgcattatttccataacaaacaaatgtaaataaagtgtagtttaactacaaaaagtaacttttagaacacccttaacaaatattttgtaggagtcaaatgaggtaggatctatacggtatgcatgaacatcaaaaaatgatcaggacttcttaagtcaagttagtaaactaaaagat

SEQ ID NO: 266971 - DNA, 667 bp, Homo Sapiens
  misc_feature (189)..(189): n is a, c, g, or t
  misc_feature (564)..(564): n is a, c, g, or t
aaaaattgatcctgcatttctgcatgacaacacttgtgttggtcgctcaccaggctacccaccactcctcattgtcttctcctgggcatgctttcttccttatggaatctgcctagtctcccaatgagcccggtaatagcccagtacacgtaggctaaccttgttattccaaaaatccctctagagtanagttcccaaagttgtaaacttctaaaaagtttcaacattgatatggagttccaaaaaagtcaaggacaaatctgtatggctccttggaatatccatttttgcatacatttatctaggaaggcttatgaagcctcttctactacaagaatctcctgatgaacaagaaagtaagaaggaattacaaggttatctgcatttgtgaattactcatagttgtgaaaaactacaaaagaactatagggaatgattgttctaaacctattcaccccttcaatttaataactcatagagaattaagatattaaattcattcaatgaccaaatatctattcaacactcattgtgaaccttgcacttgcaatgtgctggagattncttggaaaacaggttgaatataatctctgctctcatgcagcacaagttggtgggggaacaaaacaacacacaaataagcaaataaaaatatattactgcagat

SEQ ID NO: 266972 - DNA, 924 bp, Homo Sapiens
  misc_feature (48)..(48): n is a, c, g, or t
  misc_feature (56)..(56): n is a, c, g, or t
  misc_feature (86)..(87): n is a, c, g, or t
  misc_feature (117)..(117): n is a, c, g, or t
  misc_feature (125)..(125): n is a, c, g, or t
  misc_feature (151)..(151): n is a, c, g, or t
  misc_feature (161)..(161): n is a, c, g, or t
attcaagcaagtagtttatttgggaaatgatccaaggaaatgccaggnactgagtnagaggttgaaacagagtaggggagaagccnntcaggggctcactgggtcaagtaattaccnctgtgggnaccagagcttaaccctgctgcacagntttccggatncagtctagaacccgcacctcaaagctatcaaaccccaagggtgagagagctggggtatttatgttccagggtgagggagctggggtatttatgttccagggtgagggagctggggtatttatgttccaggggtgagggagctgggatatttatgttccagggtgagggagctggggtatttatgttccagggtgagggagctggcgtatttatgttccagggtgagacagctggggtatttatgttccagggtgagagagctggggtatttatgttccagggtgagggagctggggtatttatgttccagggtgagggagctggggtatttatgttccagggtgagggagcaggggtatttatgttccagcacccaccggtcactggctgagtcttgttcctgtggtggtattcattcccagcacagttggcctgctctgtaggtgagcaaagccagctccgctgctagagaaagccctgaggcaaagaaatgcaagtctttgcagctggaagtcaggctggtgtgccgaaatggtcaaagccagggctgtgggcaggccctcgcagtatctgctacacagcccctgccactagccctcctggcagctctttctacctgtgagttcagtaagagctccccctcacttagccctgggggtctgtatgtgttgggggtggttatgacattatctcttagggcttccctgtccccctcacttctctcttcttctttattcatcaaattactcaatctgaaaatgct

SEQ ID NO: 266973 - DNA, 572 bp, Homo Sapiens
  misc_feature (409)..(409): n is a, c, g, or t
  misc_feature (455)..(455): n is a, c, g, or t
  misc_feature (490)..(490): n is a, c, g, or t
  misc_feature (530)..(530): n is a, c, g, or t
  misc_feature (545)..(545): n is a, c, g, or t
gaagggcagagaatctatcaactagggaagacgtctttacaaatacagcatttaatacattcttcttgactaacagttctaagccaagtcactgagcatgttcaaatggggcactagtttaattgctttagtttcaaaattgccattttctatttccagttttcttgggttttctgcagtgccactcactatccttttcatctgaactcagagatgcaaaaaatgtgagccaaactgggtctatcccaactgactactgaaaaccaccccctctccttgctctcttgtgagcagagcttccattgttctgagacaatatgacatttcctccaaacaggtagttagttaaataaaccatgcaaatactgggaaacgatgtttattttaagtttttcaaagtaccaggggnaaaaaaagacgagagattttccacttaagaaagtctatttagtccngttcctattttcaaaaatgtttcattcctgtaatntttgggagtttgatacctaaagggattttcatgaggctgnggccgggtgcctttncggtttttctcattgcttggtgtgtta

SEQ ID NO: 266974 - DNA, 658 bp, Homo Sapiens
aattaggaaatcagaaggaagaataaggaaggaaaagcagaccaattaaagagtaatggcaggtacctggtgtgccaggacaagccaagagaaggcaagttctagatggatgacagcaaggtgtgaaatggagcattggaggcctaccagggtgagttctcatgtgaaaagcaagagttctacttgtatcattatttgctgaggctccagtattccctccctctttaacacgtacttggctgctgagattggaggtaagaatgagaagagaggagctatttaagtttgtctctccacaaaggaaacgtttggatgggtgggcatcgtgggcaccctcaccatggccaggaatgttagggggtgttctgcaagctctttcacacacacccacactcctgcagcaatctaatacggtgctgcaatcaaggggacactgctcaggggcggaacatgtgtgatttctcttcccaacttgcaagactctaccaagagacttccaccattcatgctggtctctagctgtatctctgtgagcattcacatctcctgctctgctgagttcttccatttgcttcttcagacccatttttcatcctttcccacaggtgctgaccttcactatctaccagaaaaaaattgaaggagtgatgtggtttgg

SEQ ID NO: 266975 - DNA, 733 bp, Homo Sapiens
  misc_feature (402)..(402): n is a, c, g, or t
gtcaaaaatcgtcaccttcccaactcttacatatgtaggacagtgacatgactcctgcccacagaagaacacacctgtcctgccctctcccaacaatggaatgttacaaagcaggacacgcctgagttaaaatgagtatccctgaggttgataattcccaccatgcaccttgaagatggttcttgaatctttcattcagcccgatgaagagaagattcattgtagccagtgtcacattaggtgagaaaaattcagaaggcaacagatttgcgctgctgcaccagcgaaccccaaaccagcccgtgagtgccatagctactgcccagcacttgagaaaaggtgaagccgttggatactctgggaaacccgaaaaaagcacccttctactgcaaagcgtgaagnaacatgatgcccacagaaaacacaacagaaacaagaagtgagactcttgaaggtaatttccagaatagtacagcatactggaggcttcaaatgagaaaacgtttccaaaaacttcatgtttgctccaaattttgaaccagaacccccaccacaattgtgaggagccctttggtaaacttacagaggtcaagtcttaaagatggtgggtctgtgggaatgttcatgccataattcttcttctctgtagatttgaggctgctgagctggggtgggagggggaagaggaagtgatgtcagtatttaaaaattgtgctcagtatttaaaaattgt

SEQ ID NO: 266976 - DNA, 728 bp, Homo Sapiens
  misc_feature (303)..(303): n is a, c, g, or t
ctataatttaaatcagtcccattgatggacatctgggtaatttcctaacttttctattacaagcagtgctgtagtgcataacactatacatacgtcatcttatatgatgataagtgtatctgtaggattgctatccagaagtggaattgctaggttaatagtttatgcaattgtaattttttttaagagatgaagtttcactgtgttgcccagacttgagtgcagtggctatttacagatgctattatagctcaccacagccttgaactccctgggcctcaagtaagtcctcctggtcttagncctctcaaggtacccagggattacaggtgtgtgccagcacacccaagcttgtaattgtgattttgaaagacattacttaattgctggtgtaccaatttgcactaccgccagcaatgaataagagtgcctgtttcaccataaccttgctgggaacagtaaattatcaaatttttggagttttgctaatctgatgagtgaaaaattgtttttgcttcttttgtgtgagggtaaacatcttttcatatgttgaatgttcgtttgtatttctttttctgtgaattttctgatcatattctgtgtccatttttatacatttgtccaaattgatctttttattttatgtgcctgtataagcacatatacatacacatacctatgcatatttttttctatatcattctatatagggagatttggtcttttat

SEQ ID NO: 266977 - DNA, 494 bp, Homo Sapiens
  misc_feature (19)..(19): n is a, c, g, or t
  misc_feature (33)..(33): n is a, c, g, or t
  misc_feature (67)..(67): n is a, c, g, or t
  misc_feature (72)..(72): n is a, c, g, or t
  misc_feature (231)..(231): n is a, c, g, or t
cccttcacccccccaaaancaaaaaacccctanggtggcctcggggaaaggggaaactgggtcctcnaagtnaacttccccaaacacaacaaactggacccccggtccctccctggtaactgaacagtggtggaaaagttttgtttttgaagaaggtccctccctcccaaagagaggagaaaactgccctcagcctccaaaggaaccccatttccccttacagactgaatncaacaaagcttcttggtcctgcagccctaaattcctagatgtaaatactttttcaaaatggaaaaatttaaaagctgtctggactcaaaagtaaatgacctgaaaagttctttcttagtatttaaaatgctggatgtcttggttactaagagacatgatgatgaccaacatgtctcttagtaaccaagacagggcaccaagtttaaaataggtgggaataaacaaacaaaatgaaaggagattaactcagaaaaactgttcag

SEQ ID NO: 266978 - DNA, 237 bp, Homo Sapiens
aaggaaggaagcagcttacctgtggtcaagatgactaaaatcttgtaaattcaattccctggtgtcttgggtaagataaattgtatccacatcctatttgaaatataattcagtcatgtcatcagtccatgcagatgaccaggaaagcaagagagacagtgagaattagacaatgacaatggcaggtttttatgtaatctgagaagtgaagattttaagtgaaaaataaatgaaggg

SEQ ID NO: 266979 - DNA, 707 bp, Homo Sapiens
taaccatggcagcatagaagtctctgactggaccaaatggactggtgataaagcctaaggtccagctctgtgatcttgataaatggttcaacccctcatgacctccgtcccttatctaaaatgcaggttagactcagtgattggtaaaggctctcatagttcctttttctctgactctgtacccagactcagggagcaaaactgtcatttgccttggtaggctttttgatatctcctgaaaaagcagcttcgggaggggatttagcttctgctaattcttcttcacaaagacacgtgaccatttctgaatgtctggctttaaaaagtgtaacaggtggttggactctgcagagacctcgggttagtctggcactgccccttaccacctatatgaccctgggggaattattcacctctctgctcccaagttttgtatattaagggtaaaaacagcacctaccctgtggattagaaatgatttccttttcttaaaaagtgtatcaggtacaatttctgctcacagtctagccttcttcttatggagtctcctaatatctcccctccatatccactgcccaactgccagtaccttcctggtggcctggccccttgagaccatgctctcttctgtgtatcaatgggtgccccctggataatatgctatgttaattattagtaatatattatagagtatattataggtgtgt

SEQ ID NO: 266980 - DNA, 931 bp, Homo Sapiens
  misc_feature (290)..(310): n is a, c, g, or t
  misc_feature (427)..(435): n is a, c, g, or t
  misc_feature (453)..(507): n is a, c, g, or t
caccttcccttatttcccctgccatttagtcaggggcaccctccactccacctgtgtatggtttgtatttactttaggttgtctttaagttctaaactcctcaaggcacaatttgattttgttctcttgatactgtgcctaatacctttgtatttcataaataataaaatatacatatttcttattttttatatacaataattttgtgaggatgtatttaataatgctaattaacaaaggcaaatactgtacctaaaacaaaatgcagggttatcaattgtccgtttggnnnnnnnnnnnnnnnnnnnnngagagtgaaagtttattacaaatgaaagatttgacaaattattaaaaaagctgacaacccacataaacatcgcaaaatctagatgattaatattatttattgtttaactcttgaccnnnnnnnnngagacaagatctcactcnnnnnnnnnnnnnnnnnnnnnnnnnnnnnnnnnnnnnnnnnnnnnnnnnnnnnnnttgggctcaagcaatcctcccacttcagcctccccaatagctgggaccactgacaaacgccaccatgtctggcctttttactttttgtagagatggggtttcaccatgtatagctgtcctttttatgtgtttgtgcaactatattagaaaatccagaataatggaatcataaaaatagcccacgttcagatatgctttataataatctgattaggataaatattatgtttatcaacacaattgtttatttgttaagaatgaaacactgtgctaaggctctgcagaaacatataacatgataaataccttgtattggggagacaaatgaagcgaatacaagtgagtctgaaaaacatggtactgtggaaacaatggtaagtaaacataccaggcaaactgtgtgggaataaaagtatctaatttt

SEQ ID NO: 266981 - DNA, 715 bp, Homo Sapiens
  misc_feature (282)..(282): n is a, c, g, or t
  misc_feature (316)..(316): n is a, c, g, or t
  misc_feature (351)..(351): n is a, c, g, or t
  misc_feature (364)..(364): n is a, c, g, or t
gaggtgctgaaaggtgttaagtaatattcccaaggacactcaactaggaaatatgagaaccaggttctgaatgcagacaatttgattccaaaactgcattcaactgcaaagctgtctcgtgaactgcacttagcagataagtggtggtactcaagccagaagtcaggtctgatctttcggttccatcattccatactgcctgttcctctgtcttctcaatgaataatgattgtcaagccactctaagtttttttaggatatgtatttggctcattttggaanattacaggaaaattacaaaggaaaaatctataantctaggccatctaggaaataactatggcttatganttttaatactttncttaatttttttctattattaagaaaaccaagattattctacatatacttttattttcttttttccccactcaacctgctgtatattgagcctgttttaacctctttaatatttgtacacaccatttttaacagttgtataatgttctatttaacgggtatattatttatttaactggccctctattattggacatatgtagtatttctggttttgccatcataaatattgctgaagtaaatatctttgaaccaaatttgtttgcatttctgattgttacctcaggatagatttctagtaggattaatgagccaaagaatattaatattaaaaagaatattactggccagg

SEQ ID NO: 266982 - DNA, 758 bp, Homo Sapiens
gcaactttgtgtaaagcagcttctcccacagagctttccctgcattgttagtgatgtcgggcaaagcatcactctttaacctggggcattggccccaagggatatcatgggaccgcagccgctccgtgcactgtctctgcccccagaggaagccctgtccatggttcctggtgcacggccacaggctggccttgaggccaccacatctggtgtctagaacagctgcgggccccacttgggcagaaggaagaggtgctagctgctgcccctgcctgctgtgaacacctgcccagcccttccttgtctgctgaggtgctcagaccagagtgccattaaataccaactgatgtcacggagcggacggtgcattgccaaggactcacagctgtgggctcccttccagctcctcccactttcttggctgggtcttctgaggcctacgtggaatgaactacacatgtggcctcatgcccaagggtttgttagatggcctctgactctgtgggattcaacttgacttttttgccccaggaggctctgtctggaaacaggcttagctttagtgctggggtgggacctgccctgtgggccccagggaggggacagtgggggtgaggccctgaggctgtccagggtctgagctctttgcctccaacctgcttctgccccaaaaggaacaggctgttggtggcaggctcctcccggggagctgtactgtacagaccaaggtgtaaataaacagtttgctcttctatata

SEQ ID NO: 266983 - DNA, 608 bp, Homo Sapiens
cagccccttatcaagtggcacagagcaactatggcagagggcctacagagattaagtttgtgccccatagatatacactaaaacattttggagaaatggaaaaatatggattgatactttccattgcaacagaattcttttaaaagacaaaagaaccttagatatcctcaccaaatttcaggatgaagaacacagatattggaaattcttgctctaatcttacctaagggtgtattagtcagtgctgttttagttgcaaaaactaaaaactcaactcaaattagtcatggaagaaaggaatttattggctgagcagcggagaaagttaaaatcctgaaggtgaaatttggggctccccaagatgtctgggcctcctcactccccctcttcccagctccacccctgatcactggcatcatttccctggcccaggcccttctctagccttcagtgtggcaagagagcagtttcatttccggctatctcagagcactgcattcaacagaaaacaaagcaagccctttccttggagtttacaaatgactcaggattcactctgatttgaccaagagtcagaaccctaagtggccaagcctgaagtcacttgt

SEQ ID NO: 266984 - DNA, 780 bp, Homo Sapiens
  misc_feature (749)..(749): n is a, c, g, or t
aattcggcacgagcaaactcctgaccttgtgatccacccaatcttcattgcatcatttaactttcattggtatcacagtaattcactaacattcattccttacaggcagttatgaataattgaaaaatttttaacatcatctcatgggcaaaagaatatttattcattggcttagcttaacaaatcattattaaacacctattgtgtgccaggcactgttctagacactggagttacagcagtgaacaaaataaacacgctctccagtctgggtgggagttcacatactgggtgcgggggagagagatggcattacaaacaaaaatggcatattttaatactttcaccaactgataggtgctatgaagaaaaataaaccatagtaaggatggcatagagtgctggatggaggttttagtacatatacgttagccagagaaggcatctctgagaagttgccatttgagaaaaagagggagtaggctcagtggattctgagggaagaataagtttgagattctgagtcattcatgtccttggcagatcaataaagaggaagcagatgctgtggcccggaactcagtgtgcatgttggggcagtggtaggaggctatggttgtaagacagggctacctcccatagggtcttgaagaccatagtaaagactgtggcatctcctctccaggagtttgagcagaggaatggtagcattctacttaggatttaaaaggtttgctctagctgatttntggagaataggtttgtaaggcagcattagtc

SEQ ID NO: 266985 - DNA, 371 bp, Homo Sapiens
aaactcctgaccttgtgatccacccaatcttcattgcatcatttaactttcattggtatcacagtaattcactaacattcattccttacaggcagttatgaataattgaaaaatttttaacatcatctcatgggcaaaagaatatttattcattgggcttagcttaacaaatcattattaaacaccctattgtgtgcccgggcactgttctaggacactgggagttacaggcagtggaacaaaataaacacgctctccagtctgggtgggagtttcacatactgggtgcgggggagaggaggtggcataccaaaccaaaaatggcatattttaatactttcacccactggtagggggtgctattggagggg

SEQ ID NO: 266986 - DNA, 650 bp, Homo Sapiens
  misc_feature (19)..(19): n is a, c, g, or t
  misc_feature (36)..(36): n is a, c, g, or t
  misc_feature (385)..(385): n is a, c, g, or t
  misc_feature (392)..(392): n is a, c, g, or t
  misc_feature (509)..(509): n is a, c, g, or t
  misc_feature (552)..(552): n is a, c, g, or t
  misc_feature (588)..(588): n is a, c, g, or t
  misc_feature (615)..(615): n is a, c, g, or t
atttgcaacgtgcccttgnaacaccaaatttgatcngttttttaaaaaatgatcgttatgtaggtgattgagaagtaaatgtattcttttttaaggtaaaaatttggacccttatcatgcatacccccctctgtgctcttcaaatcaacatcattattaatatctgtacatttttgctcatctgagccagcacaggctgaggctgtcagaatggacaccttttggttgttgggtttctgtcagtttctggggtgaagctgcgtgattgagaacgtagctcttgggctgccatctcggggattattaaggactgtgaactctatccacaagccatggcaatatctgtcccaccgaatgctccctctaaacacactcttactcccgngatgtgngttaagggctccgatgatgctgaaaacagcacaggatgtgaaaaggcaggaacagttctgaagtcaaaggctgatgtcctgtttctctttccctctgtgaccgactcccttcccagnggtaacaagtacccacagcttggtttgaatttctgcacgctgntgtctgtgcactcgctcacacttacgcacacagcangcatgtgggcgatgctgggtattttgngtatgagtgggatgcacatacacacatctacatcc

SEQ ID NO: 266987 - DNA, 664 bp, Homo Sapiens
attatgctgagaatattttctgagttgtcacatgggtcttgtgataaactaataatgcaaacttttatttttcattatatataaatattggatttatcccaaccaaactagtttgcagggaacctctgcctttatttcacggctggagaatgagatacaaaagatgtcaattttccatcgtaagaactttccacagtagtgttctttgggacattctctcccttgtattaggctcctcaggaaatcttatctccagactggaaaccagcacattctgatgagatcatagcttagtactcagaaaaatcactactcagtggaattcttgaaattttgaaacaactgattttagcatacagaatttcaaaaagaacatacattacagccagaaacgattgtttgctcatgaattttgattattggcagacacatttgctgtagcggcaactgtgcaagagttcattttaacagaataatatgttctgaaatactcttttataatcaatataaaattctagaatgttaattcctatagcaagaacttgtgacattataaaatgtggtttaccatagaaagtcgctagatttcccatgttttcttaaaattaaatgtactaaaaaatccaaatgtaatagaaaaatgcaatcacataggtgctttaaa

SEQ ID NO: 266988 - DNA, 786 bp, Homo Sapiens
  misc_feature (544)..(664): n is a, c, g, or t
  misc_feature (758)..(758): n is a, c, g, or t
caagccaaagggatttgctgccatgctgtgacatggaaggcagggtgcactcagcactgtattgatgacgttcttaagtctgaaggacttaatgcagtttctggatgtgcctcctcatcaccacacctgttcaagggggaaactgggacccaccccaagagtcagctctatagaagtttttcctgacaatactctctactcctggaggtagactgtgtttttctcctgtactctcctctaacacagaacttgcttgttactatatgcaacttgtttatctgccccctgggactgtgaacccttgaggacaggggatattgtcttatcactctttgaattctcagtgctgggtacatattacgtgttcaatacatgtttgttaaataaatgaaacagtcacgtttggctcctttcttccacaaggcattctacccttccacggaaacaattatagcagcatggaaacaattacagcagctatctataattgataatcagaactaatgaaatatggtagcacaggcatgaatagagttgaaattannnnnnnnnnnnnnnnnnnnnnnnnnnnnnnnnnnnnnnnnnnnnnnnnnnnnnnnnnnnnnnnnnnnnnnnnnnnnnnnnnnnnnnnnnnnnnnnnnnnnnnnnnnnnnnnnnnnnnnnngttcattggtgaaacgagtcaatgtagtaaatacgtcaatatcactttttgtccatattaacctaaaatttaatacagttccagcataagctgnaatggtatttttattctatgaaatttga

SEQ ID NO: 266989 - DNA, 334 bp, Homo Sapiens
  misc_feature (280)..(280): n is a, c, g, or t
attcttcactagtctcaggcaatgtttttctgaactttaccgtattttatcaaatttcatagaataaaaataacattacagcttatgctggaactgtattaaattttaggttaatatggacaaaaagtgatattgacgtatttactacattgactcgtttcaccaatgaacatgtttctctatttattcaagtgttcttttatgtgccttagttaagtttggaagagttcttcataaaggtcttgcccaatttctgttaaggtttattcctatgtatttnataatcactctgataatttcaactctattcaggcccggtggctacccataattt

SEQ ID NO: 266990 - DNA, 455 bp, Homo Sapiens
  misc_feature (114)..(226): n is a, c, g, or t
cccctgtgagaaatattgcagaagaaaggaattattttaatagtaattaaattgaagtgctaatatctataaaatttctttcctaaaattaatagtgtttaagttataaattannnnnnnnnnnnnnnnnnnnnnnnnnnnnnnnnnnnnnnnnnnnnnnnnnnnnnnnnnnnnnnnnnnnnnnnnnnnnnnnnnnnnnnnnnnnnnnnnnnnnnnnnnnnnnnnntgcaagttataaatttaaataagacaaatttaaccaagttacttataccaacttaaaatgatactttttctcaaaaataactaattcacaagaattattggtttttaaaaagcaaaaagaactgtatccatttaagtaagaatcacagtggtcagtttacttacttctttagactttttcaaaacccaattaggagtttcttgtcatagagatttttttcaaatcattc

SEQ ID NO: 266991 - DNA, 507 bp, Homo Sapiens
  misc_feature (1)..(1): n is a, c, g, or t
natgagccaccgctcctggccgggtttgcctacattttggagatgctgcacaccatgtccctcttttcaagagtcacgtaagtatttacatatggaagaccctgagaaggcacctggggaaaaaacctgtttaactgtaaatataataatgtatgtatttgtatgtgggagctcttcttttagtgggattatctataaaaccgtccacttgttcccaatggcatactttggagacagacctacactaccagttttcacctgctagttatttttataagggttgggatggtccatgagtgaacagtcttgatttaaagcagtgtttcccaaacctcatttatttgcctatagccttcctggagtttgtcttatatgtccgctctgtgcactattcctatatgtttttatgtaaatcaatcacttttttaaaaagcctcatcccagttatatccttaaaacaatggttattttttctcatacacatcgaaatacatatctattagaatt

SEQ ID NO: 266992 - DNA, 660 bp, Homo Sapiens
aaaaaaaatctcattaaatagacctgagtaaacttcaaattttgatgatctggccatgtcggagctgaagcttaccagctctctaaagcatttgctagggaatcatgcagatggtccaaaatattttttagaaaagcattcatctgtcccgggatagaagtagaggaagctggtaggcaggcgctagaccctaaagaaggactgctgagccagttcttaagcctgtggtcctgtcggtgaggaaagtgagagcagtccagagcaggtgaaaagagcagagctcattcctccagtggctcttttgcctaaagcagcattcctcaaacttctcactcgaagcattaagttacggtgagatgctaacacacgctttagacttaagtcaaaatttactgtgaagccacagcaaaccatggcttcacagatgaattagttgctacacaaataagttcgatacataagtacagtaattgcttttaaaccttataataagcagtaaattagaagttaaaccatgtttttcttttacgaactgaaagaagagaatgcttttgatactgagaatcgcacactgtgtccaggaagattgttcttgcataaccagacccacaataaatatctacaacttttcttacatgtttataaaataaatcttagaag

SEQ ID NO: 266993 - DNA, 853 bp, Homo Sapiens
aaataaattaagattcctatttaaagctgcagcaggtgtggaaactcctgggaggggaggcagaagataaactttaacacagtccccacaggagaagcagttagccctaaaggagacatttagccccaagagacatacccagagctgtcctgtgactaagtgttcaggttggcagtcaatagcaggagatgctttggcagaaagagcaatttgggggtggagttttttgttgttgttgttgtttctctctgctcccaaaccccatccctgcccctttcaagtagggcagtagggggatccatgactatattggaattcaaatcccactctgcccattcactagcttggggtgaccttgggcaagctacttaaattctcaaaacctcagtttcctcatctataaaatggggctataatagtacctatttcactaacctttttttatttgaaggaaaaaaatcccacttagcacaatgctgttgggtgctttcaataattgtcctcaacaatctgtagcttatattattgacttgattctgttcattttcaatgtattgcaaattggtgattaatttgccttatagggtcatataagactccacagtttatccattcactgatctatactatagaatagcgctgttggatgctcacttaaggacagcaaaggagatttgtggcttgagactgaaactttatttttttctggtctgctaaaattaagtatgaaaataaactgtgttggaggagtgagtagtcaggaggggtattcataggaggagaagcaaaggagaggagcactgaggctaggaattgtggagaataaggtctccagaagggaatcttagtgctg

SEQ ID NO: 266994 - DNA, 433 bp, Homo Sapiens
  misc_feature (66)..(66): n is a, c, g, or t
  misc_feature (75)..(75): n is a, c, g, or t
ccccccaccaagccacaaagcccgttggggtgcccttccaaaaaaatggccccccaacaaccgtanccctaaaanaaatggacctggaatcctgttcccatttccaaagtaatgccaaaatgggtgaattaaatttgcccctaatagggtccataaaaagactcccacagtttaaccccattccactgatcctatacctataagaaatagcgcctgttggatgcctcacttaaggacagcaaaggagatttgtggcttgagactgaaactttatttttttctggtctgctaaaattaagtatgaaaataaactgtgttggaggagtgagtagtcaggaggggtattcataggaggagaagcaaaggagaggagcactgaggctaggaattgtggagaataaggtctccagaagggaatcttagtgctggctcc

SEQ ID NO: 266995 - DNA, 705 bp, Homo Sapiens
ttaggctaaataatactgtgtccatatatttttaaatcacataaaatctatggtgttttaaatcaggacagtagttacctctggggaatatgaagatagtgtctagacatcacataaagaaatatagaataaaaataacgttttatttcctgacctgtgtggcgattacagaagcatgttcaccttgtagtaatccctgttccacccttagaaaaatcactaacttgacactaaatattgttctaaatttatgaacaggtgggcacactgctgtaatgccagctatttgggagcctaaagtagggagggtcacttgaggcccagggggttcaagggcttcaggtggaaccataatccatggccaccatactccagtctggggtgacagtgtgagatactgtctcctaaaaacataaatacatttatgaacagcttcaacaagcctgctccagagctagccatcagctaggatcagctctccctacaagaatatgctataaagcagaacagagctcctgtcagtttaaatcaactgacatttatcatcctgcttacatttcctttatgtcttcagtcttgtactttcaagtacttctaaattcagatgttctcacatgacttttccttttatgcaagcatactggaagtctgtgtagtcaaataggtgaattgctcatttcaaaattattttgaaactctgtctca

SEQ ID NO: 266996 - DNA, 741 bp, Homo Sapiens
  misc_feature (639)..(639): n is a, c, g, or t
  misc_feature (680)..(680): n is a, c, g, or t
  misc_feature (715)..(715): n is a, c, g, or t
tagagtctgggctttgaaagggctgatgggcttctcagggtggaaagaactctggatatcacgcaggaagtctggcttcagcacatagccacagccgccattctggcggaaatgcccatcacagatgtccatttcaagccctgcagtctgcatattcatggccactgagggccccaggagaaaagaagagcaagattcaccatggaggccttccagcccctctttcagggagttaagaagataggtactgggtgcacggtacctgctggtaatatccactgatagcatttctcagcctagcaattttcttgagcattccccaaccctaccatcactagagaacttatttcccacctgctgctcctccactccctcttcccagtccctgctgcctcctcacccatctggcagcctgcattccagagttcctgggggttgtagttggaagagtctgtcctcaggccgctgggatacacacggcttaactgccaagtattgtgctgcacaaactcattgcctgtaaaagggtatagagagggagatggaagtgggggtgggaatctccccacttccctagtcccaaggaccctgcctactcttcacccttctctccagcatctgaagctggctccagaaagnttcactgtgcctctctactctgtccatccagaccagctttnctgcccctagacccttgagccactattcataactnctctgcccttgtctgctctaaggagt

SEQ ID NO: 266997 - DNA, 735 bp, Homo Sapiens
  misc_feature (605)..(605): n is a, c, g, or t
aatgacgggcgccggctgctggccaagtattatgatgacacattcccctccatgaaggagcagatggttttcgagaaaaatgtcttcaacaagaccagccggactgagagtgagattgcattttttgggggtatgaccatcgtctacaagaacagcattgacctcttcctatacgtggtgggctcatcctacgagaatgagctgatgctcatgtctgttctcacctgcctgtttgagtctctgaaccacatgttaaggaagaacgtggagaagcgctggttgctggagaacatggacggagccttcttggtgctggacgagattgtggatggcggtgtgattctggagagtgacccccagcaagtgatccagaaggtgaattttagggcagatgatggcggcttgactgaacagagtgtggcccaggttcttcagtctgccaaggaacaaattaaatggtcgttattgaaatgaaggctgtggattcaaggctccctgccccccagatcatttccccaatccctggcaaaagcccaaagatcccagggtcaggagagacccctctgtatccccaggtccctcccagaactgactcctaaggtctnccagccagggcttctgagatgcaaaggtttggcctcaggagagtcaccttttctcaacgccctggccttaactcatatcttaagcattcctcgccccagggccctaataaacctgcttttgtcttcttaa

SEQ ID NO: 266998 - DNA, 809 bp, Homo Sapiens
  misc_feature (765)..(765): n is a, c, g, or t
  misc_feature (799)..(799): n is a, c, g, or t
cctagaagagaatacaccccttacttcccacttatcctcctctcaacctaggaaagatcagacatattgactcaacattctaacaggggatgggctggatctgcccgtgaccagaccaatgccccccacccagcaagggagtaaacgctgcctgaagtgggaccagtgatacacagcatctctgtctgccagggctcagcccgcgggggggatttgtgagaggctgagcagctgggtctgcacagacagcaagctgcactttgatttcatttgattcccttacaaaatgacattaaggggaatgtgaggcacaggagactcgcctgtctgggaaggcagcaagctcatctctcctggacctggtgacctacctctgtctaccagacaggtgcagaggacaggagctctggccacaaagaaatggacagtctgaatgcagcacacagccctggggacaggacttttcacccagcctgtcctgaaaagctgctgagtcgagcagatgctcacatcagggtcccaggtccggctgttagggaagtggacatcagttcctggtgggccctgggcagtgactgtggtgagccacagcaccattgctgtctgcctctcaaatcgatcgaacaattaatttggctccacaggctcgagaagatgaaacatgacctgatggccactgctgtccagcatcccagtccatcctagctgtccaggatgatgaacaagctatggaattgcacttgagagctataatcaccgggaaanaattccgaacccctccctgctacataaatcatcnaagaagcaca

SEQ ID NO: 266999 - DNA, 373 bp, Homo Sapiens
  misc_feature (283)..(283): n is a, c, g, or t
ctagaagagaatacaccccttacttcccacttatcctcctctcaacctaggaaagatcagacatattgactcaacattctaacaggggatgggctggatctgcccgtgaccagaccaatgccccccacccagcaagggagtaaacgctgcctgaagtgggaccagtgatacacagcatctctgtctgccagggcttcagccccgggggggatttgtgagaggctgagcagctgggtctgcaaagacaggcaagctgcactttgattttcatttgattcccttnacaaaatgacatttaagggggaatgttgagggcacagggagactcgcctgttctgggggaagggcaggcaagcttcattttttcctgggg

SEQ ID NO: 267000 - DNA, 689 bp, Homo Sapiens
  misc_feature (45)..(45): n is a, c, g, or t
aaactgcctgtaaatctccctcctggagttggcaaggccctgagnaagtgctgtatcgagaatcctgttgaccttgtttaacgaagcacttcctaggctcgtttgcccaggagccccttaacatcccatgaatgagcattctagagggtgaaccctgggaaatgctgacccagcctttctaacactgacatttgaagttctgtgcctttctaaatgtggagcctgtcaccactgtgtgatgatgggtgcctcctggggagttccatggaacccagaacagatgagctaggcaggagagaaccacgcgagagcctactcctgatgccccccagagagggtagcagaaggcagcaaaatctccccatgttgaaagtcacaacatgaaccacttaaagggagtgtaccttgggcccaggcacgtgctgagcccttttacatgttttcctcaccttaaccccttcccaatcaccctttaatgtaggtatttccttattttcacattttcctctatttacttttaatttatattccagcagatgcatttttaaaattcatatcaatatggctgggcgcggtgactcacgcctgtactcccaacactttgggagccaaggcgggcggatcgcttgagctcaggagttagagaccaacctgggcaatatggtgaaatgtcatctctcaaaaaatac

SEQ ID NO: 267001 - DNA, 377 bp, Homo Sapiens
cctgtctctaaaaaaacataataacaatagtaattcagtaacctgaacatatgttcaatatgcttttatgtatttgtgttctactgagcaataaaagttttcagcttgaattaatggcctcataggaagcatatgtcacaaaacttaaaccatcgccaattatataaaacttggcatcttcccctgatccttaacaaggcagatataaacatttttgtggatgttccctagtgtgtatcgataatttcatgaaaagttacttaacattattttcaataaggcctttccatggcaggcagtctagtttaacatttttaatgactaccatgtggaaaactgcctgtgtgtgcttcaccaacggtttttctgtggacttg

SEQ ID NO: 267002 - DNA, 741 bp, Homo Sapiens
  misc_feature (386)..(386): n is a, c, g, or t
tacatacacgtatgtaaaaatcgtaactatacatttcctgtggctgtagataatatatacacattcctacattaaacactcataaaaacactctaaaagaagatctaggagagttaaaactattacttctacagaggatattgggactgaagatggttttcaaaaagcacacaagcaaaatgtagtcatatattacatgagtaattaaaaaactgaaagagtgtgcacagattgatatattttaaggaaaatatagataaaattatattttctatttctttccctcccttgatggaaacagtacatgaaaggttctagaagattacctgccaaaatgatgtattctatctaaatatatctctggtaacaatacacttaagtctttnatgcctcactttcaaaaagagaagaaaattcggttcatgatttctgtaagcaatacaatttcagttcacagctcttatcattttgttttagttatttacaatctttactaggtatagaattatatattgggattttgccatattccaatttagaatatagtatttaggaaagaggaaaatagttttttaaattagaacttaagtcatgattaacatttctgtcagtggctttaataagtcaatacacatttctaaaagaaaaacgaaattgagtacaataaccacattggcttatttccttagtagtttattaattctatcttacatcattaaataaaaacatgctgtgccgaat

SEQ ID NO: 267003 - DNA, 338 bp, Homo Sapiens
aaccgctgtgggttggctttactaggtgatgtgtgattgactgactcacctgctggagtagcaatgcattctcaccttttgctgatggggccttgtttctaaacacgtggatgcgcagagagcaaggctcagcctactgcagccatctctggcagcgcttctacccctccccagcccatagatgggattgtttaaatctcccttgttgacctagtggcaattcttcctctacctaaatagtcgatgtgagtgaaatcattctcttttgataggtggttgctagcagttaacaaccatttatttactttaacaattaataataaactttataaactgtc

SEQ ID NO: 267004 - DNA, 767 bp, Homo Sapiens
  misc_feature (45)..(45): n is a, c, g, or t
ttcagatgaggaaactgggcaaaattaaatatcttgccaaaagcncctacctgagataggaatccttttgtttacaaattcgttaactcagttaaatgcagatttgttgtcataaattatattgtctggttatttctctaagcaattagtgcaaagataaaacaaggagttgcctttgaactgatgattacctcagtcaagggtggcttcattccccaaagaactgcagtataatgtgcattcttaaccaaagcactggtcatttcctgctggaaatatgcttatttggtgttctcttgaggtcatatatgagtgattaggctggccacatagtgttacttccacagacttgtaagaaccagttctgaggagaacaggtgattttctcccaaaagcacttttcctttttttctgaacttctaggccttctctttccagaactggtggaagacaaatgaaacggccaagatggtaaggtgagtagttcctgggaacgcttgtgctctaaccccaagttatgtgggatggacactcgaggggtgatggcattcctcattttacaagttacttgcttggctgcggctgctccaccaagatagcaaacattctcgatcttttgaacttcatgagactgacatttctgagtctgtttgcgaacaggacactagagggctcccaggggttaaaaataagtggaaatttatttgaatgaaaactgattctctacggcatttcttttttccgaatttaaaattaaagtttatttt

SEQ ID NO: 267005 - DNA, 338 bp, Homo Sapiens
cctatactgaggacttacaaatgtatatactcagcgcagacctctcctctgaattctagactcatatatccgaatgtcttcttgacaaattcttttcaatgtctagtaattcaaacttagctaatatgtcccaaaacctgagctttaacccccaacaagatcctccagtttttctcatttcagtaaataattccattcttcccttacagttattgagcccaaaaaccttggagctattcttgactccctaactctctctcctcccccaggccagtatgcgagcaaatcctgttggctttaaaatgtagccaaaatcagccaggagcggtggctcaccc

SEQ ID NO: 267006 - DNA, 611 bp, Homo Sapiens
  misc_feature (64)..(110): n is a, c, g, or t
gagagagggtctctctatgttacccaatctggtcttgagtttctggactcaagcaatcctcctnnnnnnnnnnnnnnnnnnnnnnnnnnnnnnnnnnnnnnnnnnnnnnnttaaataccttcttaataaaactggcttgcgtgttttaatgcagatgcttcacaaatagatggtctttgttagaaatttgcataataatcagagacagagatatacattatagactatattatctttacttttattggtatttacaaataaatgccattgttttaagtcaggtattagaaaattttacctttggaattaaacacgctcgtaagaactacatacacaagtaatgtgatttttttaaagaatattttccctataaaaaaaagattgttaagtcccattatagtgcttataaatgaaataacaggcaaataaattagttagaaaaaaacaccttatgctaatttttcagttaccttaaatgacagccaagggtaaaaattatttgttcatttttctttctattgttagtgatattcaaaatttcttatttattgtgatctttgcatctcaaaactaaacttttcattgtcacaatttctaaaagtctgccaccc

SEQ ID NO: 267007 - DNA, 780 bp, Homo Sapiens
ataaaatgcagataatcccttgagttttctgtcagggaaatgtgagtgctaaaaatacaatagctaaaataaagtttcactctattggtttaatagccaattagatacactaaagatagaattagtaagttggagaataggttagaagaaaatatctaccctgagacagggaaaaacaagaaaatgacatatacagaaaagagcatatgagacacaggaactggtagtaaagtctatgaaaggctgttgtctctcacctagtgttgggcctaaagttgctgcagtcagaaaggcctgcagttaaaaggaaaagttggatgtcaagtgggaaatactgagaagaaaagttctcagaggaagcaatatcctccctaaaaaccaggaactttcgaacaactcaagggtccactttcaggtcaagtgctgaaaggcaatgcagatgacagttgtatggtatgtgattactgcaatcatttggtggagaatgagcatgtgtgaagccctctcacagaattgcttctaatcctaaaatgtatctcactgtgatgaaaaacaatcaaagtacagtttagactaagggatgtgtcctcaagtttagcagactcttaaacacttacttctagttgtagcttgattatttcattttgtttttctttttcttgacttcttagctttgcatttaactctgaaatttccatctcctttttctctattagttctttgtgcttttcttcatttaattcaactgaataaaatgaaataaataaaattcatttgtta

SEQ ID NO: 267008 - DNA, 554 bp, Homo Sapiens
caatatcaaggcagattcagtgtctggtgagggcccacttcttagtttttacaggactgtcttactgctgtgtccttacatggcagaaggggctaggcagtctcttaggtcccttctttaagggcactaatcccattcattagggctccattctcatgacctagtcacttcccaaatttcccacctcctcatggcaataactttggggttagaatttcaacatatgaattttgaagggacacaaatgttcagatcatagcatatatatttaatcccacatctcctgtggactatgtaaggacctatctcttcctaaggagataataatcttggaggggcagaagtcagggcttcttttgtttagcactgtagccccggaggtcaggcttgtgccttaaatgtagcagggacttagtaagtagctgtgattaaataagtgaatgaattgaagagtcagttcatagatgaggtacacattggtcagcctcccagagtggagagtggatttgaagaggccaactagtgacgatcaatccgcttctctgacccatctc

SEQ ID NO: 267009 - DNA, 721 bp, Homo Sapiens
  misc_feature (473)..(520): n is a, c, g, or t
atgcctcgtgcctggcatgcctgctttagaaggcaggggccacaaaacactttgtgactgcctggcatcctagtgttactgggtacaactgacggtttaggtggccccctggccaagaagtgggcccaagactccgactgggccaaccacgcccctctcctggggctctccatgctgggggatggggatggctggagagggtctttctcggctgtggctcttggataagaggcttgggacactcccactgtctcaaccctgtcccattcctgaggttctccagctgctagtccattctgggatctgcccactagcctgccataaatttcctctcctgtgtaagctaaccagattggcttctgcagcttcccactaaacttaatttgttttgaaagaaacaaaaccagagaagagaagggagaatggagtccttagagtgggaaacaaaatatacaactcttacatcagtccannnnnnnnnnnnnnnnnnnnnnnnnnnnnnnnnnnnnnnnnnnnnnnncaccagcctcggggagatggagtagttgatcctgccacctggaaggctgggagaggccagcaaagtgagcactgagccccttctctccccaggcagagttgcagcagaaggtggaagagaatgagcacctgaggctggagctgcagatggtagagaccgagagggtgccggctgtccctgctggaggagaagctggtggac

SEQ ID NO: 267010 - DNA, 627 bp, Homo Sapiens
gcacagaatagagagtaatagctataaagggaagaagggtgatttgtcaaacttcagaatcaactttaaatgtaaaaacaaaaagatcattccaccaactcaggccaccttgttgagtgaagagagaaaacatttacagaacacctggaaagaccttcgggcctggagctgagaaatacgtggaagcctcactagaatgagttctttattggttcggtggacagccaggttactaaggagcactttttgttaaataagtgaccaaaatccccttgggccatctcctaaaatgatctttatcataatagctacagtaaaaagaaagaaggagaggtaattaaatgtgggtggaaatcaggacagtttccctaatgccgtggcttacaattctgagatttctcccaggcatcaggacatgtgcgcgcacaggacttggctctcttaggagatacttcagtttgtatcagatgtggctgtggagggtgctctttaagcattgctaactatgagtgggtccctctcagaaggaaggactgtaagaggtatgaaacttctgagaaaacgagctgtcttctcttaccaagcgcctgcagccgtcaaaatgctgtaggctttagtcgtctgcca

SEQ ID NO: 267011 - DNA, 692 bp, Homo Sapiens
  misc_feature (45)..(136): n is a, c, g, or t
  misc_feature (193)..(238): n is a, c, g, or t
  misc_feature (384)..(399): n is a, c, g, or t
  misc_feature (557)..(557): n is a, c, g, or t
  misc_feature (624)..(624): n is a, c, g, or t
  misc_feature (645)..(645): n is a, c, g, or t
  misc_feature (667)..(667): n is a, c, g, or t
  misc_feature (680)..(680): n is a, c, g, or t
cccaggcatgcaccaccacacctggctaatttttaaaattttttnnnnnnnnnnnnnnnnnnnnnnnnnnnnnnnnnnnnnnnnnnnnnnnnnnnnnnnnnnnnnnnnnnnnnnnnnnnnnnnnnnnnnnnnnnnnatgaaccaccacacctgacttcccccatactttcttattaattaccatactgtatannnnnnnnnnnnnnnnnnnnnnnnnnnnnnnnnnnnnnnnnnnnnnacttgagtgcttaattcatcttcctaaattaatttaaaaactcatctttaagactgtgaattttcttccgaatatacctttggccacagttcagagactttgatgtgttactcttttggcattggttctaaaatgtcaatcattcnnnnnnnnnnnnnnnngagatggagtcttcttgttgcccagggctgggagtacagtggtgcgatcttgggctcactgcagcctacgcctcctggggttcaagttcccctccctcagcctcccgagtaggctggggattacagggcacacaccaccatgcctggggctgattttncgttatttttaggtaggaggatgggagtttccaccatgttgggccagggtgggttcttgaacttccnggacctcaggtggatctgccnggccttggggctccctaaagtngggggatacaggnttgagggcacct

SEQ ID NO: 267012 - DNA, 1018 bp, Homo Sapiens
  misc_feature (97)..(97): n is a, c, g, or t
  misc_feature (641)..(726): n is a, c, g, or t
  misc_feature (756)..(875): n is a, c, g, or t
ttgcaaatcttgtttgaattagtaatgtaaatttaatatttttatttaattcatgctgtaccatatccagtgatctctgctaatgattttctttttnctaattctaatgacctgggtaatggatgtatctttggactttaggatgcagctgccctgatgactcccaggagcagcagtagattgggaaagcagaatgaaatcttaagaaaactaagatgacaaaaaaatttatgtctagagttggaagaagtaggcaagatctattcaagatactaacaggtgattttataaagtgaaatctgaagttatgggactatctcaatctatactttacacaggcaagtgacagtgagcctgccctcatgtgtaaatttaagattgggttgcgttctgtaatgctgcagcctcaaagcctttgcacacagactaaaacactagttgaaatattgcataataatagcattggctctgaggtagaaataaagaatgtcatagagatgtatttttgtgtggtaagtatgtgataagatttttttccctaaaggtcagtttctcaatccgaatggtccaggcaggatgaaacagaaaagaacctatcaacctctacaataatattaaaaatctattctgactcccagttnnnnnnnnnnnnnnnnnnnnnnnnnnnnnnnnnnnnnnnnnnnnnnnnnnnnnnnnnnnnnnnnnnnnnnnnnnnnnnnnnnnnnnattaccatttggctgggcgcagtggctcannnnnnnnnnnnnnnnnnnnnnnnnnnnnnnnnnnnnnnnnnnnnnnnnnnnnnnnnnnnnnnnnnnnnnnnnnnnnnnnnnnnnnnnnnnnnnnnnnnnnnnnnnnnnnnnnnnnnnnntgtggtggggcatgcctgtatcccagctactcgggaggttaaggcagagaaattgctttaactcgggagacagaggttgcagtgagtggagattggtgccactgcactccagcctggatgacaaagggagacctgtctcaaaa

SEQ ID NO: 267013 - DNA, 491 bp, Homo Sapiens
  misc_feature (436)..(436): n is a, c, g, or t
cagaattaaattcagtcagccaagctggagaatgtgtgtctacgtttgggtcaagagcatatttgcaaccaatggatacacgccagtacttatactgcctaaagccaaagaatgaatttgcagaaaaagcaggcatcattaagggagtaacagtaattggaaaattggatatagtatggaaaacaaatctaggtgaaaggggaaggttacagaccagccaacttcaaagaatggctccaggttatggagatgttaggttgtctttggaggcaataccagataccgtaaaccttgaagaaccttttcatattacctgtaaaataacaaactgcagtgaaaggactatggatctggttttgggaaatgtgcaataccaattccatccactggtgttggaatttcaggaagacagctgggaaagctgcatccaagttcnttcgctctgtcttgcccttactctgctttcttcagtacagggactgcaaagcatc

SEQ ID NO: 267014 - DNA, 762 bp, Homo Sapiens
  misc_feature (11)..(11): n is a, c, g, or t
  misc_feature (42)..(55): n is a, c, g, or t
  misc_feature (94)..(94): n is a, c, g, or t
  misc_feature (368)..(382): n is a, c, g, or t
  misc_feature (422)..(608): n is a, c, g, or t
ttaagtaaaanctgattttcttaattattgccctttaggttnnnnnnnnnnnnnngtctttggggaatttttaagccatctgccagccaagaancaaatttaagtcccacctagtttagttcctacagaaatgggtaggaataggctaggcatggtgtttcagacctgtaatttcagcattttgggagactgagttgggaggattgcttgtgtaacatttagtacttaaccatatgtaattatgaatgcaagttttttgtcctaggtgcaagattatatttatttgagcgtatcaagtgaacaagtttacatttaaaggcaaaagttacaggtcagcactggcaacatagcgagaccctatatctacnnnnnnnnnnnnnnnttagctgggcgtcgtggctcatgactgtagtcccaaatannnnnnnnnnnnnnnnnnnnnnnnnnnnnnnnnnnnnnnnnnnnnnnnnnnnnnnnnnnnnnnnnnnnnnnnnnnnnnnnnnnnnnnnnnnnnnnnnnnnnnnnnnnnnnnnnnnnnnnnnnnnnnnnnnnnnnnnnnnnnnnnnnnnnnnnnnnnnnnnnnnnnnnnnnnnnnnnnnnnnnnnnnnaaagtacacatttaaaatctaagttccattttcccgtcatgtttattaatttgtcccgttgcaagatatgtttctgttgtctgcatgggtagagataattttaaaagcttggttaagtaaaaactgattttcttaattattgccctttaggtta

SEQ ID NO: 267015 - DNA, 485 bp, Homo Sapiens
  misc_feature (19)..(19): n is a, c, g, or t
  misc_feature (56)..(56): n is a, c, g, or t
ccaaggctaaatttacccntcactaaggggaataaggcttgggccgcttaattaangaaatttattatcttagtaagtggctatgtaataaagaaaaaaaagaaattcaatccaatgacacacaccacatgtatttgggcagagtcagattctctcagctattttgagtctgtggaagaaacaaaaaaaagcttcctcctgaggatgggttattgtcatcaagaagccacctgcatagccgtatccattacctcatggtaattcccggtgctttcccctcatatcccctagaagcaaatatctgttctgaggttttttgggacttctggctgcaataggagcaagggacccaggcagggcagagcaataccttccgaagcttccatattccctggggccagcacatgcaaggtttatatggtcagtagctcacgtgaagtcatctgaatctttcttaaatctgctctcttaaaatctcttatgca

SEQ ID NO: 267016 - DNA, 627 bp, Homo Sapiens
gggtcattatttctggaggctttatggaggaaggggcactgcagacttggctacctggaaagaaaatgcttgaccatgtggtgtacagagtttaggaggttctgagtcattggttggtgctgtgttgagcacatgaattggaaaggaaagaaggcgcagtctcatggaagaaacaagacatttagattcatctgttatttcccatttctaatacaaggagttgagattccttacaaaaagagcatatgtactgtacactcaataattaaataaaaaatctgagaaatcacaagtaatttggagaagaagaaaaagtaatttagaatactggcaaggggctttgaagccatggttactcaaacattagtctgtctaaatttttcttgtggccatagctgtcatgtagccatcttgttagctgaaaatataaattaatttgtgttttctcctcatctaaatttcaagagacaaatcagtggggcttgaatgtaaggaatcaaatctcattgtacttaattttaccataaagcaaagtttttctaacttctagcttattgccagcagtattcaatgcaatgacgttataatgcaatgcatataaaagattttagtactttcaaaagaatt

SEQ ID NO: 267017 - DNA, 648 bp, Homo Sapiens
aaacatttctgcagagacaaggatgaacttattttcctcttaagattggtctactagtctgatcatctgggattgaccatgcaagttttaatttgttttctattacttttatggatttaaaacatttttgtttgaaaatgttagtctttaaagataaagccaaaaatctgtttaaaaatacctgcttacagaatgaccaaaaagtagatgttttcatatttattaagttttcagacacgtcctcaacgaggtgctgctcacttcagggaaagatggccagttcaaactgctgatgaaaagtctgcaaccagcaagacccactgctgccagtgtgtcctgagggagcttgcatctgtttgactttacatatacatacttaggtttgtccatcagttgtatcctcttgaaggaggtatgtgagttcatggttttaagcatataaatttaaacgttaaaagaagaaatcagaagtagcccgtttgagtcttacatgagtgaaatgtgttgggtttcagcagcagaatatatagaaggaaatgaaacaatttttattaaagagcatagtttggaataaagaaagaatatgtgcacctagatgaacgaattagaactctgcctgccctttagggtttggtaatgttaccagat

SEQ ID NO: 267018 - DNA, 1080 bp, Homo Sapiens
agccaggtctgtttgccaccaaggtgtaaagctccattcccaccttaggagggctaggaggcagcatcgtggggccacagaaggcctgggtttgcagtcagaggacaggatgcacattccttcaagatacagacccagattgttgggcatctagttcttgggttttctgttgttgctgttccgttttgtctgtcttccctcctttgtttactagcagcctggaatttgccactttttctaaacgaagatttatggaacacttaccacacggctgacgctgcgcaaggctaaggttctaatacaccgcagctcacttaactctcgcaataccataaacgcacactgtttcatcttgaccctttcttgggaaggtgacagagaggtaggagggcaaacatcttgtgtgccccgtcccaagggtattactggtggaataatatccgccccccaccccagtttctaatttgctgtaggctgtgacgctgtggggcaagactaggagtcctgttgaaattaggaataagtgtgctgtgagggaagggctgccttattttagagcacagattttctgaatatctattttgacaggttcgatcctctccccttcctgccttccttctgtcgattttcaatgtcttgatggtgtcccacctgagtggcctttagagatgtgagttgtgaggcactggggaggcaggcacacgtcctccagcccaagactgcctaatttaacagggatttctgcattctggaacaagcctccattttccccaagcaggattactccagagggcaaaacacagcccaatagtatcacatttcctttctgctttagcaaaaataaccactgtctcattcatgggaaaaggccgccaaacaaatttgttactggaaccatttgtaacaacttctagtttgcactgccttggagcaagcacactttgtagaggagggatttgcagttacttgggcaacaaggtaaccactgatcattacaggaagcttcagaaaccgtgggaccagtgtagaagaatggagtatctgtccaaactaagaataaaaagaatgacacttgtaaaa

SEQ ID NO: 267019 - DNA, 512 bp, Homo Sapiens
acctctccccctccctgccctcccttctgtcgattttcaaatgtccttgaatggtgtcccccacctgagtggccctttagagatgtgaagttgtgagggcactggggagggcagggcacaccgtccctcccagcccccaagactgccctaatttaaccagggatttcctgcattcctggaacaagccctcccattttcccccaagcaggattactcccagagggcaaaacacagccccaatagtatcacatttcctttctgctttagcaaaaataaccactgtctcattcatgggaaaaggccgccaaacaaatttgttactggaaccatttgtaacaacttctagtttgcactgccttggagcaagcacactttgtagaggagggatttgcagttacttgggcaacaaggtaaccactgatcattacaggaagcttcagaaaccgtgggaccagtgtagaagaatggagtatctgtccaaactaagaataaaaagaatgacacttgtaaaa

SEQ ID NO: 267020 - DNA, 547 bp, Homo Sapiens
  misc_feature (224)..(244): n is a, c, g, or t
aacttaaaacaaaatagtaatttatttacaatagcaaagatgtcaaaaataacaggaacaatatataacaaatccaagatttttatgaaaaaggcaaacagtatatacacgaaacaaaagatgaaacaaaatccatagggtaaacttaatttgaccttagctaaacagttacagaatgtggcaaaatggttatgatttatttaagtaaccctgggccaattaannnnnnnnnnnnnnnnnnnnnatctttttcaacccttctcttttaaatgctgaatcttcctctcaactcagttaacctttgaagaatgtaaccatgggaggccacacgagatttaggaagtgcaggctatttacatgtgcgctaaaggcatacttgttgacttggcaggctcacacttttaaaacagcaaatggaaggtaataaactgtctggggtcctatttttctctcactgttcatttctgattttttgtgataatttctttcttatctaccacacaaaatgctgaaccagtcatcttttaggttcctcaagtgctctaaa

SEQ ID NO: 267021 - DNA, 733 bp, Homo Sapiens
  misc_feature (423)..(439): n is a, c, g, or t
gccgtgaaccaccgcgcccggcatattgctgcaagattctcgctcagagtcttctctgccttgtgtgtggtgtggttataaaggtcttcaacatgaccctctgtggcatttagtgttgttccacacaaagagaaagatcctacagcagcccatatgtcctactcttgttgcagacgaggaattattttgtcaagaggttatgaattttccctcatgctttgtcactaactttgaaaaacttactaatctgaggggtttagcaggagctcttcagtctcagcctcccctctcagtatctctctcgttctggcaagtattcagtacaattgggagtcatatctatcacacacgcaaagttagagtaatatttgtttgtttattttatcaaagatctagtttattttcaggtttcttacagaagcnnnnnnnnnnnnnnnnncaaaatgggaaaaggggaacgatgtaaagcaggcaaagatgtatattttccatctctaataatctgaaaacttattttttggaataaaaatacaatgcatgattaaaggatacccacttataagggtagaatttcatacatatttcatagttttaagggttcattaagactttaaaatctctatttggtatcaatttttctcttgccaatctgtgctgtgtgtatgtgtgtgcatgtgtacattggtgggtatttatttgtaaaaatgtataaagtatttcaaaagaaagtgtg

SEQ ID NO: 267022 - DNA, 1270 bp, Homo Sapiens
  misc_feature (101)..(176): n is a, c, g, or t
  misc_feature (722)..(756): n is a, c, g, or t
aaagacacatcaggtgagaattaaaaaacaataaaaaggacacagatgagagaatctgtagataagcacattgaaacaaatataactgtataccttgtatnnnnnnnnnnnnnnnnnnnnnnnnnnnnnnnnnnnnnnnnnnnnnnnnnnnnnnnnnnnnnnnnnnnnnnnnnnnnctgatctcaaactcccaacctcaggtgatcctcccaaagtgctgggattacaggctcaagccaccaagcctggccaaaaaaaatttctaattgcaattctgaacaagttatgggttgtgaaatcaatatagtggactgcttgctactacaggctttatttaaatactaggaaggttggattacacataatgaaagattttttaaaaactgatcacaaagaattgtatatttctcactgcatcttgtggtcagataagtttgagaaactgctctacataggcaaattataggttcaatctatccatctacctctttttctcttctcttttttccatgctatgcaaacaaaaccatggcgagaggaaggaaaattccatcaatgggtggtgttaagccttttctatgaggtagctgtacatttgggacacttctatgttggcgacttgacattctaatagatagatggtccttttcatctctagccacatgtgaaaattacttgggagctttttaagactactagtggcttccacccacctgggaagnnnnnnnnnnnnnnnnnnnnnnnnnnnnnnnnnnngcacttgtgttaaaacctcaccagggctttataatatgacagaatggtttaaagctactgagtagacccaccctatttcccaccattctctttgtttctctttcaccataggcttctttcccatgagaaagtaaagattttagtctctctttccacagtctgaagtaaatcactatctttctcaactggacttcccaaggcaaagatttctttccatttatctatctggagttttacaaagttggcctctggattcccttttcccaaagctaattcaccacaaaggcacccctcaagtcaaggagctggactttcatacacctgcacctgtcaatcatgggtaaataatttgcaggcaaggttgctgggtgctgtgggattgacataaactcccaggtattgccagctctgacctcaggcaagcttgtgactaaatgactccagtagtctgaggacagtccttactcagaagggtctttggaagcaaaagcagacataggcatgagagggtaaa

SEQ ID NO: 267023 - DNA, 747 bp, Homo Sapiens
  misc_feature (29)..(29): n is a, c, g, or t
  misc_feature (95)..(96): n is a, c, g, or t
cgtagccaagggtgctatagccttaaaancctgcagtggtggcaggtgctatgcaatggttaagagcaaagattctggtcaagtagaccctggtnntaaaattttggctctaccatttagctctgtttgaccttgcacatatcacataatcctaatcctcagttttctcattaggatgttgggagattaaatgagaataaatcatacagagcacttggcaaaccctctaggaaaaatgaaacacacaaatggcagatactattgttattgttactgctgttattatgaaagaaaatcgctcaagtatgttataggggtagagcaataaaaatgtgaagtctgtaaaaaaggaaaaaggtgtgcctccagataaatataaggataaaaaccatatgccttagatttgaaaaagcaatggacacaatacaaaataagagactgatgaagctgaaaaagtgaagctgaaaattactttaaaagtatttagtaagaactgccatcctgaatcaatttaatgtcttaatggttgggtcctgtgtaatcacataaatatcttgttatctaatcatagaggcttattaaagcagaagtttatttttccatttctcttcacatcatttttatctttcatgttactttctcattctgtggaatcctcttcaagaaagctaatttttgtttatgcaaaatatgcttgttatggactctatcacatctttactaatcccttactattgttctgtgaat

SEQ ID NO: 267024 - DNA, 538 bp, Homo Sapiens
gcaaattagaaaactagagagaaaggaagtggttccagtctaccatgagcagctcataggctagatgaactgaacatagcttttggtttgttctaaggaaaggatataagaccaaagtgtccataaagttcttatttaaagtaacttttagagtttggggtaagagatctttcaattgaaactactaagaatacttcttaggccaggcaatttgaattgatgagataagataaagctgaaggtcaaagttatgactttgagaagagtcaaggcaatgccatcatcaagggagccaatcttccagtagacaggggctcctggagtgagaactacagacctgctgtttccaggctgcaaattaattgcattggcccagcagacaccatcagtaaacaagcctgccagggaatatctacttgatcctctttcacagagcaaacttccaagggctgcctgggtcccatccttattttgttatcatcttcaagtgagtccaagtgcacagcaatgaaaaaaaatgcatgtgtagactaaaaaa

SEQ ID NO: 267025 - DNA, 667 bp, Homo Sapiens
ccctggtgaaaactgagttagccagttgttcctaagatactcctgatgctgagagtgtgagcaggaggcgctgccccatccgcaagtcagtgtcccccaccccctgcggggtccacagcccaggcatctccggtccagtgtttcccaaacattcgcgtgccgaattgtaaaaagtgcacgttaatgcgagcctgtcggtgtgacatgaatctcagccatgctgggtttgccatcagtcagcacggagagagaaaccttttgtgcctaattaggcacgcagaacagaacacagggtttcgatttatggacttttcaaaacgagaatttcagtgggagactgtggcaaatgacacagtgttgacactgggaattttgactacatgttggtctagaccccagttgaaattaaacagctcttttaataaaagctctttggctttcctcactgttccaaatcccacagcccccttctccttcttcctttttgagcaggatgggattacaggtcggaatgtacggattgtttcattttggggtaatgatggatcagccacagccaagccttacccgtgctgacgaatctccatgtgatcgtgtcctttctccatgtgctgcccacagaaagcagcgagactgctgtctcagctggaaagctgagcctgagaga

SEQ ID NO: 267026 - DNA, 506 bp, Homo Sapiens
cgatgacactcaatgctgcccctcctcgtgcttctggcagccttggcctgagcatccacgggagtttcttctggccatggacactgcatcttcatccactacaagttgtctgatggactgggatggcctgccaacagccagctcctccctggcatctccccatatgctgcagcagttagagcccactcgttccttgggttcctctgtttacagatggggaaatcaaggcctggagagatgacttatccagggtcacgtggcgagacagggacagcaccagaaccagacccgagatgtccacgtcaaagtgacatgctctgagaggcagcacacacagaataaccctgcatccaaattccaggaagctcttaggggtcatccagctgggcctaggggtgcagggtcagtgctgaggcctgggcagggccgctagcctccctgagctttctggcttcaggctgggaggcacagttcagggtggactgtgaccccttggcctagaatgc

SEQ ID NO: 267027 - DNA, 454 bp, Homo Sapiens
actgtgctcagcatcagaaaatgggatgacaatgaacagagtaacaggactatatttctgaaaaaggatgaacttactggaaacaggattgcgtgcctgaaatatacccaaatggatataaatgtcaactcagttctgggctggagatatagatttggaatgcaccaacaatgcagatggtaatccctggcatgcgagtagggctcaagcacctcttactgcctcctcactctggaaccaaatgccttacttgacaggatcacagaatgtgaattttgaacagatctgaaaagttattaagttcaactccacagaggttcctaggagaatgttaacagtccagacctttttcactacatcaaccacggatgattggcatataaaatcctacttaacctttacataactgcaataccaggaaacaaatatgtcaataaaaggaaacatctctcaa

SEQ ID NO: 267028 - DNA, 714 bp, Homo Sapiens
  misc_feature (362)..(362): n is a, c, g, or t
agttcctgaatcgagaaactaaagccagtgctaatctatcagagactgtaacaaaaccacctcttccccagaaaaatactgctcaagtgggggcttcctcacagaccagaaaacccaacaagctggcccccaatcctgcagtgcctgcatttgtgaagaacacttgtccctccagaccgcgtgaacggcagacacacttcttaagacctcggccagaagacagaatggttgctctgaaacccatcgagattgttctgcctccagtctttatgccattttcaagtccccaagggatcagatctcggatgccaactcaacatttgtactgtcgttgggttgcacccaaggcacttgtgccaacnctgccttcccacacactcactatccagaaaagaggaaaagcctaaagatgacacaccttcctccctactcaggcctcctcggcgatggctttgattgtcttgtgttttttataggagccaaagagcagttgattttttttcaaagtctagtatttctctgaagattctacatctctacacaagatattcattcttttggtcacctagggatcttctaagtgtgatattactttcagagaattcagacaagtgagaaacaataatgtaggagtcagcaaagcagaattcagagacttcagccaatcactgctgctctgagaggatccagttagagactcagtatcagcggtca

SEQ ID NO: 267029 - DNA, 587 bp, Homo Sapiens
  misc_feature (27)..(27): n is a, c, g, or t
  misc_feature (33)..(33): n is a, c, g, or t
  misc_feature (385)..(411): n is a, c, g, or t
tgaggtgtaagtcaattcccattaaantcttgnagcttacggctttggcctctgttccccaagacatttgctagggaatatccatagcctcattttagtcttctgatgtcatggccacatatcactacaacaccctttctggttctgtcagccactactgcattcttctcaggaactctgctttgtttttcccagactaccctggaattgtgggacacggtatcctcatcgtaccagtgccccttggcccagtggcttggatgctaccctcagtcatttctgctctaatgcttaggctcatggaggggtgtaggacaaatcaattggaagggaagtgtgctgggctcttctcaaagattgattgctttgggttagatttcctacnnnnnnnnnnnnnnnnnnnnnnnnnnngaaccagacaaactagtcttacaccacctcacattcttgcctactctgtgtttcctgcaagatacactccagcccctaagacccacaccgtactgcttaagatgcaagaccagctttcgaaacagcatcctcacttactcctggccaaaaagctgtagcaaaatcaaatttctttt

SEQ ID NO: 267030 - DNA, 639 bp, Homo Sapiens
  misc_feature (52)..(52): n is a, c, g, or t
  misc_feature (78)..(78): n is a, c, g, or t
  misc_feature (104)..(104): n is a, c, g, or t
tcatcgtaccagtgccccttggcccagtggcttggatgctaccctcagtcanttctgctctaatgcttaggctcatgnaggggtgtaggacaaatcaattggangggaagtgtgctgggctcgtctcgaaagattgattgctgtgggttagatttcctacttttttcagtcttcttttttactttttgaaccagacaaactagtcttacaccacctcacattcttgcctactctgtgtttcctgcaagatacactccagcccctaagacccacaccgtactgcttaagatgcaagaccagctttcgaaacagcatcctcacttactcctggccaaaaagctgtagcaaaatcaaatttcttttaaattaaaactatgttggctttcagacttttgtctctgctattacttaaaaatgcttattttaaaactaaagactgaactaaatcttctctgttctggataaatttgtccttacccccaaagtaatgcataccactagatttataagaggagagccttgaggcaataagaatggataatgggaaagatacaccaaatcttagatctctaaaatgtaccctgaagtaaaagtagggatgaatggcatttattctgtgcctagtgcgtgccgagtgaa

SEQ ID NO: 267031 - DNA, 654 bp, Homo Sapiens
gtacagtgctgcaatcatagctcactgtagccttaaactcctgggctcaagcgatcctcctacctcagcctccagagtagctgggactacaggcgtccaccattgcactcagctaaagtttcagttctttttctttcttctaactccctccattttgaggtgcaatgggcaatgcagcgtgcagaatggaagaggaagtgaagaatgtcatgtgaatactaaagagaattcatgatcagcatctgagaaacacttagttggctatgtttttgaaacatgaaaccaagaattatttcctaatctgaataaagcctaaattctgaaactagcctagagacagctgatttatgagttaagtctctaaaccaacaatgacacacagtaggtgttttttacaagctccctaagaattctgtcactaactgcaggacaaagaacagctaggctaaacatttcagagaagatacagaagatggaaagaaatctaaagaaggcttctttcaattacccttaaattcaaagtgaacacattatgaggtcattaaacacttgagcattactgaatggaattcaggaaaatctaatacagactacctcaaaaatacatgcttgtaggaacactgaccccatttctctggagtctctttcccattt

SEQ ID NO: 267032 - DNA, 408 bp, Homo Sapiens
  misc_feature (343)..(343): n is a, c, g, or t
  misc_feature (348)..(348): n is a, c, g, or t
  misc_feature (355)..(355): n is a, c, g, or t
  misc_feature (373)..(373): n is a, c, g, or t
  misc_feature (388)..(388): n is a, c, g, or t
atttgtaaaaccatgccttagaattggactaaggaagaagctgctgacactccactgccacacagggcactggaagaaagtgctgctgcctccctgccccacctttgccacttctgcagcagtaataggtagaagaatgcccccacccgcaccggaacagcaacaaaaggattctgcatgagatgcctccctaaattgctgaattcaaaaaagaagttgcatacaaaggacatctgattgaaaaagggtatgttatatggccccttttcatagggtgctaggggagttttcctggggttcttacttttcagggtgggtgggggatccaattaaggaccagganttttntccatantgtttgttggaggagggntttccaaatgtttancaggggtttgcccaggccca

SEQ ID NO: 267033 - DNA, 756 bp, Homo Sapiens
  misc_feature (74)..(74): n is a, c, g, or t
  misc_feature (84)..(84): n is a, c, g, or t
gatcttgaattacaatggccctctggggctcctcggatatccccaaattaatccacctaaagggacacccagancaaaaaggancaaaattctcagatgcatgatggtctgcttatttaaggaagacgccaaaaaacagtgaaataattcatacctcactcaaaccactgaggcttttacatcatgccttcagaaacatgtttttaacccagaaaaccccatagcaattccatatcctgctcccagctctctcctgcatccttctctcccagaatgtcctctgccaactgaacctcaatgcccctcaactccctgtaaccttaagattcattgggccctgatctcctacagatgaagccagggtacagcaggcccctgttcccaagctagactgaggaaagagacataatttaaacttcggtcttggtctgatttatatgccgtcacccgtgaaaggaaaggaaaaggaaaatttactgaacaattcagaattgtccctggggtcatactctccctgacttatagcaatgtaaccagctcttggttgaacctggagatgccgccttttggtttaaaaaaaaccaaatggaccaccatttccggggaccttttttctcagcctatccctgaccccttctgaagactgaaagaaataagagagaaactactgggaggcatccctcagttctatccccttttctcttcacagttttgagtagctgaccaaaaccaatcagccatatactcaaaactgta

SEQ ID NO: 267034 - DNA, 747 bp, Homo Sapiens
  misc_feature (401)..(401): n is a, c, g, or t
  misc_feature (736)..(736): n is a, c, g, or t
ctttgagttgactgtgggccaccaaacgggaggtccaggtgatttggtctgatgtctgagcctgtggctcttgagaggagtctgggccggatacttggatatgggagtcagtttataaggttaggtgagactcaaggatgagtgagatcactcagggagaggacagaaaagaaaagaggcaagtacttggctctgaggaacaccaatacctacaggagggcaggtgaagaggtctgaaaaatagagccttctacttcctgacaacaatgacatcctatgatccctcaccttagggcaggtaactctctgcttcgtgctgggaggtccttcagtggagcctggttttcatttgttgatttcagaaaaacgacaaaaaagtcacagctaaagctgaagctttnccggtccccttgaaatgccagctattgatgatgaagtgaggcagtgagaaaataatctgcccccaggtgcaatgtcactttttaaagctgatgtggcaagactaagctggggcaatcacttttcagagggccatttggtaatggcataaaaagtagaattctccttctagggaattattcttaaaaaagtaatcagggatgtacacaaacgtgtatacacaagaatgtttaaaacagcacttttaataataccaaataaaattggaaaaaacctcactgtccaagtgtgggaaactgatttaataagttatggtaggctggagtcagtggctcanctgtgccgaat

SEQ ID NO: 267035 - DNA, 896 bp, Homo Sapiens
  misc_feature (95)..(95): n is a, c, g, or t
  misc_feature (124)..(125): n is a, c, g, or t
  misc_feature (127)..(127): n is a, c, g, or t
  misc_feature (167)..(167): n is a, c, g, or t
  misc_feature (319)..(552): n is a, c, g, or t
acatttgggcaacatctcattctataccatagaatatcatgtaccacagaataccatatatgatagaacaaggtgttctcctgcttttattattntcttcttcctttgtgctattgttttaaanntnattttcatctttaatatgttgatatacagaactacaattntccttctaaggacaactttaggtatattctccctacccaagttttggtgtgcactgggtaactcagtttctaccgtgtaatttttactgtattgcctcttaaccccatgaattttataaaagtattttcctggcttggcgcggcggctcatnnnnnnnnnnnnnnnnnnnnnnnnnnnnnnnnnnnnnnnnnnnnnnnnnnnnnnnnnnnnnnnnnnnnnnnnnnnnnnnnnnnnnnnnnnnnnnnnnnnnnnnnnnnnnnnnnnnnnnnnnnnnnnnnnnnnnnnnnnnnnnnnnnnnnnnnnnnnnnnnnnnnnnnnnnnnnnnnnnnnnnnnnnnnnnnnnnnnnnnnnnnnnnnnnnnnnnnnnnnnnnnnnnnnnnnnnnggtgacagagtgagactccgtctcaaaacaaaaagaaaaagtattttccttcaatttctaaatgtatggaattaaagaagactttattgttgatgtgtaattttaaggcaagagagatcagagaatgtagtccatgtgatgaagattcaggagtttcttcggacttctctgtggcctaaaacatggacaatttttataaatattccatgtattggaaaagaatataaagtatatttactggaaacagaatgctagctttatgaaagataaaaaattgtttgatttttaacaatcattttatgtttgattcatcagtttcattgagaagtgtgtgaaaaaaatct

SEQ ID NO: 267036 - DNA, 1033 bp, Homo Sapiens
  misc_feature (149)..(226): n is a, c, g, or t
ttttcatttatggctgatatatactttatgcacatagcctgaaggtaattttatgatatttgaaatcattttctatataaaacagtttgtgtacattgaaccataagaaagcaaatgtgtttgttaggtgtggaattttccactcatgnnnnnnnnnnnnnnnnnnnnnnnnnnnnnnnnnnnnnnnnnnnnnnnnnnnnnnnnnnnnnnnnnnnnnnnnnnnnnntatctgaatgggaaataaagactatattggaatgagcgccttctatttcttcttcaagtggctgaaggtatcatcctaagtctgacatattctcctgggatattgctttaaatatagaaacgcttggggcaaaagggaatttccctccataattcaactgttaagattctttctttgaacagtaagagactgagttcttgcacttgggtgaagaggccagactgagaggctctaatcctagcaacatcatgccctggtctctgatttcatattcatacagagggatgcagtaaaaaatccctttctctccattcttaaaatcagtggctttcacaatacatcaggtatttggcttaatctctgcatttcagatagaataccagtcatcttagaggctgaaatagggatcaccatgtcctactgaatgctctcaaaagacacctgcagcgtgctgagatccagcagaatctcatcaccattcaagcagactgagacccactcgcctcatatagaagatccctgacctcccggaaggttgaatggtggggcgcctgtgacagtaggagtgggctggctatgcccgtgtgtctacctgtgctctgataagaggcagggacagagcaaggctgaagagagccttgatcagctcctcaattccagtgtccttgaaccatagtccatctgtttgcaccctaggttggtgtccttgtcagtaaggccgagggaaaattcctcttgcctgtgtgacccaaactctacatgtctgactcaactcagaaaaagctggggagaagcccaggggtcctg

SEQ ID NO: 267037 - DNA, 897 bp, Homo Sapiens
aatgactagcatttatcttcttttccttccatgccaaaggttggagtctgctggtgcggtgtttacacaccaggcagggctgtctgccaccttgtgtggtttgaccccctgtggaggggagtgcctggttggatcccacactggcagagatggggccaccccttccttccaggcacatctcacattgccatgtacagaggcaggagtcacgtttggtcaccatggaagcttttattgctcccacatggtcaggtctcaccctgcttgaagcgcagaaggcacagccttactgaccagcacgcccactgactggcatctgccggctttgtgcaggcagccccgacggtttccacagcgagcgccagctccggccagcctgggacagctcatcccagccgactacacctgcttctggtcctgtccacattttgatacgcagatcacttgagcttgtcaattagggttctgccattctgaaataaatgaagtttctaaagcagagtcggcctcagaagccaaaaactgacccagaagatggtgctcaaacctttaagacttcatctccatgtgaagggctcactgtttctaccaaggctgtgcctgtattaaggcttttccgtcctgggaactgtcagtctgggagagctcttgatctgcaggtggcaaaatggcactgaatatccccttggcagcagagaaaacccactgaaagatcgtagagtggcacatgcttacagggcattggtgccaagtccagtggatgagaatccagcccctcacaagctgtgggatggggcttgggagttgcagtgaatgtcattaaaatttcttccaaaacaaaactagaaataattgctgagggcttatagggaagtgatttaaaaagaaaaaacaaac

SEQ ID NO: 267038 - DNA, 750 bp, Homo Sapiens
cagttccacctatactaaaatagcagacgaagcattttctgggcaaaagtaatttgcatgacaaatgtgtccttgaataataactaacagatgatatcaatctattttctgtatcattagtgtattaaacatttactgacaaccagaaactatgctgcttctttttggaataaaaaattgtcactcaattaactctctgggaaagttacttttctaggagactgttactgccttgaagtagatttctctagagtaatttttaaattatctgcagaggggaaactgaaaggaccttcataaaataggcgggggaaaggtataagacctggggccatggtcctgtccttcctttcaaacagcttttatctgttctttatattccctattctatgaggcttaattggaaaaagtgtttcaaaccacaacaacatattcagaaaaccatcactttagatcatagatgctatagaagccaaatgtactgacacacccggcatgccttcagggatcactagccaaagatcttccaaacccagtaggtctgaaaagtcttttccattctcaacaccaagaaagatgccacagctagttagataaactggtttctaattaatcattgtgaactgccaaaccatcagcagagcttaaaaatgatcatttattaggcaacccaagttacaattttctttatcacttctgaaaccctccaatatttttgggactattcaaatcacaaaaaactggattcct

SEQ ID NO: 267039 - DNA, 462 bp, Homo Sapiens
  misc_feature (448)..(448): n is a, c, g, or t
ttggtagtaacaattacaattataatatggctaccatatattgagtatttactatatgccaggcactgtgctaatgctcacaacagccctaagaggcattatctttacacaacagtggaataaactgaagctcagagaagttgacacagcaacatggctaataagtggcaaagctgggatttgaacccagatcgttgttgatgttctccagcacctcaccctgactatactcttgcaggctggtgaaagcaaccagggcacccctactcccaggagtgaaagcagtggctatatttctctttccaatactgtgtgggctctactcggacaggggtggtggctggatttgggcaaatatcccacactccctgacactcactccaagggtgctgtgatggtggaccggggctagagaccccagggctgctggggaaagctcctccctttnaactgggacttttg

SEQ ID NO: 267040 - DNA, 711 bp, Homo Sapiens
aattcggcacgagcctaaatggaaggaattggaactgaaagggaaaggaaatggaaggaaggggaatttggaggagagaacacgcccacccttgggaagctgcctgtccccagaggagccccaccagggagcagctgccccctcatcagagacctgcagagtcaaccaagcacaggttagagtcccaggaccggaaaccaactgtgggctttctgtacttctcatagctttggagtctggctgtccatcaggaggtcccgagggctctctggggcctgaggctcccacaccagctctcccctggcctcaataaaaccaggtgcatgcctgttcttccatccacactccagggctgcccaccagctgacaggcacccatcaactggcagcaacagagcaggcgcaggtacaaagaagggcagctcactccctgctccttaggagatcccaatcagatctgcccctgtacagccatgtaggctgtgcgctgcataactccagggacatgagtcacacagacacaatgtgagtgtgctcccccgtcatgcaacatctggacaccactaacagagcatggtgaatacatgctgaattgcattcagtatggctgtgaactaggcctggggacaagaatgaattttacatggaaagaatttcctgtagcaggaacagaggggataacaacagcaataaataataataagaagaagct

SEQ ID NO: 267041 - DNA, 351 bp, Homo Sapiens
  misc_feature (336)..(336): n is a, c, g, or t
ctaaatggaaggaattggaactgaaagggaaaggaaatggaaggaaggggaatttggaggagagaacacgcccacccttgggaagctgcctgtccccagaggagccccaccagggagcagctgccccctcatcagagacctgcagagtcaaccaagcacaggttagagtcccaggaccggaaaccaactgtgggctttctgtacttctcatagctttgggagtctggctgtccatcaggaggtcccgagggctcttttggggccttgaggcttcccacaccagctcttccctgggcctcaattaaaaccagggtgcatgcctgtttttttccattnccacatttccagggg

SEQ ID NO: 267042 - DNA, 684 bp, Homo Sapiens
  misc_feature (316)..(316): n is a, c, g, or t
ggtcctgtttgtaaaatatgaggtgagtggcagtgagacgctgacaaaacctactcctcccggctgctgtgaaatctacctactgttctgtgaacagataatttttttaaagtaggaagcaagtttaagtctttgcagccccctacttctctttaaattgccaatgtagcaggcaatgagggtaaagcaaaagctagcccagcgaggatgatgtgctacagtatttatttattttggaaggaagggtgtaattaaccctaaataacagcccttgtggcttgcagaggggagcctcctggccctatcaaaggcgggncagaacagggaggggactgaggcctgacatgaagtccacagataccgaaacctatgtgccctgataatgatataattaggggatcagagatttcctgacggctgcggacttcaaaagctttaaaagaagcccagcagtctctccctgtagcccatcttgactaaagcagacatttttgtttaatcactacatacagtaacgagaagggggcagaaacagaagggcattgttccacagtttcaaaataccagtcccctttctggccttttgcatgccacaggaagaaactttatgaacgacagaaatatagttttaatacagtggtacaaaagtccattctccttgcttaaaatgtggctccaatcaaa

SEQ ID NO: 267043 - DNA, 423 bp, Homo Sapiens
  misc_feature (314)..(314): n is a, c, g, or t
  misc_feature (371)..(371): n is a, c, g, or t
  misc_feature (379)..(379): n is a, c, g, or t
  misc_feature (398)..(398): n is a, c, g, or t
atagaccaaataatgtcaacactaacaaacactagtcaacttttctgattcacatgtttgttatggctaaagagttccaggtcagagttccaggtcatgtcaatatagctgagataaagctcacattcactgtaggaactgggttaatagtgggaaacatatcccagatatgcagtgttgttaaaaagaagactgattaaatggtaaagtcctgtaatctgagttctcatggaggttcagatggtgtggatgtggtctgcaactcagttatatttttctgatatcttgttcgtatcatgttgcccaggccgctnctcggactcctggagctcaagcaatctgcctgccttcactctccccaaattctaggntttcaggncatgagccaccacacctgnacccaagttcattcatttttaaacc

SEQ ID NO: 267044 - DNA, 717 bp, Homo Sapiens
  misc_feature (16)..(16): n is a, c, g, or t
  misc_feature (24)..(24): n is a, c, g, or t
ggtaagatgatgaagncagcaaancaaggtcttgagttggtcccagcacgtccattcttcccagacagctcatgactccatggtatgagggatgggggtcatctgggtgaggccttttacctgtttttgtaagagggaaaaaagatccttgcatgatgaggcacagaaaggaagtttggagccagcattatcttgtgatgtgatagctgagagaggacatcactctggtccaaccccccaatctcaccccacaaataagggctcttttttcccccagaggctctgtataagctctccacaagtttcattctcttcctaagcctcagtttccccatctgtgcaatggggaggttggattccatagtctcaaactccaggctctgctcaaatagaggaaaaagggaatgagaagaaatgcaagagcacagagagaacaggagaacccacaccagggtggaaaggaagagaggagggaaacaggcagagaaggaggagagcgcctgcagctgcctgcctgggagagaggagagagcaggtgtgcacagcacaggatgcttccagaccctgctcgggctatgtggggccacttcctgtccacttaacggcctgcagcccctgcagtggtaaagatcaggccctggagacagaaggatgaaggtttgaatctcacctatggcattagttagctggggccctggaaggagattttcagaactt

SEQ ID NO: 267045 - DNA, 682 bp, Homo Sapiens
  misc_feature (50)..(70): n is a, c, g, or t
  misc_feature (84)..(354): n is a, c, g, or t
atggaattgaacatgtttgttagctgtttgagcattttatattggtaaannnnnnnnnnnnnnnnnnnnngtcttacagtcgannnnnnnnnnnnnnnnnnnnnnnnnnnnnnnnnnnnnnnnnnnnnnnnnnnnnnnnnnnnnnnnnnnnnnnnnnnnnnnnnnnnnnnnnnnnnnnnnnnnnnnnnnnnnnnnnnnnnnnnnnnnnnnnnnnnnnnnnnnnnnnnnnnnnnnnnnnnnnnnnnnnnnnnnnnnnnnnnnnnnnnnnnnnnnnnnnnnnnnnnnnnnnnnnnnnnnnnnnnnnnnnnnnnnnnnnnnnnnnnnnnnnnnnnnnnnnnnnnnnnnnnnnnnnnnatcctacctccctgcttctattgcctagcccgtacatttgaggcttccatggagctttctgtggtactgaaacacttggagtgaactgcaaacttggagtgaactacatccaacctttctaaggtggctggggaaaattcttgtacagcaagttgggacaaaatagccatatagaaacagccatataagatcccaatatagaaaaattgggatattagaggaaatacatgatttccatttatggagtgctacatgtttgcaaaatgtatttctgcttttcatcttcttgacatctgaatattaaaagcagttgttgataatttcatat

SEQ ID NO: 267046 - DNA, 749 bp, Homo Sapiens
  misc_feature (194)..(194): n is a, c, g, or t
  misc_feature (431)..(460): n is a, c, g, or t
ttacaaaaattaattgtatttctatgtaataataaacaatcataaatggaaattaagaaaacatttccttcacaatgacggtgaagagaatgaaatacagaagaaatacaagagtttacaactgacaactataaaacatcattgaaaaaaattgaagaagacctaaatgggaaagacatttcatattcatgganttgaaagactcaatattgtcaagatagctattcttttcacattgatctattaaattcaatgcaatcaatctctagcaaaattccaccagaaagactggaaaagagtatctctgttagtttgccccctaactattttggagcccaggggcaacggtacaaatagaaatcccagccacaaactactctcttctcttcctacccccaaccctgtcttacaccagtagcctcatgtgctannnnnnnnnnnnnnnnnnnnnnnnnnnnnnacatcctggcccataggtacaagttccaaccctccctaccctatccccatcacaaacagcttccctcttggccaccccttcaacacagagctgtgcgcacccagtaaaactgtctcctttcaggagaacagacccagagaagttcaagcagttactaggaaaatctctctcagagccatctggaaaattccatagtcctgtttacctgaagcatgctctagaagcactggcttgggctccagatgggcacatctgctaggccccccactcctcagaggagagccaaaag

SEQ ID NO: 267047 - DNA, 726 bp, Homo Sapiens
  misc_feature (252)..(252): n is a, c, g, or t
  misc_feature (265)..(294): n is a, c, g, or t
  misc_feature (465)..(557): n is a, c, g, or t
gggggcctagcagatgtgcccatctggagcccaagccagtgcttctagagcatgcttcaggtaaacaggactatggaattttccagatggctctgagagagattttcctagtaactgcttgaacttctctgggtctgttctcctgaaaggagacagttttactggtgcgcacagctctgtgttgaaggggtggccaagaggaagctgtttgtgatggggatagggtaggaagggttggaacttgtacctatngggccaggatgtnnnnnnnnnnnnnnnnnnnnnnnnnnnnnntagcacatgaggctactggtgtaagacagggttgggggtaggaagagaagagagtagtttgtggctgggatttctatttgtaccgttgcccctgggctccaaaatagttagggggcaaactaacagagatactcttttccagtctttctggtggaattttgctagagattnnnnnnnnnnnnnnnnnnnnnnnnnnnnnnnnnnnnnnnnnnnnnnnnnnnnnnnnnnnnnnnnnnnnnnnnnnnnnnnnnnnnnnnnnnnnnaggtcttcttcaatttttttcaatgatgttttatagttgtcagttgtaaactcttgtatttcttctgtatttcattctcttcaccgtcattgtgaaggaaatgttttcttaatttccatttatgattgtttattattacatagaaatacaattaatttttgtctattga

SEQ ID NO: 267048 - DNA, 755 bp, Homo Sapiens
ctactttttctctgtgccaaagacgacgtgggcggcggcgcaggatcactgcgcagatgccagcgcgcacctggtgatcgttgggggcctggatgagcagggcttcctcactcggaacacgcgtggccgtggttactggctgggcctgagggctgtgcgccatctgggcaaggttcagggctaccagtgggtggacggagtctctctcagcttcagccactggaaccagggagagcccaatgacgcttgggggcgcgagaactgtgtcatgatgctgcacacggggctgtggaacgacgcaccgtgtgacagcgagaaggacggctggatctgtgagaaaaggcacaactgctgaccccgcccagtgccctggagccgcgcccattgcagcatgtcgtatcctgggggctgctcacctccctggctcctggagctgattgccaaagagttttttcttcctcatccaccgctgctgagtctcagaaacacttggcccaacatagccctgtccagcccagtgcctgggctctgggacctccatgccgacctcatcctaactccactcacgcagacccaacctaacctccactagctccaaaatccctgctcctgcgtccccgtgatatgcctccacttctctccctaaccaaggttaggtgactgaggactggagctgtttggttttctcgcattttccaccaaactggaagctgtttttgcagcctgaggaagcatcaataaatatttgagaaatg

SEQ ID NO: 267049 - DNA, 689 bp, Homo Sapiens
caggtgcctagaggggcccaagagatcatcagcaaaggtctgatttcctcactggtatggaagctgcaggcggaggcggaggaggaggagttccaggagttcatcctggacacactggtcctctgcctgcaggaggatgccaccgaggccctgggcagcaatgtggtgcttgtcctgaagcagaagctcctcagcgccaaccagaacatccgcagcaaggccgcccgtgcgctccttaatgtcagcatatctcgagagggcaagaaacaggtgtgtcattttgacgtcatccccatcctggtccatctgctgaaagacccagtggagcatgtggaagtctaacgctgccggttgccctgatgttcgccacagtgatcactgaagggaagtatgcggccctggaggcacaagccatcggcctgctcctggagctgctgcactcccccatgaccatagcgcgcctgaatgccaccaaggcccttaccatgctggcagaagcccccgaaggccgcaaggccctgcagacgcacgtgcccactttccgtgccatggaggtggagacttacgaaaagcctcaagtggccgaagccttacagcgggcagcccggatcgccatcagtgtcatcgagttcaaaccctgagcccttcattcacctctgtgagtgaataaatgtgctaagtctctttaa

SEQ ID NO: 267050 - DNA, 768 bp, Homo Sapiens
  misc_feature (673)..(673): n is a, c, g, or t
  misc_feature (720)..(720): n is a, c, g, or t
  misc_feature (726)..(726): n is a, c, g, or t
  misc_feature (734)..(734): n is a, c, g, or t
  misc_feature (737)..(737): n is a, c, g, or t
ctcaaattgaaaacctttaggttgtgttcttggctcattctctcataacctggatctaagttggaaagctgtggcaccctgtttgggtgtcccatctaccctgttttctgtttctgcagatggcttgttcaagcttcattttaagcctgctctgtctacttatcttccttatatcctaatagacttctcttgtgttattacacatttctcttttgctctaatatttcattattttccagtttgtcagtaccgttatcagagggacaaggaaggaataacacaccagttgaccattttgtttctctgaaaatctgagcaatacggagatccttttattaagtaaaactgaatcattactcatactacaagggctttcacttttaaaatgtaatccatcattgcttgccatttttatgaaaaccaaagttgaaaagtcttctgaatcacaggctatgtatagccacacatgcatgacttcaggctagcataaagacatgtctgctcctgagcctcttcttttaaagggcaaccacttgtataccctctggtggccactcctccttctccactccaaggcagccctggtactttcctaagtggcccctcctacagagcacttgccggcatttggcctgctgctggtgaagacgccccttactagcttcataaatgnttttctgcaagcaggggatcccagacacatactttggtttctagggnttcagntactatgntgnatttggaaattctcattccacaattaccctt

SEQ ID NO: 267051 - DNA, 359 bp, Homo Sapiens
taccccctatcagagtccccaagtagggggataattaaaaatactgctggggcctgcctgggaaaagtgagtgacctcctaatgactgggcaaaaggaacccttttgccaaatgttccccccatttttgcattaagtaaaattgggcagggtggctcatgccctgtaatcccaagcgctttggaaggctggggcaggcagatcagttgagccccaggagttcaagaccagccctgggcaacatgtcaaatcctcatttttacaaacaaaacaaaacaaaattagctggacgcggtggcacgtgcctgtagttccagctacttggagggcactgaagtgtgggaggattgcctgagctta

SEQ ID NO: 267052 - DNA, 500 bp, Homo Sapiens
  misc_feature (305)..(413): n is a, c, g, or t
ggaagaattaattgccgattcttagatcttgagtgttaatcagttctaacactgaccgtcctgagaaaatgcctatggcccaggtgacctgctggttttcctttcacaccttctctttcatgattaccattctttaaagggaagacatacctttcacctaccccttatcagagtgccaagtagggggataattaaaatactgctggggctgctgggaaagtgagtgactctaatgactgggcaaaggaaccttttgcaaatgtttcccatttttgcattcagtaaaattgggcagggtgctcatnnnnnnnnnnnnnnnnnnnnnnnnnnnnnnnnnnnnnnnnnnnnnnnnnnnnnnnnnnnnnnnnnnnnnnnnnnnnnnnnnnnnnnnnnnnnnnnnnnnnnnnnnnnnnaaacaaaattagctggacgcggtggcacgtgcctgtagttccagctacttggagggcactgaagtgtgggaggattgcctgagctta

SEQ ID NO: 267053 - DNA, 479 bp, Homo Sapiens
  misc_feature (12)..(12): n is a, c, g, or t
  misc_feature (27)..(27): n is a, c, g, or t
  misc_feature (32)..(32): n is a, c, g, or t
  misc_feature (50)..(50): n is a, c, g, or t
cccacctagggncagaataaaaatggncctcnggaactagggccttcctncaaatcgtccaagtgccacacaagtcctatttaaaaatgccaaattcctaactcaaatccagataggaagtgggccctgaagattcctgccttttttaaaccagcctccttcagttgaagctgaaatacacaacaccttacgtttcttcattgggaattaatagaatggcggggagaggggcgcagctcggagacagtgccttctataagcctgcgctctgacggagttagagcaatcacagtacccacctctcggggataccgggaaacaaatgagatcgcccatagcaatccctttgcattacggctgtcacttcgaaggggtttggggagaccttaaaaacaataggaaagactaagtttcatttgaaacccattcaatttctccagttaaaactctgcctcatgacaattccaattgaagtacct

SEQ ID NO: 267054 - DNA, 458 bp, Homo Sapiens
agaatttctctttaaattcaacaagattcagttttacagtctggaaaaaaaatgtcctctctatatgaacaatcaatcttcaccattgatatttttcatctttgacttgaagttacaaactaacttcagcaggaatatttatgaattattatggataatctattacacagtgaaaactgtaatatatgtttgcctacatttatataaaaacatccctcatgactaatgaagcctcccctagtacttagctgaacaaattgactcaataaatatgccttatgtcaattataaaaagtgaaaggaacaaatcactaaagaaaacctatatattgttctcctcttaaaagaacaaaatggagtgctctaactaaataaaatgtaacttaatacactacttttggaattacatctaaagattattttgtgtgcactaaatttcataaaaattcttataatcg

SEQ ID NO: 267055 - DNA, 563 bp, Homo Sapiens
  misc_feature (252)..(252): n is a, c, g, or t
aaaagaatttcgtgatatgtgaattgtatctcaataaagctgttattaaagcaagaaaagtccagctgagtttgcctggagttttttataaaacgaatggctaaatgtgaaatatcttagatataatagatagcatctgaaaacactaaataaaatatgattcccaaactgtgttctgagatgcgagatattccatgaaaaacaaaagataacagcaattggatttatttgaaaacttgcataataaaaacntataaattctttcacatgtgataacttgcataaaactgtgccacccagagaatgagaattgcatggaggcaggggcctgttttgttcacccctgcatccttagcacctaataccagccacctggcacaccggtagatgctcaactgtatttaccaaatgaaaacacaatgttctcgctgcagactgaggcagaggcagcattgaccaactaaccattaccttaatgcagattaaaatgtataaacttcagcaaatatttataacatttggttcttttgtttttaataaagtaaaatcatttacttctctct

SEQ ID NO: 267056 - DNA, 959 bp, Homo Sapiens
  misc_feature (61)..(127): n is a, c, g, or t
  misc_feature (295)..(295): n is a, c, g, or t
aaacctatcagctaaataactgttggggctcttctttttttagtaggtgtttctgccttannnnnnnnnnnnnnnnnnnnnnnnnnnnnnnnnnnnnnnnnnnnnnnnnnnnnnnnnnnnnnnnnnntatatgctaacatctgtaggcctttggttttagtgatacaggctttcagtttaaaagttaaaataaacatattcctgtaagaactttagctagaaattcatttgattgctgttttgggaaaatgtttttgtctctttgaggtttaaatgtttttaattgcaaagcatnctgatttgtgtcttcttttacaaaacatgctattatatatttaaaagtaactttgtataatgaaatgctccctgtaagctggaaaatgtatctaaaataatagatattccattgtaggttttgtaccctggaacagaacttctcaaccctcagcactattgacatactttaaataattctatgttatgcacggctgtcctgtgcattgtaggatttgtaacagcatccctggcctctatccactggatgccagtagctcacatatcaccacctcctctgcagtttggtcatcaaaaatatatggcagatatggccatatggtcccccgggggaaaaattcccccagttgaatacccaactgtcctaaagcaacagaagtattttttaatcagctggtcagtagtttctaccttaaatttctttctgtaattgggctagaatagaatatttttcttatggtttctttgtagagatttgtaaaactgtacaacataataaagaacttcacatgtaactaacactaaagttcctaatttggtcagttttttcttttcttcctaatactgttttttatcctagtttttaattcctgttatgtgatacaatctatgatctgaaacgtgtgactatataatgtattgagattaaagaatgaaaattttaa

SEQ ID NO: 267057 - DNA, 752 bp, Homo Sapiens
  misc_feature (255)..(266): n is a, c, g, or t
  misc_feature (605)..(694): n is a, c, g, or t
  misc_feature (718)..(718): n is a, c, g, or t
ctaggaattggcctgaaggcccacagttactcagcaatattagagacagctatgcaaagggagaagccaggcgttttaagattcacgggagacagtttgtaggaaggctgtttgctgaataagacaaagatacagacatgcaaagtaaaggatgtgggcctatagggaaggtcaaagaataaggaaagttcacttgagtgagcagaaatggaagagggatttaagcaaatagatgaacaagaattgtctctcctnnnnnnnnnnnncctacacaattatttgatgatttattatgacttttggggtagagaccacgctagtcacaggatctgcaagccctgccacctggatgatctggctccagctggctcactgcctcttctcaccagtctctggatcatgtgactgtaccggctcctagtctttgcatatgctgcttccttggcttgggatcatcacttctatcagctcttctatcccttctatgcgctcttcgttttaaaaatctcatgtgtccttgtactcttccttcataacgcttattacagttgataattttttagtgcttatttgattaatgtcctccagagatcaggaccagtagnnnnnnnnnnnnnnnnnnnnnnnnnnnnnnnnnnnnnnnnnnnnnnnnnnnnnnnnnnnnnnnnnnnnnnnnnnnnnnnnnnnnnnnnnnctacatgctttggtctttactagntggtctcaaggaccaaaaacctacaggaggaaga

SEQ ID NO: 267058 - DNA, 407 bp, Homo Sapiens
  misc_feature (284)..(284): n is a, c, g, or t
ctcaaagctctcatatttcctgctaatctcttagtccaacaaacatcttcctcctgtaggtttttggtccttgagacaaactagtaaagaccaaagcatgtagttcactgattcattcaacaaatgtttatttagtgtttactatgtgccaagcaccctgccaaccactgagattgcaagagagagcaaaacactactggtcctgatctctggaggacattaatcaaataagcactaaaaaattatcaactgtaataagcgttatgaaggaagagtacaaggancacatgaggatttttaaaacgaagagcgcatagaagggatagaagagctgatagaagtgatgatcccaagccaaggaagcagcatatgcaaagactaggagccggtacagtcacatgatccag

SEQ ID NO: 267059 - DNA, 497 bp, Homo Sapiens
tcttgtaaatagctttctggaatatattgttaaacttgagatagttattccaacatccaagaaggatgtagtgatgtgtgcatgtgaaacaactgctgatttgcaggtcccctcccccatgccgagttacctagcttgtaacttggcgcagagcctttgagggacagcagcctcacctgcaagcagaggctttgctcagggtgctcgacctctaggctgcctcgttacatcctcagtttaattcctggcccacagttgtcccagccaaaccacatgcatgtttctagactccaggtgacaggcccttagcctgaggactctacaacatgcagccaggtagttatgcagaaggccacagtctgccccaggatgcaagactcaaaagccaccttctattgctgcttttcaaatgatttcagacatcagccttccaggatctaaaatgcattacttcttttctccttaaattcatcttctggccaggcacagcagctcat

SEQ ID NO: 267060 - DNA, 512 bp, Homo Sapiens
gcaaggggctcatcctgggactctggaagctgcttccctactgggagaaatgtgtgtcggagctgcaggggtccctaccctcagagacccccgactgcagggaacccaccccataagagggtcacggatgtccatgtccgcccaccccccgtggcttctgctgtggctatattggcctagaggggctgactggggaggagcagggctaagccctcagcatttgctcctgtccctgccttttcacccctgctgcctgaagtggtagccccgcctgctgcttctctacctcccctccccacctcttctctcccctacagggcccttgctgcgtgatggggtctccatgcactttatttatttgcagtctgttttctaggcggtggagcttctagacaccgaccggaatgacatacgtttctgtgtgtgattcactgtgtactggtcagcacaggctggccagagagatgttcttgtttctggtgttgtcacgtcttcttgttttctctaagttt

SEQ ID NO: 267061 - DNA, 594 bp, Homo Sapiens
  misc_feature (25)..(25): n is a, c, g, or t
ctagcacctaaactggtacctaagnaaaacttgacacatacagaaaaaaccctgcattagtaactctatgaaggaaaatatgtatacagtttactcaaagttatcatgaattaggcatctaaacattaatcttaatattctagaaaagagattatcacatgatttgttaacagaaagctcttcttttgaaaacacacatggaacccgaacataaaagacaattaaagcataagtaggtcccatggagtcaatgcttagccgccttatccctcaaacctttatctcattgcacatgcacgagacatctttagaaaagccactgacttaggccactggtttctaaacttggctgtgctaaaatcagaatcagtaccattagctttttagtaatagattcacaggctgcctaacacaacaaagtaaattagaatctctcgggatacaatctaccattctgtattatttaaaatgtccccagtgggcaggtgcagtggctcacgtctgtaatcccagcactttgaggcgggcagatcgcttgaggtcaggagttcgagactagtatgaccaacatggcaaaaccccatctctactaaa

SEQ ID NO: 267062 - DNA, 382 bp, Homo Sapiens
cccgccccccccatgtcagtaaagcaatgttctcaaaggatgttcccgtcagcaacacttaggaacttgggagcaatgcacatgctggaggtggagcctagtggtgctttaataagccctccagtgatcctgatgtcacaagtttgggaactactgaattagagactgaaggcaaagaacagggcgaggccacttggtacatcatggtctagtctgggtgaccaggactgtgagactgccctgaaccgagatgggcatccagtgagctggctggagaagtggagtgaggcaggggaaggtgatgggtttgattccagatgtattgaacttgatgacttcaatttcaaatgtttgtcaaataattttctatccatatattcag

SEQ ID NO: 267063 - DNA, 975 bp, Homo Sapiens
  misc_feature (864)..(924): n is a, c, g, or t
tagaggtgggttaggggctaattaacattccccagcccagagccttccccttaattttttttacatcttgatagaatgatttcaatttgttctgtaaatcacactggactcccctgtaatgattacagaaagaaaaatgttttttatatggatatatgggtataccccaatttgaaggcataaaggcacaatagcggactctaaagtaggaatgaggaaagctggaaaggagggggctatgctgatatagaccatcaagaaaagcttgaagagatgtcccaaataccctgatgacttacttttcactgaaatgccaaagaaattggcatcttagatatgcttccaaagattgtgccctaccccctggacagcttttaatgaaggcaggactacagcaagagaaacagccagataattggttaaaaagaaagacttgcaggggcttgtttcttattatgtttatatgttaaatgcctagttaggacaaagacaaagagcttgaacatggtttgctcacactctccctggtgaatagattcaattacaaaagagattgatgtctcaaccatagcaaaaaccttgtcaagctctcaactgagaccacaacatgcttgtttaaaagtgtggagaaggggccaggagaggaaacaacatgacaaggagtttataaatctaaaggatgactttcttgctgcatgtaactagtatgtgactgcttctgcattcccttcgatctatccttggctttctcaatgtgaatatttttgttctaaaaattggggaccaaatctggtcctctcaaggagaagtaagaagaaccccaatgtctttcttcttccagctaatttaaaataattggatttnnnnnnnnnnnnnnnnnnnnnnnnnnnnnnnnnnnnnnnnnnnnnnnnnnnnnnnnnnnnngcttgagcccaggaactccaggctagtgcactataactgcacctatgaata

SEQ ID NO: 267064 - DNA, 726 bp, Homo Sapiens
  misc_feature (404)..(444): n is a, c, g, or t
tctcggcgatggagctgttatttttagatacttttaaacacccgagcgctgagaaaagttctcatatagatgtggttcgttttccatgtgtggtttatatcaatgaagtccgagtcatacccccaggagtaagagcccatagcagtctgccagacaatagagcatatggagagacatctccccatacatttcaattagacttattcttcaacaatgtaagcaaaccaagtgcccctgttttcgataggttgggaagcctggaatatgatgagaatacttccatcatctttagacctaactcaaaggtgaatactgatggtctggtgctaagaggctggtataactgtctgacactggcaatatatggatcagtggatagagtgataagtcatgacagagactcnnnnnnnnnnnnnnnnnnnnnnnnnnnnnnnnnnnnnnnnnaaccaagtttgaaaaggaatccaaaacatgctgatggggagaaagaagatcagtttaatggaagccctccaagaccacagccaaggggaccaagaactcctccaggaccccctccacctgatgatgatgaagatgatcctgtgcctctgccagtgtctggtgacaaggaagaggatgctcctcatagagaagattactttgagcccatttctcctgatcggaattctgttccccaggaagggcaatattctgatgaaggagaagtagaagaggaacaacaag

SEQ ID NO: 267065 - DNA, 622 bp, Homo Sapiens
aatgaagtccgagtcatacccccaggagtaagagcccatagcagtctgccagacaatagagcatatggagagacatctccccatacatttcaattagacttattcttcaacaatgtaagcaaaccaagtgcccctgttttcgataggttgggaagcctggaatatgatgagaatacttccatcatctttagacctaactcaaaggtgaatactgatggtctggtgctaagaggctggtataactgtctgacactggcaatatatggatcagtggatagagtgataagtcatgacagagactctccaccaccaccacctccaccgccaccacctccccagccacaaccaagtttgaaaaggaatccaaaacatgctgatggggagaaagaagatcagtttaatggaagccctccaagaccacagccaaggggaccaagaactcctccaggaccccctccacctgatgatgatgaagatgatcctgtgcctctgccagtgtctggtgacaaggaagaggatgctcctcatagagaagattactttgagcccatttctcctgatcggaattctgttccccaggaagggcaatattctgatgaaggagaagtagaagaggaacaac

SEQ ID NO: 267066 - DNA, 715 bp, Homo Sapiens
  misc_feature (11)..(11): n is a, c, g, or t
tcgaggccagnaattcggcacgagcggcacgagtagtttaatttttttattagtgtctgtttaacaatcggttcaatttaatattcagctgagtggtttaaatatgagataccactgtgattatgcctcctcattcttgtctttcctcctcagactttttataagcccatggccctaaactctcaagaaggaaatgagtgtccttagaatgtgaccttcctctccaacttgtcccacacctgctaagacacagagtggaaggagctgaaaagccagagacccacttaagatccagaagcataagcagcagttgcagagaggcacacagactagccacccatctctcaagaagagttgttccaagtacaggtttggaatcttcagtctgaaaacggggtcttttgatctctccccactttggtgcagtctgctccgattagtgccgagattgagactggaacaaaccatggtagctgtcaatggcacaaggaccccatctgctccagacttgactgaccctggctcttgtactccctgccacccactcctacaccctgtcttccctccttctccaatgacaagagatattcattgaaacaaccttgctcccatttctctatctgcagcagggctgaattgaaatttcttatgtccaaatgcccattctctgaataaaaaaatattttgaaaccagactttctaatcaacagatact

SEQ ID NO: 267067 - DNA, 659 bp, Homo Sapiens
  misc_feature (184)..(204): n is a, c, g, or t
agaaaaaaataagatgaaataaccatggtctatttccaaccaacagcaaacgttctcaaactcttaactcctgcttttgtttaggaaaaggatagtatgagtcattatgaaaaacaatccctcccacacctgttttccctacccctgtcacaattctctaagtgcacatgtatgcgcatgtgtnnnnnnnnnnnnnnnnnnnnntatgcatgcctgcctgcacgcacacgctgagaattcagcccaataaatagagagggacagctttatagagaggggcctatttaagacaatgtatataaatattttccggcaaaattcactaaactataggaaagacaaattcaaatgggagcagtaaagcattttttaatgcctttttgttctttataattattagattaaaaggaaaacagtgataataagatccataggggctgtacgctaatggaggataaagaactgctttgtaacgtgaaactttgcctccacactatatgactttaagtgcaccaggctctttatatggaaaactggttttcaacagataccaggcaaactgtaaagatgatctcacattgccaaatgggccttcagctgcttttctaattgacttttccacggtttgttgcttagtgttacacatactaatgtgtcaa

SEQ ID NO: 267068 - DNA, 762 bp, Homo Sapiens
  misc_feature (206)..(206): n is a, c, g, or t
  misc_feature (380)..(380): n is a, c, g, or t
  misc_feature (719)..(719): n is a, c, g, or t
cagtatggtgactccttaccctggggaagtgtacttaggccacggctaggtgaagcccagggatatttctgttcgcccatgcatccgagaaaggagtgttagacctgaccctgttgtttctcccagcagtgagaacgtggccatggacaagaattccaagtagtggcacttctgtagacgacgcggcccttttggggttactacangcccaggaaactcacatgcgacacggcgccagctgaagtccatctagacccccgcagacccaaggtcacaagttgagaaccccctgccgtggacattcttctgcacctagtggtgaagcaggtggagctgcaccttgctccgaccatttgtgagactggttactgcacatatgnagtgtgccctgcagcgatcctgcaatccttcgtgactaacaaggactttctgtgaaaacagatttatcttttcttctctacctttaaggtttcttgctgttgagaatagttaagggacgaggaattcttattgcccccattttacaggcaaagaaactaatgctgaccccaaccttaccgaccacttggaggtccctaaaaacacatgacctttgtgtttctcggctgttagtggaatcctttctgtctgctcatgaactcatcttcaaacgcattccaggccttcagaactcttccgtgagcgcaagtcactggtatgggccactggtaactgccggntatcacctagattttcttaactatgctttgccctctgaggccg

SEQ ID NO: 267069 - DNA, 467 bp, Homo Sapiens
  misc_feature (24)..(24): n is a, c, g, or t
attaagatatctgatcgtccaagntaaaaaaaattaaatggatgatggtgactaatagcagtagcctttattgaaacacttaaatatgtacccagacactgcttaaaaactcccaaattaactcatggaagtctcacaatgaccatttgagtaggtgtactctcttctctaccaataagaaaagagagactaggggagataaaacaacttgtcaggagttggaagtagcggtgctgggccagaaccaatgttttcctgacttcaaagtctcctcatatctttgatagtaaactgcctccacacaaagccatctgtactctgtgcttgggtgccatggagtatggaaaggaccttgcttctctgcgtgtatggactgctgtgggtgactcaatgtaaggatggattgagattttagggcctggtgccgcttgatcaggaatatatttgtatgtgggatgcatgagttt

SEQ ID NO: 267070 - DNA, 457 bp, Homo Sapiens
  misc_feature (387)..(387): n is a, c, g, or t
  misc_feature (395)..(395): n is a, c, g, or t
  misc_feature (408)..(408): n is a, c, g, or t
tctttagtgacaaaggatgagccattgagaattattacatgctgccttttccctcatctttctatgtattccaggactttgctgaagaattagcaacactgtctaatctgtttctagccgagccccacctgccagaaccccagctaagagcctgtgagttggtgcagccaaaccggggcactgtgctggcccagagctagggctgagaagtggccctgccttgggaattgcaccagaaccctggacccccgcctcacgaggaggcccaagtgcccaatgcagaccctcactggttggggtgtagctgggtctacagtcagacttcctgctctaagggtgtcgctgcctggcatcccaccacgcgaatcctagaggaaggagagtttnggcctgantttggggattatnggaagaaaagcccaagagatgccagtcctgggagtaagaagaaggtggt

SEQ ID NO: 267071 - DNA, 683 bp, Homo Sapiens
  misc_feature (59)..(59): n is a, c, g, or t
actcatctgctgcccccggagctatctgttcccccagagttaacagtaggaacatcccnataatagggaatgtattcccctccttctcctcccttacagttttctttcattctctagatgtatcatgactatttgccaccatctttgctctgaggctgtcatgtggctttttgcatcctggggattttgcaatgaactccctagatgtgccagctgggacaaggcaactcagtgtaaaggtgccagcccatgacagcttcactgagattcctgcatggcccacgagccttgggcttcaggtttggccgcaggactctcctgcctggcagtcaccactgttgaaccttgctgctgaatggaattcagggggaaatgccactgatgcagaccctaccacttgtgaactgaattaggggaaaaattctggcaaaagacttgaggtcacagtgaacctcaggggcatacctgtttaagtgtaagactatatacctatatcccaatacacagccctgcagccagatacatactcatgattaaaaacaataataggtttttaataatatcttggtttcagaaatgcttccaggcgttctggggacataaaatcactatgtacacaggagaaggaggtgaaaaggacggaaaagttcttcggggaaggaaggtgaaaaacaagaattatt

SEQ ID NO: 267072 - DNA, 407 bp, Homo Sapiens
  misc_feature (253)..(253): n is a, c, g, or t
aggataaaaagtctctccccctaaaaaggaacccccttcccttggctcaggggactggaaactaccctttgtatgacaaatgaaagccccacaagattaagattatgagaggggcctgaattctgctaaaatgcaggtgtagctgactgataacaagtcattgtccccacagcttgcctttctataatctcttgcttctcaggagtcacatggccagaggtcctgagatttccagtcctgtgacccccacccnagagatggacttagtgcatgaggaccattttccacacccctatgatttcatcctcaaacaatcagcagcaaccattccctagccccctgccttccaaattatccataaaaatcctagcctctgagttattagggagattgattaataatcccag

SEQ ID NO: 267073 - DNA, 709 bp, Homo Sapiens
  misc_feature (11)..(11): n is a, c, g, or t
  misc_feature (400)..(400): n is a, c, g, or t
tgtctcttagnggtagtttcatattagcacattctttttaatggcaatatattctgttagtgcgtaagtatacattttaaaaggcatgagccaccgctcctggctttctttaatgtaacttaaataaaatataaggttttactttatttgtgctttttggaaatgtctcctgatttttaataacagtttattatgccttgtaccagcttttttattaatatataaggtgcccactatattataccaattatgctgcttatatagttattcatatgcatctcaaaaccttccttaatgtacttataatgaggtaacaccataggcaaaattgcatctttttcattatctgccatttaatatctatagtttaccaacgatggacactgcaagcattgtgtcnttctgatcgtgccagtcgtggacgaagggagagtgtggtgagcatgatttgcatgcaaagaaataagatgagttttaaatgacagcaatgcatgatcacatgaagtctgttggaaagtgaagtttgcatttgacaaaaagagcattttcctcaaatttagttatataaatattttgccttataaaacatgttgagaacacatattctctgtgggctgtgcaagctttcattaataatttgcctttttacatctcttaggagtgaatcattatttgaaaaggttttactttttcttctttggtgctggtt

SEQ ID NO: 267074 - DNA, 296 bp, Homo Sapiens
cccaagtagctgggattataggcatgagcaccctgactggattacaggtcttaacaggtggataaacactggttaaatctaaatacaacaatatagaaagcaattaatggtaacatgatttgtaatccatagttatgagttttatacaatatggaaacattaattttgctgaagaaatttgtctttggtgaactgcacacacatgtatgtgcataaaacagcaacaaagaagaaaaagtaaaaacttttcaaataatgattcactcctaagagatgtaaaaaggggcaatttttaa

SEQ ID NO: 267075 - DNA, 632 bp, Homo Sapiens
  misc_feature (213)..(269): n is a, c, g, or t
  misc_feature (287)..(331): n is a, c, g, or t
catgatcctggccaggcgcattggctcatgcctgtaatcccagcactgtgggaggctaggtgggaagatcacttgaggccaggagttcgagaccggcctggacagtagagtaagaccccattgctacaaaaaataaattagccaggtgtggtcatgcatggctgtggtcccagctactcaggaggctgaggtgggaggactgcttgagcccannnnnnnnnnnnnnnnnnnnnnnnnnnnnnnnnnnnnnnnnnnnnnnnnnnnnnnnngagtgagactctgcctcnnnnnnnnnnnnnnnnnnnnnnnnnnnnnnnnnnnnnnnnnnnnnatgatcccaacgcctagacacaatcattatttacatttcaatgtatacctttccgatttctgttttacatttatatatgtagtttttgcaaaattcagatcatactatacgtactatttgtaacccttgctttttacataatatattatcagcaagaaaattagtggtcctaatgatgactaggatagggtcagattctgttaaaatttctgaatcatcaaaaacaaatttattcaatatagtcttaataataattctgcttttgtataagtttttctttgaaaattatcctgtgccgaat

SEQ ID NO: 267076 - DNA, 741 bp, Homo Sapiens
  misc_feature (681)..(681): n is a, c, g, or t
  misc_feature (697)..(697): n is a, c, g, or t
  misc_feature (707)..(707): n is a, c, g, or t
  misc_feature (719)..(719): n is a, c, g, or t
ctgctgttggctcccccgcccccagcctcagctgggcgtccagttctgggttgtccagcgacgccctctgggtgccagagtccagccctagctggggtcccagcagggttcagaaggggctctcagccaatctagggaggccaccagccaagggggtctccgcagatgaatcctggctgccaccacccctcccaaactgcagctccttgctgggagggccgtggccgggcgaagatgaggccctgtggttgctggtgttccgctcctcccatagcactttgcccaggcgccagcggtgccaacgccgccgcagctccgactgcacctccttgttgaggaagcagtagaggacagccaccagcaggccctggaaggagctgaggaagaggtcgaagaagagcttggcggagcgcaagggtgcccctgggcgtgctcgtccgtcacgaaggcgaaagaacacttcgtggacgcccagcagagggatgagggtcagcgtggacttggccagccggaacttgtagtctgtgtggtgcatctgccgtgcccgcagcttggccacgagcagctgaacgatgcggacgaagatgaagaagttgatcaggatggccaggaagacggggaaccgcaggatccaccagaagcccatgttgtcattgctggtccagcactggacgttctcgnacagacacttgaccantgcccagggnacgacgaacagnatgggggcaccccagccgatgc

SEQ ID NO: 267077 - DNA, 674 bp, Homo Sapiens
  misc_feature (228)..(239): n is a, c, g, or t
  misc_feature (348)..(348): n is a, c, g, or t
  misc_feature (467)..(467): n is a, c, g, or t
ctgtctcccaggctggagtgcagcggaagactgtttcaaaaaaaattaaagagctgataccttttgcagtgggaaattcttaaagttttaagccaagtgcctatttttaactgatcatagtgtgatgtccacagaggcacaatgtatattagtactttcttccatatttggtacataatgaatgcctttggtactcattttctgaatggtttgctctagtaggaaagnnnnnnnnnnnngcaagaggcagctttgcctgcactactgaggctgtaccaccagaaagcttcattcccatggttcctctgtatggcatccaagaagttgcagagcccctggtgaagttcnagagagcaggggtgtttcctcaggatttcaagagtcatcagctgctttgaaaggtgtgcttccttcacctgtgttttaacgccctgccccaggggttgtccctgtctcccttgggtacnaggccctgtggcaccttgggtgctctagttccaggtttgcctcgcttcccctctgagggtgttctggagaagcagtgctttttaaattgacgggtcccatcctctgccagttctagactttatttcaagaatcaccagtgcaactatatatacatcttcaggttgctgtttttatttttaataattattaaatacattttctcaaaa

SEQ ID NO: 267078 - DNA, 965 bp, Homo Sapiens
  misc_feature (787)..(802): n is a, c, g, or t
taactcgataaacactcaactcggtcttaattagaatcttaatatagatcctaatgtatttcttaaatgcgttccatgaactcttctcaaacaaccatgtgccaggcattgagtctgacacagggaactcaaagataaataagacagtccttcctctcaagaagtttatgtccagcatggtacgggacacagacaagaaacgagattcagtattgtgactgcaataaacacaaggggccacagaaacacggatgaagggcacctggcctagactggaacaggagggggtgggggtggcaacaggaaactggcatcaaggcaggcgtctgggggatggcatctgatctttaggccctataaactccccattctctccatttggaaaaatgtggttaataaatagcatcgccaccactggacaatagtgagggtttcatggaaatggttcacattaaggatttcccacggtacctggacagagattgtgttcaaccaggcttaaacttaaaagagaagtctgatcaaacacgaaatctcaacacctgtgcctagcaactcacgtgctttaccactgatcacacaacagacaccagcttcacaatcacacacaatattgttttaaatcaacttttattttttaataatgagacaatgttaagccctactctgcatgttaacagcctaattccttggtcattaaaattttcttctccattaccttaaacatacctttctctgacatttctaatatacagtaatgttcttagtcttttgatacagaaggtgnnnnnnnnnnnnnnnncctaacaattactgagtttttaacatggataaatcttgaaatcattaagtgaaagaagccacgcaggacgggttatatatgattctatttattaatatatgaaatgcccataaaaggcaaatctatagcaagtagattagtgattgcctaggactgaagggtt

SEQ ID NO: 267079 - DNA, 635 bp, Homo Sapiens
acagccaaggcttgggtctcacttggactatttgaccaagatcagcgggtgctaagtggccgctggcgcctcccacttcgggcccttcctctggaccccagccttagccttgggcagctgaatgggattcctcaggcaggtcaggctgagctctttctgcggctggtgaatgcaagagatgcagctgtacagacactggcagagatcaatccagcaagtgtccatgagtaccagtacacacctccggtgtccagcacatcttcactggaagccaacttcctcacccccgcagttggctttgctgatcccccacctcgtacagaagagcccctcagtggagtcaaggatagagatgagggtttgggccctcaccacagttctgacttgcccccagtgagtttctgaacccaagtgaatgtggagatgagcatctgaacatgcacaggactggggcctatttccagacctacagctttactactccatgttctgacattggatctagaagcatctagcagttgagtacagaaaaccagttccaaccacagctttaccacctcccgttaagtccttaacttttctgtacctcttctgtttttgtaaaacagattaaggattaaatgagtttgtcaggt

SEQ ID NO: 267080 - DNA, 694 bp, Homo Sapiens
gactcggtgagtagaaggcacagttgacagtgagaggggaagggtggaaagggccccccaagggcaaggttcttagggcgagactcttagtgcaggctgcgggtcctgggaattgttaggctcgtgatttcagcagagaggaggggcaggaactcaacagcagggagttgaataaaaagtaagtgatgaggaaatttgtcaattgactttctcattttgacaaatatttataagcaataggactgacataggaaacaagacaaagatcatctttcaagagtttatggttgtagagggacaaatatcacaagttctcactgatatgcaagagctaaaaacatggatctcatgaagacagagagtggattcgtggctaccagagaccaggaagggaaggggagggaggggatgaaaagaaaataaagaatataaatgtatttattactgcctgaactatatacatagaaatggtaaagatggtaaattatatatgtatattttacctcaataaattaaaaaaagtttatggtcaaaatagaaaaatgtaggagcaatgctgatttagtgtggcccatgctgtacagatagaatgttctacactggtggttaaatatttgggctctgcacttgacagctatcagagctatcagctggattcctcactctggagctgaagggtgttgggcaagttttg

SEQ ID NO: 267081 - DNA, 673 bp, Homo Sapiens
ttgcctgttgagtctattcattatggaaaataaaaaagaaacaaccatttaaggctgaggcattttggttttctgctggcttttagattattaactgcattaagcccctcactacaacttcaccagtatcctagaaacaatttgggtttccttttaggcagggacaggaagtattcaaaggacagacatatggacagagttaggcccttcagggttgaagtctgtggtttcttgtgtctcaagactcaatgtcttgagaagttggtggaccctgtcctccatccaagaagtgctgccaaggaaaaccaggggacctagcaaagagtcaggagaaaatggccaaaggaattctgacattccatacctgaatgaactgttttcgtgagtgctttgatcaccctatcccctatcaaggcgctgaacaggtggcccgcaggaaaaatcctgtcgcaagaggagggctttgacttacttcccctaattgttgagtaaaaagtgattctcttaatttctgtattctgtttttcatatcaccagtagaagggtcctgtggatctaaatagagcacattttaaggctacagagtagtagaaattgatgtttagacaaggcagcttgttcaaaatctgaaaggcacacccagaagctttctctaaacattttggctcccatt

SEQ ID NO: 267082 - DNA, 577 bp, Homo Sapiens
  misc_feature (459)..(467): n is a, c, g, or t
tacaagtgaaaccaaggcagaaaaagacatggccaagtcttgtctagccggttagcctaagcttttctggtcttttgtaagtgactcatttcccttttgtgtggttttcttaatatattctgcataaggctggctgttacatccaaacagaagcaaaatgtatgatctgagcatgcactgcctcttgatctaatccacttcttaattacatttatgttcattgtctttgagtcctatagtttgggacaattctacaggctccccacccctagaagtcatttattatcagctaccagccactcaatgtttagttataggtgaataaaatactttcagtgtcagaaactatagatctcatttctaactctagattaattctgtttcgctgataatattaagaaatggctgtaaattggatgaaaatattctaaaattatttcactattatcatttctttcnnnnnnnnngacactctgttgcctagggctggaaggcaatggtacaatcatagctccctgtaacctcaaccttccaggctcaggtgatcctcccacctcagccacccaagtagctgaaa

SEQ ID NO: 267083 - DNA, 425 bp, Homo Sapiens
  misc_feature (47)..(88): n is a, c, g, or t
agacagagtcttgctctgttgccaggctggagtgagactccatctcnnnnnnnnnnnnnnnnnnnnnnnnnnnnnnnnnnnnnnnnnncaacatcagcaggagagggtccacagtcggcacagagccatgaaagagtgtatcacacttaaaacctctggggtgaagtaactcttcaggtatccagagaatggaaataggtgggaaaatttttgaacttacaagtgtcttgaagagtggagtatttaaataaggattaagggagaagggatcagaaccaattctattgctgaaatagaccagatgagggaaatgagcactgaagatctcaaagctgccacagaggcagagtgaggcagtaagagttcaactattcaggaacaatgtgtgttatgagctggctgacattcagtttatggctaatatc

SEQ ID NO: 267084 - DNA, 652 bp, Homo Sapiens
  misc_feature (15)..(15): n is a, c, g, or t
  misc_feature (441)..(567): n is a, c, g, or t
agaagctgccggcancctgcgctagcggagacaggggtgggaaccgccaaacctctcccttctttttgacttcacccttggataccatcaaggccagaggatggaaccaagataacataaaataggtgctcctttgtgataatgggctatttgtatctctgagggcttccacacaggatggccattcaagaagcttctgctctgcctttaattacagtctatcttgagccctcctaaaccttcagctataatctctatgcaatcaacttaaatatatgtttgtagtattgtccctttctcccaaattccatgtaaaacacttgcctgaattgaattgtttccacaaagttgttttcccctgtggactttgtttatatcagtagtttttattttcccaattttccaaattcaagagtgataattataaatagttgtgttctnnnnnnnnnnnnnnnnnnnnnnnnnnnnnnnnnnnnnnnnnnnnnnnnnnnnnnnnnnnnnnnnnnnnnnnnnnnnnnnnnnnnnnnnnnnnnnnnnnnnnnnnnnnnnnnnnnnnnnnnnnnnnnnaaaatccacgtgtgaataaatgtgattaccatgtgccctaccgtatattgagaaaaataagaatacatgtgaaaagcacgagatt

SEQ ID NO: 267085 - DNA, 930 bp, Homo Sapiens
tcgggcgttatctggacggttggtgacatttgcacacgggccacggaccaggtcacgtattgtgtacacccacccaagtactgaggtgtgacgcggcactgcgtcttccagcctacctcctgtagtgcaggaagccagtgcagggtgggtgaggaagtgcacaggggtacagggactgtcccacagcactcctgacgaaagctggtccccttccacggccctagccaaggagccaggtctgcaaagctgggaccaggtgtgtgcggaggcacgtgttcccacttctcccatggcagagggagagcctgtggacaacagtggggcactctgctcccaggcaggtcccactgggctgagccgcacagcctggctttgggcttccctgactgcaccacccacatcagctgcctctagccgttaaaatacaaaacttcccccagtcactggccgccagggctgagttggggggatgtgttacatccctgggtccactggggggcagtgttggccatggtgttggtgctggctctgccgagaggcgttggagtggctgtgtggggcggtgagcgccggcccagcctgatggaacccactgtaccaggctccaggcctcagcctctgagaaggacttccctgtgtcactcactcatacatgtcctcaggacgtgaagacatttcagcagaccaaagtttccttcgaattttcttcgaatcgtccagatacttggagacatctcctcctcacctgtggggtgctgggggcagtcctaggcgtgggggcagatgggtggacagctgctgctgccctgctgggggtgggcagcccttggagcacacagtggtgaagacattcctgaatatgtctcaggctgtagaaatcttattttgtggaaagattttagagaatcatcgaaaataaacttttaccga

SEQ ID NO: 267086 - DNA, 470 bp, Homo Sapiens
  misc_feature (268)..(268): n is a, c, g, or t
  misc_feature (293)..(293): n is a, c, g, or t
ataaaaacagtaagaaaacaggaccatcactcacagcacctctgcctctgccctacctacttgaatgaggagcagggtgtctcagctggtcagagcagcccttgaatgagccccagctatttctggggtcctcaaacgaaacctcccatggccaagtcatacccaaaacgggcctgctcccctgttctggcctcagctcggagatgctgagtgacagaggctcaacctttcgggtgttcctggcaaaccctcactccggaggccccanagctcagacctagtccttggttcanatggccccacttccatcctctttttcccttaagactgatttgtcctgggagatcactggatccctcattcaggtggagtgctgcaggacgacactttttccaggggtgacccaggcctgcagggtcccagtgtcacaggcagccttgcccgagcctccacctgagcccctgctcctc

SEQ ID NO: 267087 - DNA, 608 bp, Homo Sapiens
  misc_feature (52)..(192): n is a, c, g, or t
atgtcacaagccaagaagactggcacaaatggtagtgctaaaggagttcttnnnnnnnnnnnnnnnnnnnnnnnnnnnnnnnnnnnnnnnnnnnnnnnnnnnnnnnnnnnnnnnnnnnnnnnnnnnnnnnnnnnnnnnnnnnnnnnnnnnnnnnnnnnnnnnnnnnnnnnnnnnnnnnnnnnnnnnnnnnnngataggttcaaatcctagctagggaaaaaaagatagaagtcacctagacgggcatattcctacaaaagcataattggctagactttcttatgcgtcctgcctttgtaactgctgttgcctctgcctgatctcctttccacctactctttcccacaaactaattcatgtgcttcaaaactactatttttttcgtatcatttctaatatggtgcttgatgcctagaacatgtagtcatctatgtaatgcccattcccaacaaacttccaagcttttgttaatgctggaataaattaatataaacctaaagtttatgaattagtataaacctaaatgtctgaaaataatagacatgtagtattgtattcttacctcaaaatatgttgaatcttgccaacattaaatcaacactggtgtt

SEQ ID NO: 267088 - DNA, 543 bp, Homo Sapiens
  misc_feature (111)..(233): n is a, c, g, or t
tagaaacaacagaaattttacttcttacagttctgaaggctgggaagtccagcatcaaggcaccagcagattcaatgtctgataagggcttgcctcaaagatggtccttannnnnnnnnnnnnnnnnnnnnnnnnnnnnnnnnnnnnnnnnnnnnnnnnnnnnnnnnnnnnnnnnnnnnnnnnnnnnnnnnnnnnnnnnnnnnnnnnnnnnnnnnnnnnnnnnnnnnnnnnnngatggcaccttattgcagtgtcctcacgtggcaaaagggcactcatctcattcatgacacaagagccctcgtgacttcacttcctaaaggcccaacctcttaataccatcacactgggtatttaggttcccatatatgaattgtggggggatattaacatttagaccatagcacctactcatgaaagaacattaataattaacacctctagtgagtatttgtgagtctaggatttacagaacataaggatattgtacaaattttaaaagccaaaatgagttttagtattactaaacaacaactgttcagc

SEQ ID NO: 267089 - DNA, 734 bp, Homo Sapiens
  misc_feature (42)..(42): n is a, c, g, or t
cgcggcccagtaattcggcacgaggtctttaattccccaagncagcaaatttgattgagcactacatccaaggcatttctggatgtgaaaggggtccctcaccttcaaggaatgtgcgccaggttgaggagttcagcacatactcctgaaaagatgagtggtgcagacaatgatttcccgagtggttgagaggaaagagagaaggttggagactggacctgatgacagctttcatggaggaagtgaggactgagctgagccttgaaaattgggagttgctgtcttcccatctcagtaaatggcggcaccattcacccaggtatttaatcccaaaacctaggaaatcatacttggcttcctctttcccttcacccccaaatccaaactctcagcaactcctacctattctgcctccaaaatagatcctgagtctgcacactcccaccatctccatttctgtcctgctgggtcaagccaccatcctccctttgaaatgtttcaatgatctattaactggtctttctctttggtcttttggatcatcctccaacccattttccacaaagaagccagagtgatgaagtcaccactgtgatttaaactctttaaaggttttccattagactaaaaataaaatattcgctcttccacatggccctaccaggccctgtgtgatgtggcccagactcacagatcttaccccctcttcttctccccctcactcaccatggctg

SEQ ID NO: 267090 - DNA, 705 bp, Homo Sapiens
  misc_feature (70)..(70): n is a, c, g, or t
  misc_feature (256)..(256): n is a, c, g, or t
  misc_feature (314)..(314): n is a, c, g, or t
acttcacctgtgattcagttgccacatctataaatgaagctacacatggtattgctgtaaggaatgaacncagcaaagcatctgaagcctatggtcagcagtcagctgacaaacgtcagccacaaagcaaacaggatgctccctgcactgcactggagtcactgacatactggtttgttttcccaccagactctaagctgcttaaggataggggcttgtggtgctcacttttggattaacatttcaacaccttaanagagttgaggttgcagaaagcacccgacaagctcgttaaataaacaaatgctgtgtgnactacaggagcagtaaatgcatctgctgagccaagatcaaactcgaacatttctataaaagcggttcaatgatagccaagaaagtctagtacacacacccagcagtccccgtgtccacagttcagactgactcagtgttacgttgtacagcatctatgctactgcttgggtgtacgaaaatctaaacgccgtaagggggttactcttttccttaagaacgtaatctacagagctctaacagttcagggtgtaggcggtttggcttcagaccacagtttactcagcgacccggcaaaaggaagtgctgagaagttgctcccctggcaaccgcctcctgaacccatgtgacgggtttgttttcagttatgccagcagggtagcatgtttgctg

SEQ ID NO: 267091 - DNA, 773 bp, Homo Sapiens
ctggatagtaaggatgtttatcttactctgtcttcattgtcctcaaacctcaagtagtcactaataccctggctatgacagcttttatcgtagtgttaaatggcagatttatttacttggcaaacattgtcaagtctcagaaaaattaccccatggtcttgccttcttccctcgtgaattgccttccactgatggagaggatttgatctgttccctgctcatcaatttttctagcttctttgggatgtccgctctgcatatctactaaggaattaagaaataatggcttcagcaagaaacaaggcaggaaagtgcagtgacatgaggaccatacagggaaggagctgtccccaaaggtgagaatggccctggacaagggttcttgctgtgacttcactcaagaccagaccaccttgaccttttcgtcaccgtgcctcagcgaagtcagtcgttgattctctgatccgttactgagatcatcatgaaatctccctcgtacgagagttgcagaactctgcagtgtcaatcatagtgtttgggagagaggactttctacctccatcctttttctgaacctaaatggaatgaaaattagaactgttgcttattctttgaggtaatttcaaattcccttatccaaaccagtgttacaaaaggactccagtttgccccccaaatcggtctattaagaatgtaatgatgaattttcatccaaatcccacaatatgagcttttctaaaataactctagaaacaaatatgacaatattccaa

SEQ ID NO: 267092 - DNA, 393 bp, Homo Sapiens
cccccgggcccatcctccacctttgggggaaaagctcccttcccctgtaagggccccccatggccactggcaccttcccctgcccttgtttccttgctgaaagcccattatttccttaattcccttagtagatatgcagagcggacatccccaaagaagctagaaaaattgatgagcagggaacagatcaaatcctctccatcagtggaaggcaattcacgagggaagaaggcaagaccatggggtaatttttctgacacttgacaatgtttgccaagtaaataaatctgccatttaacactacgataaaagctgtcatagccagggtattagtgactacttgaggtttgaggacaatgaagacagagtaagataaacatccttactatccag

SEQ ID NO: 267093 - DNA, 807 bp, Homo Sapiens
  misc_feature (422)..(476): n is a, c, g, or t
  misc_feature (778)..(778): n is a, c, g, or t
gaccccagttttcggcacgaggaaatctaagaagctcatacataagaaacacacaaaacataagaaacacacacaaaaacccgacaccatgcctggcctaggcgggctcattttcgctgggagtgtctgctttctggtcattatcggtgcctgctgttcctgaatcactgctgcctggagacatcttcctgttctatctggaaaacttcctggtcctacagcctgtgaatggctgatcagggctcatgagccaagtagaactctgggacccaatccaattaaacaatggtggaggtcactgtgcaccgtgtgcccatcaaactctgctccacgccctgtggcagccttctcctctggcctcagcccaccctgcaccacactccccaaggaccatccgccttccccttatcagggaaacatgnnnnnnnnnnnnnnnnnnnnnnnnnnnnnnnnnnnnnnnnnnnnnnnnnnnnnnntataccacctcgttcatgtcctgtgtcagtgcagccccgtaacatgagcccagctggagaaaggaccactcgctagggttagagggaacaatccccagagctcacacaaggctgggaatagggcgtctagccatcagtcagaggcaaacacctcctcattcgtggggcgtggcatagagcacccagaaggacttttcctcaccaccgaggaatgctctgctttcctacctaacaaagcaaggtccccaaggatgaaactgttaagtgacgtgatagtgtcccacagcaaagctcaagaatgnttggaatacagaaacatccaacacccaga

SEQ ID NO: 267094 - DNA, 465 bp, Homo Sapiens
  misc_feature (17)..(17): n is a, c, g, or t
  misc_feature (26)..(26): n is a, c, g, or t
  misc_feature (92)..(92): n is a, c, g, or t
aggcccattcggccttncccttatcnggggaaacgttgcccgttgattttgggcttctttgccttccagaacttgagggaataacacttctngttactttataccaccctcgttcatgtcctgtgtcaagtgcagcccccgtaacatgagcccagctggagaaaggaccactcgctagggttagagggaacaatccccagagctcacacaaggctgggaatagggcgtctagccatcagtcagaggcaaacacctcctcattcgtggggcgtggcatagagcacccagaaggacttttcctcaccaccgaggaatgctctgctttcctacctaacaaagcaaggtccccaaggatgaaactgttaagtgacgtgatagtgtcccacagcaaagctcaagaatgtttggaatacagaaacatccaacacccagaaacgtaacagtcacaatgtatggcattcaatt

SEQ ID NO: 267095 - DNA, 782 bp, Homo Sapiens
cttaatttaaaatgaacaataatgaagtccagaaaaagaacatacaaatttgtgataaatgtgacatctcaaatcaatatagtggaaagaagacttaataaactactttagaacaaaatttactattatttaaatgcaggaagcaaatttgattcctatcttatactatatacgaaatatattctggaatacattaaaaatcaaatgtaagaaatggagcctggaagataattaactattttcctacattatctcagaatatagaaagcctaagttaagacttaaaaccaaaagccaccaaagaaaaaaaactgactatgtaaatcaaaagcttctacacagaagacagtaacaaactggaaaaaatatttacaatttataaatgagataaaagattaatagctatgattacaaactctcaaaaatggataagaaaaataaaggaattcaacagaaaaatcaagcaaggtcatgaacaattcacaaaacaagtaccaaacagccaataaacaaatggaaagatgctccagttttctctaataaagcaatgaattttattaaaacaaaaaatgaataactggagaaaccattttgtgatatctagtgaaataactgacccatgcaattgagccattagaggaaagcttgaggggaaattttcattacagttacttacagttcattacagttctttggttcattacagttaattttattaggtgtgataacaatattgtggttacataagaaaaatatctgactattacatccttatcaatctg

SEQ ID NO: 267096 - DNA, 780 bp, Homo Sapiens
  misc_feature (45)..(59): n is a, c, g, or t
  misc_feature (72)..(72): n is a, c, g, or t
  misc_feature (349)..(592): n is a, c, g, or t
  misc_feature (624)..(652): n is a, c, g, or t
  misc_feature (768)..(768): n is a, c, g, or t
atcaactgctttcctatatacctgcaaggaacaagtggaatttgnnnnnnnnnnnnnnnttatttatattancatatccaaaaaatgaaatacttaggtataaaacaaaatatgtacaagatctatataaggaaaactataaaactctgatgacagaccccaaagaagaactaaacaaatgaagagatattccatgttcatggataagaaggttcaatattgtcatgatatcagttctgcctaacttgatctacagattcaatgcaatcctgatcaaaatctgacaacacatttgataatcaactattatccaaaaatatataaagaaggctgggcgctgtggctcatnnnnnnnnnnnnnnnnnnnnnnnnnnnnnnnnnnnnnnnnnnnnnnnnnnnnnnnnnnnnnnnnnnnnnnnnnnnnnnnnnnnnnnnnnnnnnnnnnnnnnnnnnnnnnnnnnnnnnnnnnnnnnnnnnnnnnnnnnnnnnnnnnnnnnnnnnnnnnnnnnnnnnnnnnnnnnnnnnnnnnnnnnnnnnnnnnnnnnnnnnnnnnnnnnnnnnnnnnnnnnnnnnnnnnnnnnnnnnnnnnnnnagagcgaaactccgtatcaaaatatgtatctnnnnnnnnnnnnnnnnnnnnnnnnnnnnngacacttaaaactcaaaaaaatgaacaacctgattaaaaaatggacaaaagacctgagcaaacattacagacagcaagtaagcatttgaaaacatgttcaacatcatacatcattnactgtgccgaaa

SEQ ID NO: 267097 - DNA, 747 bp, Homo Sapiens
  misc_feature (25)..(25): n is a, c, g, or t
  misc_feature (456)..(467): n is a, c, g, or t
acgcagggataggatatttaaaacncaagcaccctgaactcccagtccagtgttctttccactcatctgccagattctgagagcttcctgcctggttttggaactacttgaagtacaaagaggaaactaatggagggtgggcaaaggccttccacttggtttgtctgggagtaccctcaagtctacagcctaccccgctgatggaagcaggccagcactggcctgtctcttggggagaacaaatgtggataggcagtgggaaaaagaccagttgggccagagtagttgcagaaggggacatgggttggcctgagtcaggttgggacatagaaatctctaaataattggtttgtccaacaatcctgcacccctagtgtgggcacaagtgcctcacactaggccactttgtgacaagaacgtcatgcaggtttgagatttgtagaagcctggcttcannnnnnnnnnnngtttctccacacctaaaccggtgcctcagtttttcagcctgtaaaattgggctgcttcttagatatgccattggcttgctgctggcctcctccgtccctttggaggagggctgaggatgagcagctgacttgggttagccctcagatgaaagggaccagagtactgatgattgggggtttaaagactggatggagtttaaatactggatggatccagggaagccagcctttctctgcatcactgcatccctgccccatgcttgtttgcactgcagggagt

SEQ ID NO: 267098 - DNA, 460 bp, Homo Sapiens
  misc_feature (298)..(342): n is a, c, g, or t
aaatatgaggtctcactctgttgcccagcatggacgtgcagtggctatttcacaggcactcactgcagtctcaaaactcccaggctcaagtaacccccctgactcagcctctccaagtagctgggactacaggtgggccctagctctagaataacaacccttgaagagacatctaactaactgggttgaggaaggagacaggacaggtcttaagctatgccattcaatatggtaaccactacaataagatacaatgttaaattccattcctcagtcgcactagccacagttcaaggcnnnnnnnnnnnnnnnnnnnnnnnnnnnnnnnnnnnnnnnnnnnnnaatataagaacatggccattgtcacagaatgttctattggagatgcaaggtgtcaaggaaggcacttggagatagatgaggatatctaagtgcctaggaagaaaagcaatagagtgag

SEQ ID NO: 267099 - DNA, 676 bp, Homo Sapiens
  misc_feature (391)..(391): n is a, c, g, or t
ctgccttgaaactgaatgctcacccttctttgagaaacctgtccttttgcagatttccctctctgcactgcccttcccttctctgtacacaacagaccctctttgaaagcccagcttcatcattatctgttccacgaagctgtccctgcccctttgtggaaacagtcatacttctttggatttccacagcacttaccttttctttggttaagccccttccaacaataataaattagcaaaaacttgtgggaggcacatacatctgttgcatgttgtgctaggacattcactcattcatttatttcaccaaacaagcactggaccgtttggccagatactgtggcaaaatttgggggatagtgtggagaatatgacaaagttcctgctgtcnccaaacttttgctctagtggggcaaataagcagtgagcaaacagataagtttatgacatgctctcaggtgtgatcaccaaagccagggaggagcgatggcgggagtggggtggaccatatctatggtacagtcagttgactttcagtagttcagaaattatttaccaagtttctgctcagcaccggggattgcgttaggtactttgttctgagttttatggtatttaggttcatgccttatcttctccattggacacaagcatattttactaataattaaaaaaa

SEQ ID NO: 267100 - DNA, 708 bp, Homo Sapiens
  misc_feature (19)..(19): n is a, c, g, or t
  misc_feature (175)..(205): n is a, c, g, or t
  misc_feature (228)..(290): n is a, c, g, or t
actaaacgtaagcttcagnaaaccgaaacttaatagaagagctcaagagccgcggccagacgtttgcggagtccagggtctttcggagttgaatttgcagctgggctccttcactttggtctcggcttttatctgcctccctgagtacgctgagttcgcatgctgcccgtgtaannnnnnnnnnnnnnnnnnnnnnnnnnnnnnnagatagcgtctcactgtgtcacnnnnnnnnnnnnnnnnnnnnnnnnnnnnnnnnnnnnnnnnnnnnnnnnnnnnnnnnnnnnnnnaacttaagtccctgcttccactccagtcttttgattcaacaagcaacacctgcaaggcctatacaccctatgcctgttatttctgttgggtgtaaactgagaaatttggagctaaaatcctatatacattttaagttttgacggatattgccaaatagctttaaaaatccactcttacccacaattgtaggagactgcttctcttccataccttcgccaatggtgctttgtaataaggacccaataaagacaagagtggtattggggatctaggcagaaaatgtcaaacacccataccttaaacattttgtcccctttgaattcattcagcaaatattgacaaacaactgtaagagccagactttgttcaaagtactgtcaatataacaataaagaaaacagacacgggccttaaaca

SEQ ID NO: 267101 - DNA, 228 bp, Homo Sapiens
  misc_feature (13)..(13): n is a, c, g, or t
  misc_feature (37)..(37): n is a, c, g, or t
  misc_feature (80)..(80): n is a, c, g, or t
  misc_feature (86)..(86): n is a, c, g, or t
  misc_feature (102)..(102): n is a, c, g, or t
  misc_feature (111)..(111): n is a, c, g, or t
tattttgattaanaaagatgtgtttgagcctagttanaatgatttaaaattaatggtccaaaaatgcaattacttttgcnccaccnccaacacacacacacncctacacantctggatttgaaatccatgttgattatatgcacttggaatatttcttttccatctgtggattgttctgtcacttattttctttaataaatgggtttctgaacctctgttgtattgac

SEQ ID NO: 267102 - DNA, 791 bp, Homo Sapiens
ttaaagaagtagaagtaaaagtcaatgcaatgggaagagaaatactttttaaaaagatgtaatattctccctggaatacatattaaaaagccataataaatgtccccagagaagacagtatgtccttgaaatgagaacagagttacaattaaaacaataagcagagaacaagaaagagttcttgaagaatacaaacaagatatttttataaagaatttcgaagataaaacataaaatcaaaaagcagtttcctgtaaaacaatgccagctgcccaaattccaacttttccacctatcccacaaaaactatacagatcaacaaggacaacaaaaccaccccaatccatgcctactacattaggagtcagaaaatactacacacttcaacttatggaagttaagagaaatgaacccccaaaaccagctccaaagcccacactagagtagacagtcaggcagagactatgcagtggagagggcaggagggttccagaaaggtcagacagataaaagttacccacaaaagacagtcccattccaagtgggaaaataatgaggataggtctgagtggatcagagcagtggctactaaggaactgaacagaagggaaggtatgaaaatacatgcagccaggaattagggaaggcattgcttctggcagggagagagacaacttagaagtgggaagacatcctttgacaagtttgtggcacagagagaaagcgagcgatggaaattcacggtcctatagaaacaaaagagaactacaaaagcagaaatcatgccacta

SEQ ID NO: 267103 - DNA, 462 bp, Homo Sapiens
  misc_feature (20)..(20): n is a, c, g, or t
  misc_feature (58)..(58): n is a, c, g, or t
  misc_feature (442)..(442): n is a, c, g, or t
ggagttcagaaaaatacctnacacacttccaacctttatggaaagtttaaagagaaantgaaaccccccaaaaacccagcctcccaaaacccccacactagaagttagacagtccaggccagagaactatgccagtggagagggcaggagggttcccagaaaggtccagacagataaaagttaccccacaaaagacagtccccattcccaagtgggaaaataatgaggataggtctgagtggatcagagcagtggctactaaggaactgaacagaagggaaggtatgaaaatacatgcagccaggaattagggaaggcattgcttctggcagggagagagacaacttagaagtgggaagacatcctttgacaagtttgtggcacagagagaaagcgagcgatggaaattcacggtcctatagaaacaaaagagaactacaanagcagaaatcatgccactac

SEQ ID NO: 267104 - DNA, 1048 bp, Homo Sapiens
aaatgaaagcaccataaaaattaactttgtcatttaaaatatattgtatttcagtttagtttaacaattattgtatgaatttacttttaggatctctgatttggatatgtctcatatatttttatacctaaacacttgcttttcatttcccacccattgcacagtatttagaaaatataggtaagcaaatttaagtagtaattcccaaaacaataataaccaaagacaagtcagaattaatgttttgacgtgtatctttccagtctttcatctaagcctattttttggcttatccttttttatattattctaagtcacattatgcacagatatcttatacatgtagaattacgcaaaccacccaggttttaaggaaaatgtcaatggaggggacgttaacttaattgtcaaaaaagtttagaactatgagggacttaggagataagctctggttccatgacttcgtgtctgaggagagtgaagcccctcagagtgcagtgggggcctgcgtgccagatgctccaattcctgagcacctgttccttgccctgccctctgctgagaagccactagaatcctttcctagaacaaggcagggtatgaataagatcagtttatttttaggtcattgaacaaatcaagccccatgctatcctccttacccatatttgccctttaataataaaggcaggaagcctatggttgaatgtttgccatgtgcaatttcccataaaacacaaagcagccaggcaccccgtggtggcccaagagcaggcaagttatctgattccctgtgctggtttcatcatgtgtagtgtgtagaaaatggctgcatctcatcaaggtgttataagggttctatcagatcatgggtacaaagtacttagcacagggcttgacctataagctctcaaatacttgtgcatataaatattatgtatgtaaagttactcaataataaaggcttattataatagtattatgtaatccagctgctgaattctaacacagttttatgataagtaggagtattaactatctgtttttg

SEQ ID NO: 267105 - DNA, 592 bp, Homo Sapiens
  misc_feature (17)..(17): n is a, c, g, or t
tagctcttaaaaacttngggtgaacaaaaagattatcataagaaatgcaaactgccacacgagtccctgctgtgacttgggtgccatcagtgtagagctatgtgtgtccacaccagtcgtgaaaggcccatggcattcatgcctgatgctgataggacaaggcagtggaatagccacaaacgtgaatttaccatctggctgttgtaaaaatcattgtctggaggacctagagagaaagtgttgcataacttccgggctctcacttacgaatgaccttgaagctgctgctgagggatggcaatgacttgtcccttctctgctttcccttggcaaaggtttagtaacagctgtatttaggtgacaatcttcagatgatctacgtggccctgagcagcctagatcaagggctactgcctgccacaggcttttcctgcgtacctccttgaatgtgggaaggattcacagaggaagatcttcaaaatacggaggtggcaagcattgttgtgtagccctaagtcaaatagttctccactgtaagaaaaactcaaaatatttccagataaatttagagctgagggattggggaagtgga

SEQ ID NO: 267106 - DNA, 391 bp, Homo Sapiens
  misc_feature (40)..(40): n is a, c, g, or t
  misc_feature (58)..(58): n is a, c, g, or t
gcctccctacccgggggccagcctttggggggggcccccnaaaagaaggccaccatancctaatatagccctatccctcacattgccttaaaacctttgtgccctatgtcctatgtcttcccaactagattatgagacccctaagggactatagtaggtagaattttagatggctcctaagattcctgctccctggtacacatgctctgaataatctccccttgagtgtgagaaggacttttgaatatgatatagtcactcttttgattaggctacaatatatggcaaagataatgattgttactttatacacaatttagctgactaaagtcagagattcccctgctgaccttgaaaaagcaagtcacccttcagtataataataataaat

SEQ ID NO: 267107 - DNA, 993 bp, Homo Sapiens
  misc_feature (830)..(927): n is a, c, g, or t
taccataatctgtttatggcctacatgtcttctctaagatggtagatgctttctctcacacattgcacttccttgtggatcctcaccagaactacatttgacatccatatttctaccaacagtctcttcagggcaatgtaggtgtttccctatcatgtgtctcagaactcttccagcttctaccattgcccagttccaaagccacttctacatttttaggtgtttgttacagccacattccatttcatggtatcaaaatctttatcagggccagcaaaacaaaaccagcaggagagatttgtatagatagatttaaggaactggcttacgtgattgtggaggctggcaggtttgaaattttgtagggcaggcaggcaggctggaaagccttgggctgctgctgaagctgcagttcacaggcgggatttcttccccaggaaaacctgttttgctcagttttgaaggctttcaactgattggataaggaccatctagattattgaagataatttccttaaaaagtgagctgactatagatgttaaccacatgtataaaataccttcagctgaacacctggaatagtgtttaattgaattaattgttactccttcgacttaaagtatctggcttaaagtacataggatattggtattgtgccctagccaaattgacacaaaagtaatcattacacccaggtttctccaaatgttgtcattttacatttggttttaccaaccccagctgtcctccctctttttatcttgctaccctgcctcccacacacacaattttctgaattctttggaagtaatttgtaaacacaatgccnnnnnnnnnnnnnnnnnnnnnnnnnnnnnnnnnnnnnnnnnnnnnnnnnnnnnnnnnnnnnnnnnnnnnnnnnnnnnnnnnnnnnnnnnnnnnnnnnngaattttaaatccaggaggctgtaaaagtagcaaactaacgccaactgaccagatttgttccccac

SEQ ID NO: 267108 - DNA, 495 bp, Homo Sapiens
  misc_feature (429)..(429): n is a, c, g, or t
  misc_feature (467)..(467): n is a, c, g, or t
taccaataatctgtttcatggccatacatgtcttctctaagatggtagatgctttctctcacacattgcacttccttgtggatcctcaccagaactacatttgacatccatatttctaccaacagtctcttcagggcaatgtaggtgtttccctatcatgtgtctcagaactcttccagcttctaccattgcccagttccaaagccacttctacatttttaggtgtttgttacagccacattccatttcatgggtatcaaaatctttatcagggccagcaaaacaaaaccaggcagggagaagatttgtataggataggatttaagggaactgggcttaacgtggattgtgggagggctgggcagggttttggaaaattttgtagggggcagggcaggcagggtgggaagctttggggctgctggctgnaggtggcagtttcacagggcgggtttttttccccgggnaaacccgtttttgctcagtttttgaagg

SEQ ID NO: 267109 - DNA, 441 bp, Homo Sapiens
  misc_feature (395)..(395): n is a, c, g, or t
gctttcagacaacacatgactaagacagaatgagaccactctagttgcctcatgggaaactcgggaaaagactgcaaaaacaacattgtttctccctttggaattctggagttataaggcagaggtcccccatcttcccgaactgtaagtgaattccctctccattatcctcattcaatggccagccagcttctgcttgaacagattctgtgacaggagtctcactacctcccagggacagcttcacctgccctttaatgacaccaaatgtaacaggaataaagggaaaggaacataaggagatagtaagttaagggatgggtaaggaaaggaatgtgggcccggggaagggtatttccctgggtggttttgttcctcactggggaagttggggnagccaaaattttaaccgcactgaggaaaattgtttgtttccccccc

SEQ ID NO: 267110 - DNA, 638 bp, Homo Sapiens
  misc_feature (172)..(326): n is a, c, g, or t
  misc_feature (331)..(331): n is a, c, g, or t
  misc_feature (351)..(351): n is a, c, g, or t
gaaggttgtttttttaaaaagcaacgctatgtacagcacaaaactatcattgtttttaaaaatatgtccacatatgtatgaatatattcattataccctaaaatgttaacagtggttctctcccgagtggtaagactgaagacgatgttcatttccttgtaccttctagatnnnnnnnnnnnnnnnnnnnnnnnnnnnnnnnnnnnnnnnnnnnnnnnnnnnnnnnnnnnnnnnnnnnnnnnnnnnnnnnnnnnnnnnnnnnnnnnnnnnnnnnnnnnnnnnnnnnnnnnnnnnnnnnnnnnnnnnnnnnnnnnnnnnnnnnnnnnacggntctagatcacagaaactggntttgtaacaagtgccacttttatagtcacaataatagaacaatgaaacttgcaaaaggggtcagtatgttgatggatgaacagcattttaagagccaacacatgcccaaacacagtacgtgcaccaggaggcaggcgcagtctagttcaagctcacactgacctgttctgtccagtccccagccgcagccaccactaaagccagcttccatgggggtctctgggatccctacagtgataaatctcagacaaacaagtctggcatgagtttttttctttccttttgtt

SEQ ID NO: 267111 - DNA, 410 bp, Homo Sapiens
tgttagaaatgcagattctcaggccccaccccaaagctactgatcagacactctagaggtggggcagatgattctgatagatgcaagtttgagaacacggttcttagatcacagaaactggttttgtaacaagtgccacttttatagtcacaataatagaacaatgaaacttgcaaaaggggtcagtatgttgatggatgaacagcattttaagagccaacacatgcccaaacacagtacgtgcaccaggaggcaggcgcagtctagttcaagctcacactgacctgttctgtccagtccccagccgcagccaccactaaagccagcttccatgggggtctctgggatccctacagtgataaatctcagacaaacaagtctggcatgagtttttttctttccttttgtta

SEQ ID NO: 267112 - DNA, 891 bp, Homo Sapiens
  misc_feature (85)..(85): n is a, c, g, or t
  misc_feature (586)..(586): n is a, c, g, or t
  misc_feature (600)..(600): n is a, c, g, or t
tcaatcaacaccttccccaactcaattgtactaggttgtagagcacaaggatggtctcgtgctgctctgtggcacctgtgcctancactcctctgagctttgaggaggctgctctctttgctgaccccatgatcttttctgcccttctgttaagggcattggccacagcaacggggcaaatgccacaagctggctgtaagtgacccatccctttggctcccatgattagaccaaggagaggcatggggtccagctgagccattcagaaccattccttaggcattttccactcaaaggttaggagatgagattttctcttcccaaggctacctctggccatggttccagcttcatgggggcaatgggattaggaaaatgaggtcaacctgcaaaggaaagcagatgcaagagatggagacagaatgggggtgtcctggggatcttggagcctgaattcattggcacaaaaggcagcagcatcctcactgtatctgcagtccatttggactcaataaaaactttgaaagtcacatgtgttatggaattccttctcagtgacacattcatctgtgcctcagttgtcccnagcaagggtaagcnccctcatacaccctccagcatccgctgctatgaagcagagctgtaaacgccctccctgtgtataggaaaagctacatggagcaaatcctcctgcctgaagaagtgcatctcagcatcacttcagctgtcggggcatttgtggggagaaccagaccacctctgcggaaggcagcagaccctctcccagccatggatggagttgaattctctataaacggttcaccagcaaaccaccaatacattccattgtttgcctagagagaaatttaaaaataaataaatgttcactta

SEQ ID NO: 267113 - DNA, 665 bp, Homo Sapiens
gtagaggtcctgcctccccatttctcaagggaagccagtaggaacacagccagcacggtgctctccagggcagcccctctcagacgaggaggcagcgggtgcagccaggtgtctgcagagccgccacaaaggtggcctaggatgcgggtgtctccccaggtgagtccatccacacacgtttgaaaaacactattagtctttctaacacactgagggaaagattaaaatctgtggaataaaggaggagattttatttacagatttttttaaaagccacctgggttgacaccttcctacttatccactagatgtcatcagaggtgctgttccgtggttctgcattaacccctgcctcatgtctgtaacatgtgacagtaattccagctcggtccctccaggcaaaggagaaacgggacttacttcacaggacagaggattgacagaagtcagtttaagataagtgtttgaatcagatttcagaacatctcattcatttcttagatttgtgttcacaattgtgttctctaaaatgtgtctaaattttaaaaatatgtacatgcataatgtcattttaaaatctgaaggaaagaatttgaagtccacaaaaagtgtttgaggttctttggttttgttagtaaaagccagttctgtggtgatgacctaat

SEQ ID NO: 267114 - DNA, 822 bp, Homo Sapiens
ttaataaatgagggccattattatcattgataaatgcatgctaatgattatcatctttttagtcctatctccaaagcatgtttttcattccaccatgtctcccttataaagaacaaaatgagaaatcatataacttccttacttaaaatttccacttagatatctttagcagaatcttcagattccagatttacactccaacagagtataaattgctctcctcccaaacggggcaaaaactgcttctttacaagtttttctcatctcagtaagtttcctaacacctagaatttatcttttattcctccctgtgcacagcaaatccaaaacatcatcaagtccaaaatccatacatcttttttccaaatctaagacagtccagcccttgtcactgtcttttcctggactactacaaacgtatttctgctgccactatttgcgtgcgttaagtgtgtgtggccactttcacaaggcaggagtaagaaaacaagattggccatcgaaaacaaaactacccaaatggaaaataaagaaatggatccagaattcaagagggaaacaccagaagcattcccataatgacaagaaaaagacaaaaatacttgtcatcaatactactatttggtccagttttagaagtagtaactgataaaatatgactcaaaaatgagaggtaaaaataatagaatagaggcaaaaaagatcaacatgaaaaaacaatttccttcctatatgccaaaaataatccaggagaaaatgttgatgggaaaagatcttaatcattaacagccataaagtaacaggaataaagctagcaaaaat

SEQ ID NO: 267115 - DNA, 586 bp, Homo Sapiens
  misc_feature (233)..(233): n is a, c, g, or t
  misc_feature (258)..(258): n is a, c, g, or t
tactagacttctggtttccaaactggaaatctctttctccatgaaaatatataatataggaatgacaccaagtagtaacttcagctcaaaatgtcattttgtataaatataaaatatataacattcataagttttcctaaatacctataatatctaacagaaaatacaagagttttaaaacaacatttctgataccaactataagtataaagtatctaggagtgtattaaaancatacacaagacctggaaagtaaangaaatttttttcccacttttgataaatgaacagacctgtttctggatgggaatattaaatcagttcaagttgttaacttttcacaaattaatctataaattcagcacattaccattaaaattccaatatgatttttttctgaaacttatagtgattctaatttctatctgggaattaaatatatgaaaaaagtgaagggaaattctatacaaaaagaatactagaatcattaaacaaatggtataacataattattaaaactgtatggtactagacagaaaataatctaattaaaataaaaggttggtacaaataacttcaatatcag

SEQ ID NO: 267116 - DNA, 882 bp, Homo Sapiens
  misc_feature (367)..(367): n is a, c, g, or t
agtacataaaggaatatgtgtagctgggttcccaggccggacaaaacagatggtgaccagatttggcccctgggctgtagtttgctgacccctcatctaaaaaataggctatactacaattgcacttccagcactttgagaacgagttgaataccaagaattattcaatggttcctccagtaacttctgctagaaacacagaatttggtctgtatctgacactagaacaaaacttgagggtaaataaacattgaattagaatgaatcatagaaaactgattagaagaatacttgatgtttatgatgattgtggtacaagatagttttaagttatgttctaaatatttgtctgctgtagtctatttgnctgtatatgcccgaaatttttgtatgccatttagtatttttatagtttaggaaaatattttctaagaccagttttagatgactcttattcctgtagtaatattcaatttgctgtacctgcttggtggttagaaggaggctagaagatgaattcaggcactttcttccaataaaactaattatggctcattccctttgacaagctgtagaactggattcatttttaaaccattttcatcagtttcaaatggtaaattctgattgatttttaaatgcgtttttggaagaactttgctattagatagtttacagatctttataaggtgttttatatattagaagcaattataattacatctgtgatttctgaactaatggtgctaattcagagaaatggaaagtgaaagtgagattctctgttgtcatcggcattccaactttttctctttgtttttgtccagtgttgcatttgaatatgtctgtttctataaataaattttttaagaatacctatgg

SEQ ID NO: 267117 - DNA, 943 bp, Homo Sapiens
  misc_feature (767)..(840): n is a, c, g, or t
aactggaagaattctgccacacagcccaggtgatgcaggaccatgctcccattcccctagcagaaaactgctacagatcactccacaacattcaaagcagatcacctctgaccttacccatctcacttccttccactatcaggcagctccagaaaggctgaagttccaccctttaaatacaacacatttactgagtactcattatgtacaagggagtgctgtagacactgtgagaaaacaaaaatgaaccagatgattttgcccttgaggaggcaggagtctggtggaggtcaaaagagaagacaggtacacaactaataaaaataataataacaatagcagctaacactgactgatcttgctatttatctgactcttaagagcccaactcttagccaaagctaagtgctagaagaacgagaataattagtggcatattctctcattaagtctaaggaagccctaaagagtaattaggtctgactgtagtaactgagaaaggttccacaggagaggtggcacagcattctctccaacaagtagggaacacagcatgagcccaaatccatggaggtataaaagcgtgagctacattagcaagcatctaatagatctgaaatctataatgcaagccaagctgtaatgacctgtggaaggctgtgaatgctattctcttaacagtacaataatagctatcatttattgagtatgtaccaagcattgaaatattttaacattttttatttcattcaaataacatcttcctnnnnnnnnnnnnnnnnnnnnnnnnnnnnnnnnnnnnnnnnnnnnnnnnnnnnnnnnnnnnnnnnnnnnnnnnnnattcccaatgtatcatggctagaaagtagaagaaaggaaattcaagtcagtcagatccaaagccttgcttttaacttctgacttagaatacaatgatgagcca

SEQ ID NO: 267118 - DNA, 597 bp, Homo Sapiens
ggttaaatgttagcatggtagcagataaagtagaaaatctcttttcccccatgaccctccttgtgaagaggtttctaaaagccagtggtcccttctccctgagtaaagagggtgtggtaacttccagaaacgtttcttgccctttgaggatatgtggcactgagtagtcaccacacaagctcatcccccggtgcggagatatgggctacttcagggaattggggaggaccccgcgctgcgcccggaatgtgctctggcaatggtttgcctttcttttctgtcatttcctttatttttgtgtgtttccattcatctcttgttcctcaaagctgcacacagcccgcccttctgctggccaaggtctggttagcaaagggcctgtctccggcggatctggctttcctcgctgtcagccttcaggtgccctgaaagctggcgaaggtttctgagtcaatgctggggttgagtgggagtttagaacatcactgcggtgccgcagtcactcttggacgtccacgtcctcttggaggtttgaggcaggctcagctcagccgttcgctttggtatcctcataatcaggtagaaagtctgggccgg

SEQ ID NO: 267119 - DNA, 312 bp, Homo Sapiens
  misc_feature (13)..(13): n is a, c, g, or t
  misc_feature (22)..(22): n is a, c, g, or t
  misc_feature (38)..(38): n is a, c, g, or t
  misc_feature (70)..(70): n is a, c, g, or t
  misc_feature (78)..(78): n is a, c, g, or t
  misc_feature (122)..(122): n is a, c, g, or t
  misc_feature (141)..(141): n is a, c, g, or t
  misc_feature (175)..(175): n is a, c, g, or t
aaaaaaaagcccngccccttcntgcttggcccaaaagntcctggttaaagcaaaaagggccctgtctccnggcggganctggctttccctcgctgtcaagcccttcaggtgcccctgaaaanctggcgaaggtttcctgantcaatgctggggttgaagtgggagtttagaacantccacccggtgccgcagtcactcctggacgtcccacgtcctcttggaggtttgaggcaggctcagctcagccgttcgctttggtatcctcataatcaggtagaaagtctggccggggccaggggcagtggtgcacac

SEQ ID NO: 267120 - DNA, 511 bp, Homo Sapiens
agttgagtgaattcttgttcctttcatggctaaaatatgtgaccaccagcccactgaatgaaatggagcgtgtttgaatttgcctcactgtggtcactctggaagcaggctcagcttaccagggccatttctctgatgtacctttggaattcttccaaaatgtatagggagaagtagaaaaaccagaggcattctgagtgaggaaataagcagatgactcagcaaatcaccaatctacttcatctccttgaatagcaaatagttgaatttcatgaagaaactttaattttttctgattatgaaagtcatatacaattgttttaaccaagtgtgcacagaatgatcacacttatagaaaatgtctgttttgttcataagtgaattaaaaaggtcaggaaagatatattccatattatgaacattttttttagaaaatgaaatgggcatgatgattagaaaaatgttgtaagtgctcattgtaggacagtcagataatatataaagatgcaac

SEQ ID NO: 267121 - DNA, 672 bp, Homo Sapiens
  misc_feature (40)..(40): n is a, c, g, or t
  misc_feature (45)..(45): n is a, c, g, or t
  misc_feature (211)..(211): n is a, c, g, or t
taaacatgatagaagcttaggagtgatatttcttacctcntgccncattacattcagcaaaaaagaggcagtctctgcaagaaagtaactttaactgctacttaatttttgatatattattttcttaattgaaatagccaatgccctctctttgttcaacattggatcaattaaaatgatgagtgtttaacctatacttatatatatcaancctaaaatactttaaagtgacataaaactactgaaatcaaagcaacataaacccatgtaaaataatgtgtttcccaagcaagaacaaaagaaaaggtaaattctctacagaccgaggcctcatcctttatttataattctacatattactttttgtaaaatatgccaaaaagaaacatgaaatagaaacatgcttttaaaattgactgaatgccaaagcagtgaacataatataagatagactaagtcataagactaccaaagtgtattaaaatactttggagttaaatgtgtatacataaatagaagcttttaataaatgttgaaaatactgattatagaaaatcaatcctgatcatgaacactgaaaaagtaacttacatataacacataaatatgtgtccatttatgagacactttgatagttaacagcctttctaaaagtgagtttatatattagtt

SEQ ID NO: 267122 - DNA, 451 bp, Homo Sapiens
  misc_feature (59)..(59): n is a, c, g, or t
gggaataaaagggcccaaaacggcccaaaaccccaacctaaattttggtaaattttaangtagaagaacgggggtttccaccccatgttgggcctaaggcctgggtcctcaaaactcccctggccctcccgaccctcagccctccccaaagtgcctgggattaacaggtgtgaagccacctcgccctggccagcatcccttaaatttttaaagaactgtgtatttcaccttctggctatgtttaccttttacatgtgttagggcctagaagctgcaaatacttacaaaaatggtgaaatcttactaaagataaattagaattatgatgaccattatgtggaacattccagatgaataagactgttcatctaagaattgagtttaaaaatgagggcttctgaatcaggccctcctagggatacctattgatgtgcaaaagctccgtgccgaa

SEQ ID NO: 267123 - DNA, 762 bp, Homo Sapiens
  misc_feature (706)..(706): n is a, c, g, or t
ccgaggcccagggctctaccacgcttcttgtgagctacagacacggccacgtccacctgagtgccaagatcaccattgctgcctacctgcccctcaaggctgtggatccctcctctgttgccttggtaaccctgggctcctcaaaggagatgctgtttgaaggaggtcccagaccttggatcctcgagccgtccaaattcttccagaacgtcaccgctgaggacactgacagcatcggcctggctctctttgccccccattcctcccggaattatcagcaacactggatccttgtgacctgtcaggccttgggtgagcaggtcatcgccctgtcggtggggaacaagcccagcctcaccaacccctttcctgcggtggagcctgccgtggtgaagttcgtctgcgccccaccgtccaggctcaccctcgcgcctgtctacaccagcccccagctggacatgtcctgtccgctgctgcagcagaacaagcaggtggtcccagtgtccagccaccgcaacccccggctggacctggctgcttacgaccaggagggccgccggttcgacaacttcagctctctgagcatccagtgggagtccaccaggccagtgttggccagcatcgagcctgagctgcccatgcagctggtgtcccaggacgatgagagtggccaaaagaagctgcacggtttgcaggccattttggntcacgaggcatcaggaaccacagccatcactggcactgccactggctaccaggagt

SEQ ID NO: 267124 - DNA, 351 bp, Homo Sapiens
  misc_feature (18)..(18): n is a, c, g, or t
gtgaaaatgcccctccangggataaaggttaccaagggacagttgtagaccaaatttaatgggacattccttacccagaataccctacattaaaggaaatacctaaagtttttgtttaagcagaagaaaaaacttgaagtttgtaaaagaaacatgaagattcagggaatgaagaaacaacaaaaagggtaaatatgtggattaatctaagtgacacattaaataactcttgtggcacttaaagtatagagagaattatacaattgtctgttggtcagggtaggggtgtatatacatataggcctagataaatcaaagatggatgacattttaatctctaacctattaaaa

SEQ ID NO: 267125 - DNA, 278 bp, Homo Sapiens
cgcgcccgacctaggcatgttatcttaaaactgctgaaactaaacacaaagtgaaaaaatgttagagtacccagggcaggatgggagtggggagtatgtacaaacgagcaaccaacaatttgtctgaggagctaccatctccacagaaacaataggaagacagaaggataatgggaattgacatctttcacaggggcttgaaaccaaaataacttcccaacctaggattttcccattaacccggtggaaaattgccctttcagggggttaaaggttta

SEQ ID NO: 267126 - DNA, 723 bp, Homo Sapiens
gagtggagagtgtctgggacccagctgggtacaggaccagggaggaggggacgctggggaaggtccctgacagcccctagcctggcctgcttcctcatctttgcctgctccatctttctgcctgcactttcttgccccatccttccctcccctcccctcatgtccattaaggtgaggatggacagtcacctccctatattgtcccaactaacccttgccccttgttgctaggccatcaggttacagagcagggccttccccctctattttgctaaagggcaggtacagggtaatgatgacgccattctcacttgaatgaggcccaggttgaaccattatttcctcatttgctttaaaaacggatacattgttggtgtggctgctaaaaagagagcaggcagctggggctccgggaagtacctgtgcagggcagttccgcctccccctcttggctggctcccgacttctctgattcttgccaaccaagtcctgctaactaaactcctaagagactgactgataaatcatttattcattcaacaaatacttgagcacctgtttggttgcaggcaccattccaggccctgagaatgtggcaaggcactgaaacaaacccctcctgtatcttacattctagtgggggttggggggacagatgataataaaaataagaacattcagtgcttatgcctgttatcccgcactttgggagctgtagccaaa

SEQ ID NO: 267127 - DNA, 1413 bp, Homo Sapiens
  misc_feature (101)..(101): n is a, c, g, or t
ctagtgcttcttgaacccccaagtagaaagcatttaaaccatgaatgttgttttgtgttttttgaagtttgtaaatagaagacttgttgatgatccgatgncaaggtatttttctcttggtatgtattttagttatttcctcgtgatgcataagtgaaaagagtgaagtttctcagaatgagcaactgtcatccatctacctgctattttattattgctgattacaaaagcaaatcaagagatgagaacccagttgcctgcaagtaaatatttactgcattgagggtcggagcattttcccattaccggttatccatggatcaaatagtgtatctcagtggtaattctagagggccattaaaaccctgatggtgctggaagagatggcagtgctgcatgtcagaaataggtaaactgtaattaagaagttacagatgatttgattaacgcctcttgtgtatttggtccctgttataatgtgagcagattaaaatcatgtagtgcttaaagctatgtcattatgcaaacatttatggcaacttctgcaaattaatttgaactgtaaaagttccctaatgagacgatgtcctccataactgagaaggacacctgagccattgctgcttaattcctgcatttgaatggttgccgagcgcatggtgtgccctttctcaaagagcagagaggctgcagagcattttggggggtgatgactgaatgaaagtgaaaagaccatttcaaaatagcctttaaaaggaaagccaaggatgattattaatgaattcctgggatctaacagtagtaagaaatttaaactatataaacatgtatgttaaaggctagctcttcagaaattaaagatcagaagactgcagttctttagttttgcttgtctttttgtttttcttgtttggaccaggtatttttgtggagaggactgtggcttttcttttttcctcttttccagttagcatgttgtatgcacaggtctacacaacatggatatttctagtggatgttgactcacattgaccttggctctgtagctccccatgtactagtcaggcacctggctcttctggaggctggcaggcactggaaagcaggatgccagtcagtgtttgctcagaggaaagaacctaaggaaagagtcttagtagccctcggataccaagtgaggattccagggtgcctatcagtgctgctaaagtataaaaaatgtaacaccaactccagtggctccctgcaaatccacacgtgtagtctgggatgccggggcaaacacttttggaaacaaaggggaggcacttttacaattaaatttgctattttttttaaggtttaataaggtatggcactggaacatcaaactcttccaagggttagttaggatgttcaggcaaaggcccctaa

SEQ ID NO: 267128 - DNA, 456 bp, Homo Sapiens
  misc_feature (22)..(22): n is a, c, g, or t
  misc_feature (70)..(70): n is a, c, g, or t
tgcggctaaaagtataaaaaangtaaacacccaactcccagtggctcccctgcaaaacccacacgtgtantctggaagcccggcaaacactttggaaacaaagggagcactttaacaataaatttgctatttttttaagttaataagtatgcactgaacatcaaactcttccaaggttagtagatgtcagcaaagaccctaatgcctgtcagctgctccccacctgtctccctcagtccctgtgtcgaagctaatggtgagtgcatatcattcactgtgctgcagtgcagagtgggttttggagtgctgcaggagaaacactcatctaatgagaaactgttctgtaagcgactccgcggcacagcttctctcacagttaatgtcccttatcttctggctccatttctgcctcctccgtgacctcttcgtcttcctctagaactgctttggcatctt

SEQ ID NO: 267129 - DNA, 455 bp, Homo Sapiens
  misc_feature (41)..(41): n is a, c, g, or t
tggatgacagttgctcattctgagaaacttcactcttttcnacttatgcatcacgaggaaataactaaaatacatacccaagagaaaaataccttgcccatcggatcatcaacaagtcttctatttacaaacttcaaaaaacacaaaacaacattcatgttttaaatgctttctacttgtggttcaagaagcactagatttagtaagaaactctacctatatacttagtttgaagttagtaacttcctgagatgctaaagacttacagcctgcgattatacaaggatttacacatgcttcctctggtgctttacttcccaaacctaaaaaagcaatgaaatagatgtaaggaaggagggatttaaaccttttaaaaaacttttgctgacttatattactgtaaagatttgtttgctcaatagtaatcattaaactacaaagtaattcaaaaaaaa

SEQ ID NO: 267130 - DNA, 812 bp, Homo Sapiens
  misc_feature (314)..(344): n is a, c, g, or t
ttacaatttttgtagcaatgaggtctcactatactgcccaggctgggtcttgaactcctgagctcaagtaatcctcctgcctcagccccccaaagtggtgggactacaggcatgaaccactgtgcccagcctttgtcgccctattttaatgattagttataaactatagacattaaccgttctgagtcctcaaaatactggtaagaacatctcaaatttaaaacgcaggaaccactcctgatccaaatcaacacaaatttctagttagacaattcaattctttttttactacagaagaacatatttatttattnnnnnnnnnnnnnnnnnnnnnnnnnnnnnnnttttttaacagataggggtcttgatatgttgcctgggctgaaatgcagtgcctattcacaggcacgatcccactactgatcagcacaggagttctgacctgctctggttctggtatgggccggttcacccctccttatgcagcctggaccatactgatgccaaacttagtgtggataccagatcggcttagtacactacagcccagaatgcccagactcaagcaatccttgaggcaagtgccaccaagaccaggcacaagagcatttaattagcaagcatatatcaaccatttcaacttatgtataaaacatttacaatttataaaatatgcatttgttaccaacaaaatttactgaacacaggaaatggcaagtatctctaaatcaaactatttgttttcagttaccttatttgtcaaatgtttccacataaagtctagaggaagccactcgtgccgaattactggg

SEQ ID NO: 267131 - DNA, 457 bp, Homo Sapiens
  misc_feature (38)..(38): n is a, c, g, or t
ggggtcctggaatatgtttcccccggggctgaaaatgncagtgccctaattccacaggccacggaacccccactactggatccagccacaggagttcctgacctgcctctggttctggtatgggcccggttcacccctccttatgccagccctggaccatactgatgcccaaacttagtgtggataccagatcggcttagtacactacagcccagaatgcccagactcaagcaatccttgaggcaagtgccaccaagaccaggcacaagagcatttaattagcaagcatatatcaaccatttcaacttatgtataaaacatttacaatttataaaatatgcatttgttaccaacaaaatttactgaacacaggaaatggcaagtatctctaaatcaaactatttgttttcagttaccttatttgtcaaatgtttccacataaagtctagaaaagcca

SEQ ID NO: 267132 - DNA, 672 bp, Homo Sapiens
aacctttacatttgccaatttattataaaggatacagatgaacagccagatgaagcagcatgaagggctaggtctggaaagattccaagtgcaagagcttctgtcccagtgaaactggggtgcagtgccctcccagcttgtggacgcatttactggaagctcctcaaatcttgttgttcaagagtttttaggcagcttgatctccagcaccttccccacccagagatcagtgggtagagctaaaagttccaaccctctaaccctcaaatgacctggtctttccgggaactagccccatcctaagaatatctagggccccacattaagtaacctcattagcataaactcaggagttatcgaatcaaaggggctcattatgactaatgagatattcctaccactcaggaagttctaaaggtttggggaactctatgacaagaactgagacaaagaccaggtatccatatttcatattaaaccacaatggtagatattaattgtattttagcctggctcatctggccaatctgcctgcaagaaggcagcaaggcagctcctagctacagtttcagcagctacacctcacagcccttacaccattaaatgctccccatttgttgtgcttttgttgagcacgtgactaaacctcctgtttcctaaaaatggcttaag

SEQ ID NO: 267133 - DNA, 613 bp, Homo Sapiens
cagctttggcaagagtgtacctggtccactgaaaaattcttcagattggaaaataccacaggatggagactacgagtttcttaagagttggacagtggaggaccttcagaagaggctcttggccctggaccccatgatggagcaggagattgaagagatccggcagaagtaccagtccaagcggcagcccatcctggatgccatagaggctaagaagagacggcaacaaaacttctgagcaaggccaggctgtgagggccccagctccacccaggctttgggtgaattctggatggcttgcctcatgtttgttagccagcacttctgctctgtcgtctctccacagcacctttgtgaactcaggaatgtgcgccagtgggaagggctctcttgacagtcagcgtgccatcttatgtgtgtatgtacattggtcaggtatattatctcaaaggatttatattggcgcttttaactcagagttttaaaccccaggaacagagactcctagttgagtgatagctgggaaagttttacattgtctgtttttcttctcccaatagctttcaattgttctttctggaagacttttaaaaaaatataaatatgcatatat

SEQ ID NO: 267134 - DNA, 720 bp, Homo Sapiens
agtacatatttcagaatgccaacttcaaggaaatccacagaacttataaataccatagttttgctattgatttcagtctaagacaaatttcttttgtcggagcccaataacctaagtgtggttatgtgaaatttattgaatattgctttctgggggtggtcgggagctgcaaccccaagagacatggccagttttctatgttctgggaaaaaagaaaagagaattgccctctgtcagtcccctgaaaacaccagccatcctcttttctgagtcccatggtgtttgaatctgctccggctcctgttttatatcccatccttctccattttggtcagaaatattttctgttaccctgagattagcttgtactctaacagaaagaaagaaaattcctgtttaagattataagtggttcacttttagaattatctttttgctagtgccaaaagtttaatttattgttaagaataatgatttttttaattttgaaaatttaatttgtgttctttaaaagtaggcagtgtggaaaagtataaagaggagagtttaaaattattctaaattctatcaatagggctaatcttcattagtattagttaaatgtcattccagagagcattctcttcacatgtatattaatatgagaaagaaaaagtaggcagacagacatagcttatactatcatgaaaaagacatttttcattaaaaacattattcatc

SEQ ID NO: 267135 - DNA, 336 bp, Homo Sapiens
aattaaataaaatttaaaagttaattgcaaagcccagatactcaatgcagttactggaaagtccctaggtgtgtttgaaacaatctgggtattacaggaatctactttgtcaactgtaaatttatgaaatctaaatacagatcaagtatttctgatgaaaacgtatgaactgagatatgctgttaaatgtaaagtacacaggattttggaaatgtagtacaaaaagaatgtgaaaacccacaattttaaaatactgattacacactgatacaatattttagatacaatgggttaaataaaatatattattaaaatgaattttgcctgtttaacatg

SEQ ID NO: 267136 - DNA, 623 bp, Homo Sapiens
acccagcctccagacacacttagtattagcaacaaacactgatactgtttggtcttgaaagtgacggtcagtgcccactactagtccatgcaacaaggctagaggttagaaaacttgccttagggcagactggccacaggaaagggactgttgaagggaccactggaagaccaggtacctctagcagcccagacccatgtatagggcagctgatagagtgccagtggcccagcatctggggggtggttagtagtgatcatgagctcaacaagggcaaagcccagggggtccatctgtacctgttttgcccatcagataccaattgggaactttatcttctcttgaaaccatagcctataaccaggtcaccatgattaatgtgcatataattagcaaagtacagagaagccatagaaattccctgtgagaagatgcaaaactcagtgtgggaaagcagagtcctcaggaatacacggaagtgggaggaacccggggcttacctcacacatcttggccatagccgggaatatcacaggcaggccgacaactgtgtgacaaagggctgtcttctaatcacacaaccaaatggcaggagaaccaccctttctccatcgcctgcttta

SEQ ID NO: 267137 - DNA, 779 bp, Homo Sapiens
  misc_feature (508)..(508): n is a, c, g, or t
aattaggcacgaggaaaatatttctgacaggagccttaataattccacagagaaggagcaggaagtattatcgtaaatttttagcaaaaacgcaaaacttcacagggaacaagaacaaacaaaattacttgggggtaaatgaatgttaaacgatgatgaattcccaagtatatgactgaagcattcataagtttagtcgtagaaatttggaccataaacttaaaggccagatgttggatatgccttcatgtgaaattgtcaaatgtaagaggcacatcataagacaataatataaaccaatgaatatatggggggaaatggaaaagagcaggggcaattaactgtgtctgagagtgtgtagaaagtgggaaaagcataagatacatacctcaaatacacagaataagccaataaagccaatgaactggaaatatctttcaggaacaaagaacagataatttctccaatgtaggtccatatgtaggcattaatggctagaagctggggnaggggagggtctcagatggacccaggaccagcatggagtgaattgatcccagcgagacaagcagagactgtagcacatgcagaactatcaaagtgagctcaggagtaaccagcaggttatgggacatgcacaattatcaggggcttgtggcaggaaccaaaaaagtgtggatgagcagatggggggatgggatgctggaaagagaataacataatagtcagaggagttcaagcacatgggaccattcaaaataaaaaatcaagtgaactgt

SEQ ID NO: 267138 - DNA, 806 bp, Homo Sapiens
  misc_feature (751)..(751): n is a, c, g, or t
ccaataaaacctcaacgttatgactggtctgaatggtattgagagacattgtggtggcactgaggtggggatctgcgtccacacctgggccactggtatgaggagttgtgtccttcagggccagggcagtaaagtgcaggatggccagtgagttccccaaggggaagggcagtctcagaaacagatgcccctgctggagattattcctccagagccagccctgggagggacagaggttatcccaggaaaggagcctgggaattggcttacagaaaggagtggcctggtggccttgtgtaggacatactggtttgaggaaggtcctcccaatcccactctggccagttcattaggaactacccatctggctgctgctcctccagggatgttctaagcaggcttttctcacaccctggggtgatgacctcactcaccctggctggaggcgaggcttcaggacagcacagagttcagacaccaaggcctccaggcctggaggagacaaactgctccagagagtggattcctctgaagggagccatggaacagggctcagggtagaacccacctgtgaaaggtaataaaaagctttcgtttctaaaaatcgtttctaccccctgcgctggtctacacccatccttggggcctcaccatgtacaaggaggtatgggtggtgtcggccaagtaggcactggctggtccatctggagcttccccaactggtttcttcactttaaaaaacatttcccgncacctgcaggaaaaaggcccaatgaaccccagatccagagtccaaaaacccccct

SEQ ID NO: 267139 - DNA, 690 bp, Homo Sapiens
  misc_feature (234)..(373): n is a, c, g, or t
  misc_feature (469)..(534): n is a, c, g, or t
  misc_feature (628)..(628): n is a, c, g, or t
  misc_feature (668)..(668): n is a, c, g, or t
ataaaatccttgttgtcttgggaggcaaagatttcttaggacacaaaacccactaactgtaaaaaaattataaattgtattttatcaaaagtattctcttttgtttttgaaaaatgccattaaggaaaaaaggagattgtgagttgtggggacagttgggaacttacctacctgggctgtccacggcttaaaatgatatagccacttgacaatttcttacaactcaggaattcnnnnnnnnnnnnnnnnnnnnnnnnnnnnnnnnnnnnnnnnnnnnnnnnnnnnnnnnnnnnnnnnnnnnnnnnnnnnnnnnnnnnnnnnnnnnnnnnnnnnnnnnnnnnnnnnnnnnnnnnnnnnnnnnnnnnnnnnnnnnaagcaagaattgccctataatgatggatgagtggtgacctgtgatctgggtagccatgggagaattgactacataagggttccagggaactttggnnnnnnnnnnnnnnnnnnnnnnnnnnnnnnnnnnnnnnnnnnnnnnnnnnnnnnnnnnnnnnnnnntgtccattgtgtgaacatgaacattgcgtgaacacctaaataaaattcatttttaaaacaatatttactgatccagcactagaagctaagcctnctgatttctaacacagtatttatttttacttgcccctttnccccaaaataatattggctcct

SEQ ID NO: 267140 - DNA, 667 bp, Homo Sapiens
  misc_feature (105)..(105): n is a, c, g, or t
  misc_feature (176)..(176): n is a, c, g, or t
  misc_feature (199)..(223): n is a, c, g, or t
gaaaggaccaagttgaaatagaagtagaaaggaaatcaaaagttttattttgagcataaaaattctgaaatgcctatgaaaaatccaggaggagatgtaaatacncaaagtgaatatatgaatatgcaattcaggctagaactctcatccaaagatacaaatttgaaagtaatgancataaaaatagcatttaatgccnnnnnnnnnnnnnnnnnnnnnnnnnggaagaaggtaaagcacctgacaataagacaaaggaggaattagtaaagcaacttgcagagaagtggccactgaggttggaggaaaaccaacagatgttacggtagccattcacagaaatgactattgtattcaaaatactcttcacactttacactctactgttgacacataggacaagggcaacttacctatcagccctaacagaaaaccagaggaatccaagttttacaccacgtgggctactgtactctatacaatatattgctaaaatttctttcagcatttaaaacaaaaaaagtatgggaaaatgcaaactctctcctggaacagaaataatatattcagagcatctaacactgtctggcagataggaaagctcaataaatgttactatcatagtggttatttagaaaactatccaatttttgattttattatttac

SEQ ID NO: 267141 - DNA, 1281 bp, Homo Sapiens
  misc_feature (775)..(789): n is a, c, g, or t
agagagctagcaccatgagtaccctgttgctcgagcctctaacttagacttaattgccaaactagtctctgtctggtctccacacactcctccccactcacaccaagttcatgtctgacacactcgtttttcctagtcctgattcctatctcaccccactctgagatctttcagaccttggaattcagaattcagatacaaaaccaagcatctcagactagatccctgaatatcctgacagtgaccattcacagattagacctttacctatttcaaacaataaggacctccttcataccatgtgggccttgcagagacgtgtgcctggcattcatcctaggacctttcctggaaaccaacagctcaattgttctgggcattcccttactgctaggacctgcctagacctccctgtcaagtgtagtctctgggaagcagtcatctgccattctttaaatggcaagttctgacaagaatggtcctaggccctacagaaaacacagatctgtacaggacatgattcacaccttccagaagcttatgctccagagaggaagctaagataactacaacaagactcaataagtactaacggcttaaagaagcagaagaaagaggtttatttgtatttttttgtatagtacttgagcagggccttaaaggataaagattattttaatgcactgagattgaacagtgacatatggaaaatggacatttaaagtggtgagaaaagcatagagtggagaagccagaaagggtacaaaattttccnnnnnnnnnnnnnnncccagtaagttgttagatatgactaaaatgtaggggaatatacaggaaataaataatctagaaagccaggtgaggatcaagtggggctccatttagtggcagagtgagtcaggcaatatggtacagcatttggtcgttcctttattctcatattctgcaattaataaaaacttaaaatatttttaaagcataaacttggatatttgttttgataagaaatacaatcctccagactcaaaaagaaatctaaatatctgacagtggtgatccaaagtgctttctaactgtggaaagttggcaaataaacctggcacctccaagcaaaaataagaagcatctcatttagctacctatttctaatgactgaaaaattgaccttccttccagtagatgaaggagttactactgtgcagcagttatatccataaactattaataaccaaacactcaaaacaatgtagatttttttaaaaactaacacatagagctaag

SEQ ID NO: 267142 - DNA, 779 bp, Homo Sapiens
  misc_feature (382)..(622): n is a, c, g, or t
aattcggcacgagcggcacgagctgggcgtgtgcttggtatcgttccctcagaacactcagtggtcctggtttcagtaagggtttgggatcacatacaacttggatttgaatgttaattttgcccattaaaaatcagccgcctttgacaaattactccatccatctcacacctgaacctcagtttttcttctgttaattggggcccagctgggtgttgtgaggacctgatgttaaaatgtaaaaagtggtcaccctggtacttgggcatataaatggaccctaaacaaacagtctccatgattgtggttttgagcaggttattttatctcttcaggtttccatctgcttacttttgtttttttcgagacacggtcttgctgnnnnnnnnnnnnnnnnnnnnnnnnnnnnnnnnnnnnnnnnnnnnnnnnnnnnnnnnnnnnnnnnnnnnnnnnnnnnnnnnnnnnnnnnnnnnnnnnnnnnnnnnnnnnnnnnnnnnnnnnnnnnnnnnnnnnnnnnnnnnnnnnnnnnnnnnnnnnnnnnnnnnnnnnnnnnnnnnnnnnnnnnnnnnnnnnnnnnnnnnnnnnnnnnnnnnnnnnnnnnnnnnnnnnnnnnnnnnnnnnnaagagccactgaacctggcctccatgttctttatacgtaaaattagagggtttaattagggcagcaattctctaacattaatggtcatcacaattacctggagtgctgttaaaacacagattactgggcgcagatttgataatttatgattcagtgg

SEQ ID NO: 267143 - DNA, 299 bp, Homo Sapiens
  misc_feature (21)..(21): n is a, c, g, or t
  misc_feature (28)..(28): n is a, c, g, or t
  misc_feature (36)..(36): n is a, c, g, or t
  misc_feature (44)..(44): n is a, c, g, or t
  misc_feature (57)..(57): n is a, c, g, or t
  misc_feature (169)..(169): n is a, c, g, or t
aagtgaaccccttcctgcccntcaaccntccccgancaagcctnggacctaatgggncacatgccccaccccatgcccctagcctaaatccttgtattccttttccagaagacagggtcctaacctatattacgtggtcctcaaaactccccggacctcaaagtggttnctccccacctcggccctccccaaaatgtcgggattgcaggcaagagcccactgaaccctggcctccatgttctttatacgtaaaattagagggtttaattagggcagcaattctctaacattaatggtca

SEQ ID NO: 267144 - DNA, 848 bp, Homo Sapiens
  misc_feature (75)..(178): n is a, c, g, or t
  misc_feature (236)..(236): n is a, c, g, or t
  misc_feature (246)..(298): n is a, c, g, or t
  misc_feature (392)..(392): n is a, c, g, or t
  misc_feature (527)..(527): n is a, c, g, or t
tggctcaagcaattctcccactgcagcctcctaagtagctgggaatacaggtatacacgagtacacccagctaannnnnnnnnnnnnnnnnnnnnnnnnnnnnnnnnnnnnnnnnnnnnnnnnnnnnnnnnnnnnnnnnnnnnnnnnnnnnnnnnnnnnnnnnnnnnnnnnnnnnnnntgttatacgtgtgagcctctgcacccggcggcaaaactggcttttaatcaaccttttnggctaaaggnnnnnnnnnnnnnnnnnnnnnnnnnnnnnnnnnnnnnnnnnnnnnnnnnnnnngatattaaaatgttgcctcatcctacccagtaagtacttgaatttgaattctcttccctttcatttttgcctgcaaactgaccagtcttttccngagttcatctctttctgtacgttttgtcaagtgcagtgaacagccaactacaaaaatatttggtttttctgtctttttctttagtaaagggtagatgatctgcctttcaggttatctcaaggggcagtttcaccntttccataatataaattaccctttgtgtaagttatttcttccatcgttctgatagcaatttcctgaatgcctgccagctaaccattaagccagtgttcagtattttagcattttaaaaaacaagggaccaatttctgtgtcagcatgggctagcttgccattgaataacaaaggcaaaatctcactgtctcacacaacttttctattgcaacttgcctagggactttggtttagatcataggttggccatgatcaaactatggtccatgggcaaaatctgtctagctccttatttatctaaataaagttttactggaatat

SEQ ID NO: 267145 - DNA, 737 bp, Homo Sapiens
  misc_feature (12)..(12): n is a, c, g, or t
  misc_feature (103)..(103): n is a, c, g, or t
  misc_feature (111)..(111): n is a, c, g, or t
  misc_feature (138)..(191): n is a, c, g, or t
ctcctttcatantgagtcccaaaaaatgtttcaaagaccggattgctctaaaaatagcaacatgaggcaccagggaatgagtgctgcatgccaggccctgtgntaagctcnttgcataccctataccacagaaacttnnnnnnnnnnnnnnnnnnnnnnnnnnnnnnnnnnnnnnnnnnnnnnnnnnnnnnccaatgaaatcatcatggtagaattgatatttgcacccattcattccatttgaccaaaccatttattaaaccaatttgtgtccaggcatgatggcagatgttgaggatgtccatgatgaatgaccagagctcttgctctcacagaagttggccattctagatggaagaagaccttttctcacctgagagccatgttcttgacccactgtatacattctttgtggtttttaaagtacagagggacagaaatcaacacaaatatgaatttctctagaattagttcatatgagagtgtttggttataggaacaaggctgtctgtaagataccattcttcaggtagagaaaagttgacaaagcagaaaagaaaacctcttatgcaaaaagttaaccttctccattttgcaaattggcatactgtaagtctaaaaccattgctaaatacctgacgtgggcctggacctcaagttgttaagaattcctttgtaggtaaggaggatgttctcccctaccttgggtgtccagttgaaaaagaactttgcttttc

SEQ ID NO: 267146 - DNA, 439 bp, Homo Sapiens
  misc_feature (388)..(388): n is a, c, g, or t
ctttatcttgagtttcatgtcttagggttggagaagggaccaagcctcccctgaaagctgaggggtttatggtcaagaagaaagagtaactatggccacctttaggtcaccagccaataatactgcttctctatcctgttctgctgtgacatttgtcccagcaggtgttccagtctgtcctacagtagtgagaccacctgatatggtgaggaaggcaggtaattgatcttactccatcatatcatcacatctatttccaccccccgcccttgggagacaaggtctcactccatccatttaggccgggaatgcagtggtgcaatcataggctcattgtagtctcaaacacctgggcccaagtgatcctcactgtagtcttcccaagtangctagggactacaggcacatgccaccacaacctgggttaattaaaaaattt

SEQ ID NO: 267147 - DNA, 864 bp, Homo Sapiens
  misc_feature (27)..(27): n is a, c, g, or t
  misc_feature (354)..(369): n is a, c, g, or t
atgaggccgtcctcactctcctctctnccactctccacagcttctgcagatggcctcccctctctgcgactggttccttatcgaggcaatggagatgtggactgcggtgactgatcaagcctcacatatctactgaatcaggaagcccgaagcctgaggctcgccgagtggccccatgggagcgtcgtgcatttttctggtcagtcagtcattaggggaaacgatgaatgagccaggccagcatgagaaggcctgcatgctatcggatctttttcctgaaaacatcgacatgggacatgttcaaaccaaattttctttataagttattaagaaaatcagggcggaggctaaacnnnnnnnnnnnnnnnnggcaatgctgttgagaatattacattatgttcccacaatagcataaatgtatgtcttatcacttgaatggagcccagacaataaaagggcgcctgagagtggaaatacgcctatgagaaaggccaagccagccttttcgtgataacagcagcagggagggaagagtgcacagagctgaccacagcacaaatgtcgcagacccttgaggacccgcgccagggctcagagctccacccaagggcttgtgatcctcaccccagccaagttccttcagaccccagggtcttcgtttcgtgacttataaaatgggaattatatgtcatgggagtgttggggggaaaatgcaaccattagcaaatgctttcaaatataatatgtattatcaatatcaggtaaaggtaacattttatttcctagggccgggaatttgatttttgttttcccgtttatttttatccatgttcaaccacccacaagtgtgctctctcaaaacgc

SEQ ID NO: 267148 - DNA, 442 bp, Homo Sapiens
aatactttgttatatttccagcacaagaaagtgatggtacaaacactaagagaattcagtagaaacagcaggatttaaagtagcacacagagatctttgtgcatactttcagttcaaagacagagtggaagagatgacccatttttaacagcaacaaaaagataaaaatccccatgcgtaaaagaaatgtgaaaccctaaatgggaaaaactttaaatagaccataaagacaccaaagtccgattttaacaccaccatggtttgaatgaattccccaaaagttcatgtgttggaaacctggactccaatgcagcagtgctgggatgggattctggggaggtgattggctcatgaggactaatccattcatggactaatgggttctcagggagtggagcagttatcaccagggggctggttataaaagcccagctttgccgtc

SEQ ID NO: 267149 - DNA, 596 bp, Homo Sapiens
  misc_feature (581)..(581): n is a, c, g, or t
ctgagctgtatgtcctgaaggggggatacaaggagttctttatgaaatgccagtcttactgtgagccccctagctaccggcccatgcaccacgaggactttaaagaagacctgaagaagttccgcaccaagagccggacctgggcaggggagaagagcaagagggagatgtacagtcgtctgaagaagctctgagggcggcaggaccagccagcagcagcccaagcttccctccatccccctttaccctctttgctgcagagaaacttaagcaaaggggacagctgtgtgacatttggagagggggcctgggacttccatgccttaaacctacctcccacactcccaaggttggagcccagggcatcttgctggctacgcctcttctgtccctgttagacgtcctccgtccatatcagaactgtgccacaatgcagttctgagcaccgtgtcaagctgctctgagccacagtggggatgaaccagccggggccttattcggggttccagccattcttcatggagggggagagggagaacgggagggggattaggaggaagtttacacaggaattgttgttnggccaattaggcttg

SEQ ID NO: 267150 - DNA, 1121 bp, Homo Sapiens
  misc_feature (461)..(471): n is a, c, g, or t
cttcaaccactgggcaagccctgtgaaataaataaagggcaggatttttgtgccctttcttgtctcttcacctcctctaataactcttgtccccttagagacgtcctgacacatctatacctctgcccttcccctggccatgatgcaccaggctgattgcagcgcactgtgaatgatggtccactttctccatttcaaccctgcagcacctttgctgagatcttttctaaatctcagctgctctttcaaccaaaatgcacctgcagaaacaaaactttcattctctcaagttaggtaaactgaaatataacttaagactctaatggctaatgtagcttactatattagcttactaagaagaccctaacattttttcatggactgcttaatgcttttctctaaataaatgaacaatatggaaatttcatgaattctgagatattttaggtctgacatgggcnnnnnnnnnnngacacagggtcttgctctgccactatactctgacttgggatgactgagtgactctctccaaaaaaagttaaacaaattaattattatttatataatgtgttatacatgtggcatgtgtggattttccatttttttctgatttacatctgtggagaaaaaggaattactattcaataagtgttattaggctagatgcctatccatttggaaaaaatgatgtcagagacctaccacacaccaaacacaaacatgaaatctccaaatggaccagaggcctaaacataaaccagtccttggagggaggggataatttgtgcctcccagtcacacattttcccttctctgccttcagtgtatggatatcactggcaatgctgctcatcaacccagcctagcaggtgaagggcaagaggaacaggctagacagggttgccaacaagtggtccatacaattcagaccataccactggggtaggtatctggtaggtaaatataacataatgcaaaggtctttctaatatgactataactgctaatgcaaatggttttgtaatattaagaatagctaatatttactgctcattcaccatgtgctagtcactgtgttaaataccttatatgcattagctcaatgaatttgttaaacatct

SEQ ID NO: 267151 - DNA, 721 bp, Homo Sapiens
  misc_feature (272)..(288): n is a, c, g, or t
  misc_feature (639)..(639): n is a, c, g, or t
  misc_feature (692)..(692): n is a, c, g, or t
  misc_feature (710)..(710): n is a, c, g, or t
tgaccttcatcatactgcacagatgagaaaacaggaacttacaaaatccttacaaacttacagaagtagttaaaaaatagttatgacagcagaacaaagaataatagtacggggaaagaattcaaaagggggaaactgataagaataacttgtttttctcatccctgctcctggaacccattccttctgcccccccggctctgctaatagtgctgtcaaagccctgacagagccctgccttagagtgagacagcccaggatagaaaacttgnnnnnnnnnnnnnnnnnattttacatctcctgcttcattagcatatattggttttatttttttcatttgtttcaagattctactgatcttcagatgcattattttattttcagacatttacaattttgtactgtgagactgtggggctttttgaaatattctggcttacctgggctttcactaacatctctccaacagagaaagggagtgtaacagtgcagtaagggagtgcttgttacaccctagtggggttgaaagtcctagttatctactcagtcttctctgacacgatatggtgggaaggttgtggtgatttgttacaccctggtgaaggtaatctttttgcttccccacaaggtgtttgttgncatggataatggttgaggtcatagtttttttccatggtgtttagctaaagtanagccattagggcccgaanagtttctgttc

SEQ ID NO: 267152 - DNA, 380 bp, Homo Sapiens
accccgggaaattcctcctgcaaggcccaacagcacaggctgccccgagctgctgttcggtgcccccttgcttgcctggattgtaaacaatgtgcaggcagcagttatgcccccgttagtcacgctcctcattcccaagtactaacgtcacagggtgtggcatagtgcgggcccttaacaaacatcctaattttgactcaaaattccacatgtggaatttatgggtcccaggaggaggaaacagttagaaagacaagaaaacagaagtacataaatgtatgtgaaagagcgatcaagaaaaatttttttctaggtaagttatttttctaaaaaactgagataactgtagattcacatgtagttgtaaataataatacaga

SEQ ID NO: 267153 - DNA, 735 bp, Homo Sapiens
ctccagggggcagcatcgtgacctctccctctataaaaacatagagacactggcaatcacgcagaaggctggcccttggcagccacgtaacacacatggtttctcagccaaatacactaaggctctaaagtcagctgcctcagaggatggctgattagattcagcagctggtccaggaggtgacagctgtggatattcgtgtcagctaagagaactgtcagttttcttggcttccttcttgaagatggtcatgggcctggcagctcaaaaatgctgcactattgtcacaccagtaaaagcccaagatgtggtcagcttgacagctctcttgctcattgcttcagtttcaaagttcttactttgctgctgcctctggccattggtagattgccgtttataactgaggaggttttccttgtatgccaacagacctcctaagtgaaatggagtagccccctggtttccttagaagtgactgaactgtgactgcccattttattaaaattcctccacatccatggcagcacttttacccttcagcagagctgtggggatatatgttggtccagtttggtaaaggggaaagctctgcactaaaagtgataaatctggattcaattctgtctctgctactcatttcttgtgaaagccagttcccctaacctctctgaaactctgttttgtaatgtgtgtaatgagcataattacagattacgctcattaccatatacagac

SEQ ID NO: 267154 - DNA, 286 bp, Homo Sapiens
tgagtaactggtactacacgtgtgagccactgtgactggttcgattagggttaaatttatttcaatacccatattgtgggaaaccaggaatttgcttgcttgtttttactacatttaaatttgttatggaaatttaataatctctacaaatacagacagagcagtgcaataaattttcatgtacctcatgaaaatacctcacccaacctcactggttatcaactcatggccaatcttgtttcctctataacctcacccactctcttctcctatattatttttgaaa

SEQ ID NO: 267155 - DNA, 695 bp, Homo Sapiens
  misc_feature (275)..(275): n is a, c, g, or t
agcacaaaagaaccacagatagaaggagcagctactctccttggtgctgagatagagtgccaaaggaagaggctcccactcactcatcctcagggctgagatctggccttcttggaaagggaacaacggtgctcactgagtggccgagaatttgctgtggtatgtcaccagacgaacttgcatggtatttgtactcccatgtgctggggaggtatcttcatgggagacttcacacaacagaaccgtttgagagagtctcttggagcaggctgctnggccaccgagtactttaggatgctgggcactgcaggagcatgctgaggggatgcaccttctctcctacagcgtctccccaggaccctgtactgaccatgctgcatgccctctgcctctactaaatggctccaaacagctgcaatttccacaacccaaagttttttaccttgaaacagcatgttactccttgcctaatcctaattgagtgtgtattaatcggctacactggtcacacatttgattgggtaagaccctaaagtaggctctgcttaacagtgagtccgttcatgtgacctataaaatctctctcagagactcctttccagtccatctttgtcagctgtcttgtctagagctttcaactagctcatagcctccagataacaaggtcattacctttagattaatacgtgcaagtt

SEQ ID NO: 267156 - DNA, 642 bp, Homo Sapiens
  misc_feature (168)..(244): n is a, c, g, or t
gcgtcagagcagagctcagtaaaaaggactccatgacgaagagcaacctggcacggatgtcagagcccagacaaggtaaaagaagtgtcaatgctgggtgcggcgccatgtggtggcctggtgtgtagtgttgagtccgagctggggaaaaagaacatttcttgtttnnnnnnnnnnnnnnnnnnnnnnnnnnnnnnnnnnnnnnnnnnnnnnnnnnnnnnnnnnnnnnnnnnnnnnnnnnnnnttgaggtcttccggccagttgaaacgcgtttaccagtaagcaaatttaatcttcgtctcaccatcttcagcaaaatcttccaatacctctttaacatttttctctaatcgcctaacttcagtatttgtaagttgttgccttaaagtatttgcggtgatagcaagcatgcgctgtatacgccaaaacaagaccacatcattgcattccaactcagaatctacaaaatgcctttggtagtaataaaaacctcttcgacaaaggttacaatggtttagagctgtttttaaaaaatgtcttctataaacttgatgccaagtatccttaatcaagcttggatctacttctactcctcgggattcaaggttcttccggactgtggttatttcatcacttgcaag

SEQ ID NO: 267157 - DNA, 891 bp, Homo Sapiens
  misc_feature (257)..(395): n is a, c, g, or t
  misc_feature (511)..(520): n is a, c, g, or t
ccgcaatgggccaacgctggggccaaaaatccacaggtttctctctccatccctgctggtttctagtcccccctccccctcttccctcccaggcttaatcatattttggaacgggtgaggtcttttgttgggtgggcaccccctgattgcttgtctgtttattttttaatgtgcaactaatttgatttgaatttccttcagtttccaggccttcctagggaaagctaagggagagggaatatgctttttaaaaatcnnnnnnnnnnnnnnnnnnnnnnnnnnnnnnnnnnnnnnnnnnnnnnnnnnnnnnnnnnnnnnnnnnnnnnnnnnnnnnnnnnnnnnnnnnnnnnnnnnnnnnnnnnnnnnnnnnnnnnnnnnnnnnnnnnnnnnnnnnnaaataaatgtggcaggaggtggggcgttgggaatggggaggcacggtggttgtgggcaaagagtcagaaggagcagacagacccggaagaaaaggaatctgctctggaataacacnnnnnnnnnngaggcctcaggccttgggcaaaattgcttcgctctgtaatgatttctgctgccggagttgctcctccacccctaagttaaagctatgaacctgggtgcccgggcaacgccccacagtggatagcagccgggagcgctggttttgtgccttttgtgggggcccttggttccccctcattggaggctgactctgaaatttactggatcagtaaatttcctggctccctgggagcagctgttaacgaggataaagtctctgggcatgtttctggccctgcaaaaggacctcacccatgaaggtacaattctcactttgtttagataccagaggggcacccacaggctggctgagaatgaggcatagttgattaa

SEQ ID NO: 267158 - DNA, 789 bp, Homo Sapiens
  misc_feature (20)..(20): n is a, c, g, or t
  misc_feature (182)..(319): n is a, c, g, or t
  misc_feature (327)..(347): n is a, c, g, or t
catctgtaatttaaactatnctcaaaaccctatttttgaaatcaatcacttaatgtttttccttatgaccctcatgttgagataaaatgactaaatactttggttgactttaaatatcatttcttatttcttaaacaccctaccaataattaatctttcctataagaataacgttggcctgnnnnnnnnnnnnnnnnnnnnnnnnnnnnnnnnnnnnnnnnnnnnnnnnnnnnnnnnnnnnnnnnnnnnnnnnnnnnnnnnnnnnnnnnnnnnnnnnnnnnnnnnnnnnnnnnnnnnnnnnnnnnnnnnnnnnnnnnnnctgtctcnnnnnnnnnnnnnnnnnnnnngaatagccttggcctatgacaagctgtctcccaaagacaacccgtgattagaaaagcccagagcaaaggcaaaatatttccccaccccaagtacctcctttaaaaatgaaatgccatagacccatatccttcaaatgcatttaagaagttttcccagctatatccttgatattttggctacaatggattattgtcatataacccttaatattgggacagtggtgcctgttgtacttatttgtttcaataaattttgtttcctcattgtttgttacaggaagttcaatttgaatttcttcatcagcattataatcaatcttattgtaattaactcaacaagtatgaaagaattggcagattctgttggaattaggaaaaatgcatctgttttcttccttttatgggctgtgatagtaaaataaatggtgattatattttgtta

SEQ ID NO: 267159 - DNA, 670 bp, Homo Sapiens
tttcggcacggagacagtatgaaaataagaaaaaatgtattgcagttttaaaagaaagaagaaaatatgtatgactttagattggagtctcaggaaagttctgaaaagagggtggacaaaaggcttcagtatccttagggcacagtaaatctatttattcctccaccaacttgaagcctaaagccaaaactgtcatgctgtcacatagacaaacttcttcaagacgtaaagctgaacttctcctaccttaaaatgaatgcaaactaccgaggaaataggcaaaataccgagaaattaacaaactgaagagtatttttgcattttcagtacctcttaaccacagcgttttagagctgaatttgaagataagctgagtaatttaaacaggataaaagtgtcattttcagattggatagagcaggaaaatatatggcttttgttttccttctggttgttactttttaccgaatctgggcaatctatctaaagaggggtcatagttctgacctctggctttgtgagcatattattgcacgcacggtatcaattggtcaccttcttttcctagccagcccttgaagctgtgttggtggcctgtgaccttccaatgcaatctagactgtggaactcactgtgtactgcgatccatgggcaaatggtgtgtgcagga

SEQ ID NO: 267160 - DNA, 822 bp, Homo Sapiens
atcttttggaggagaggcagactctgcttagaacaggtggtttgtgttccctggttctcttgagaagggggaccacccataccagtctgtcttaacattttcttcctttctttctttcccctaataacagccagttttgggactgttaccccaaaaaagtttactattaaagctcaatatgaagccagcgaggtgaaattttagggattttagatgtatctgaagctacttctcagcaatatctccccagcctcatccttttcctgttgtctctttatttccagaaggcactggtgttattaaaattgtgtgttggaaggtgtttttctgttttctggaatcttctttctctggaaaatcatatgtaattgctttgtggaagtcttactttgttttctctcagagactggtggaactagagaatgctgagtctggaggagacggaggcaggagaggagggaagcaggataacgttgcctggtggaggcggatgcagaaggggggacttcccctgggatgacgaggatttccgcagtctggcccttttgggggacaggcgttgccatgggatttttctacctctattttcgtgatcctggaagagaaatcacgtggaagcactttgtacagtattacctggccagaggtctggtggaccggctggaagtcgtgaacaaacaatctgtgcgtgttattcctgcccctgggacctcttctgaagtgaggggtgaatttaaggctgagtattgcagacataagtttatttcgtgtaaaaatgtagttttctatttttttcagtaaaatactcccttagtatccatc

SEQ ID NO: 267161 - DNA, 464 bp, Homo Sapiens
  misc_feature (253)..(253): n is a, c, g, or t
  misc_feature (412)..(412): n is a, c, g, or t
gacgccgcctgggcaacggggtgcagtgcctggccaagggctggggccttctgggcaggaaccgtgggatcgccaacgtcctgcaggagctcaacgtgacggtggtgacgtccctctgccgtcgcagcaacgtctgcactctcgtgaagggccggcaggccggcgtctgtttcggggactccggcagccccttggtctgcaacgggctaatccacggaattgcctccttcgtccggggaagctgcgcctcagnggctctaccccgatgcctttgccccggtggcacagtttgtaaactggatcgactctatcatccaacgctccgaggacaacccctgtccccaccccgggacccggacccggccagcaggacccactgagaagggctgcccgggtcacctcagctgcccanacccacactctccagcatctggcacaataaacattctctgttttgtagaaaa

SEQ ID NO: 267162 - DNA, 850 bp, Homo Sapiens
gaaccaaattatctccatcttttggtggaatggtgcccagcaaaagcagggagtctgtggcatctgaaggctcaaaccagacaagcggctaccagtccggatatcactccgatgacacagacaccaccgtgtactccagtgaggaagcagaacttttaaagctgatcctttattcagaataccacaaagaaaggacattcagctcaaggctccctgccgtgttgaagagttctgactgcacaaaccagcttctggtttcttctggaatgaataccctcatatctgtcctgatgtgatatgtctgagactgaatgcgggaggttcaatgtgaagctgtgtgtggtgtcaaagtttcaggaaggattttacccttttgttcttccccctgtccccaacccactctcaccccgcaacccatcagtattttagttatttggcctctactccagtaaacctgattgggtttgttcactctctgaatgattattagccagacttcaaaattattttatagcccaaattataacatctattgtattatttagacttttaacatatagagctatttctactgatttttgcccttgttctgtcctttttttcaaaaaagaaaatgtgttttttgtttggtaccatagtgtgaaatgctgggaacaatgactataagacatgctatggcacatatatttatagtctgtttatgtagaaacaaatgtaatatattaaagccttatatataatgaactttgtactattcacattttgtatcagtattatgtagcataacaaaggtcataaatctttcagcaattgatgtcattttattaaagaacattgaaaaacttgaaaa

SEQ ID NO: 267163 - DNA, 1092 bp, Homo Sapiens
  misc_feature (14)..(14): n is a, c, g, or t
  misc_feature (38)..(38): n is a, c, g, or t
  misc_feature (44)..(44): n is a, c, g, or t
  misc_feature (68)..(68): n is a, c, g, or t
  misc_feature (75)..(75): n is a, c, g, or t
  misc_feature (96)..(96): n is a, c, g, or t
  misc_feature (117)..(117): n is a, c, g, or t
ataactaaatactntggttgcgggtgaactggttgggncagggnagacaaaaggtaaaatccttcctnaactttncaccacacacagttcacattnacctcccgcattcagtctcancatatcacatcaggacagatatgagggtattcattccagaagaaaccagaagctggtttgtgcagtcagaactcttcaacacggcagggagccttgagctgaatgtcctttctttgtggtattctgaataaaggatcagcctgggagacaaggagccagagctgcatcatttccttcctggggcttggccaggagacacgtaacggtctggaaggaactctcattaggagtcagaaacagcacaacgaactctactttagcccaactcgaagaacacgcaaccttctaaaaccagaaaccccgtctgaaccctttacatttcagaacagaccccatgcccacctccaccagagcaaacacaatgcatttgcaggctccagtactcttccaaagcaaggtaacgttagtcttcctttctatcaatccggaattccacacttaaggcttggcttgggacccacgtcctaaacaaagcctcttggatagactcagccctgcaaatccttcccatcttcaacacctcgaacacttacattgcctggtttatcttctagttttacagaagtgtcagctccccaggtactgctacttctttgaggatggggccatttcttgaacgtctttgttctaaacccatggtgagacccgcagcagggggcatgataaatgctttttaaatgaatgaaaaagaggatcaggtcaacactgggagaagacacagacacattcttgggtcacaagcctcttccaggatatgcctagaagactggctccctgcagtccgaggtcctttttctgttgtcgaaatgaaaatcaaatgcggctacttcctgctggtggaaagaacaacacttgaaaatctgagcagcacctctcatgtgatgtccgggagttgggggtgtggatgcttccttttaaacaggaggagagctcagtgtggtccccgagtcaggctggagaatctgggctgtgcta

SEQ ID NO: 267164 - DNA, 356 bp, Homo Sapiens
acattactgggcaaacaggaactgtagataagataaggattaacatttttttccttttaaaaatgttaatcatcttagatggaactttttaaggcagatgacaaaacttacttagcttattaaattgagtgcattactatttaataatgtctggatgaatcaacgtaaatattatgaagataaaatattttatatacaaggcgtaattcagtgaatctacaggttcagcctaatatggtaagtacctgctactgaaacaacaaaataagacccctgtttgagaaagggaaatatgaaatcagatatatgagttcccctttaagaatggaaactgggttgggtgtggtggtttatac

SEQ ID NO: 267165 - DNA, 577 bp, Homo Sapiens
  misc_feature (380)..(405): n is a, c, g, or t
aaccaaaacatctaaaaatctttagctcattttataatgattaatcccttgaagaggaagagaatagatctttatataaaggcctagagacagataatcattcagtcatagatcatttctttttcaggttaaaggccttggatttttttaatttaaaaaaagagattgcactttcagccataattttttttatgtgtgcttgtgttgtcccatttctcagtactttttccccaaatttactggcacaacactcagataaggaactgactaatgtggcttattgatgccatccttctgtttttcaatcaggatcacattacttttatgtaatcccatacaatgtacttcttaaactaggtggacaagagcaggggttgttnnnnnnnnnnnnnnnnnnnnnnnnnntcacctgccgccattctatgattccagggctggctggcagggaaaataccagaaatgacacatagatttgtcctttgtatattttatttgcaggattggtttatattttatcgatcttaaatacaacatttggaccacaatttaaaatgggctatgcaaatattatatcttg

SEQ ID NO: 267166 - DNA, 604 bp, Homo Sapiens
aaccaaaacatctaaaaatctttagctcattttataatgattaatcccttgaagaggaagagaatagatctttatataaaggcctagagacagataatcattcagtcatagatcatttctttttcaggttaaaggccttggatttttttaatttaaaaaaagagattgcactttcagccataattttttttatgtgtgcttgtgttgtcccatttctcagtactttttccccaaatttactggcacaacactcagataaggaactgactaatgtggcttattgatgccatccttctgtttttcaatcaggatcacattacttttatgtaatcccatacaatgtacttcttaaactaggtgggacaagagcagggttgttccccccaccaccccccaacccaccccttcacctgccgccattctatgattcgagggctggctggcagggaaaataccagatatgacacatagatttgtctttttagtatttaattgccagattggttatagtttacgatcttaatacacatttggaccacattaaaatggctatgcaatatatacctgttttgtggttggtttgttggtttcttcgcttattcca

SEQ ID NO: 267167 - DNA, 779 bp, Homo Sapiens
  misc_feature (23)..(23): n is a, c, g, or t
  misc_feature (435)..(435): n is a, c, g, or t
acacttcaatcctttactccaancatgtgattagttctgcagcagatacttctgcttgattccaaattatatctctagaatggcattttttcttagcagctctcaccagctgctagtaagcatgcataagagataacagggaacaaggatgagagttctttgtgctaactcttatgagaatggaagaaagccaccttacaacttaggactgcatgaaaaaagaaatgctgaataaaacaaatcaaatgcacacagcagaagtttcataaatttcatgacaataatttaatgtaagaattattgttaagacttattgataaacatccaagctgagttgaattgaattgaactgaatttggttactgaattgagctaacacttgtcctgacatttcctgaaggctggcactttctctgaactccttaacagtctgcnactaagattgccagatgatctcttattttcttttatcctctacctcctctaccaaaagttgtccatagtatcaagagatgaagcccatgcaatatctggggacagatcctagctgacactcatgaattctgtatatgggaggtctgaatagggaatcaaggtctctgtttcacaatttttcccaagttcacagagaactgacacactgtttttaggagaacctcatctttttgagagatcagatttgtctcatctaagaacaagtctcaacagaaaggttcggacttcttgagaggtcttctaatgtctcaaagtagcaaaatgtaatgggcaaattcatgtac

SEQ ID NO: 267168 - DNA, 464 bp, Homo Sapiens
ccttctttaaccagagggcatagaattggggcttagtgtgtcctaaacaagctaaaagattccacctgtagaatcataaaatgagagtctcacacagtttcatgctactttttgtctcttcagcaaggaacggttgctgggattgtccagtgaccaggcatgtctggatagcttcacacatacacataatgccccggttcacctcagccccacacatgttctagaagtagccacttgccaagtgtcagtgttcagtctaaacagcaaatgggttaaccacatgaacagcactggcccatgtgagaatggtgtgaaggcctcctttgtaccattttccatttctctaactcacatgtgtagtctcagcactgcagaggacagatttgtttgtgccctctgagactggttggttggttggttggttagttttgttttatgaatcctaaaatttgtcttggtttttt

SEQ ID NO: 267169 - DNA, 1054 bp, Homo Sapiens
  misc_feature (23)..(23): n is a, c, g, or t
  misc_feature (166)..(179): n is a, c, g, or t
aattcggcacgagcggcacgagnacgagactatacccttcaatatccagcactcagggctcaaccatgtgttttgggagcaagggaatggggttcctctaggtcaggaatcggcaaactcagtactcaagccagatctggccagctgcctacaagctgataatggnnnnnnnnnnnnnnaaatggttacattgtaaactgttatataagtacctgataatatcattaattttgtttcttggcctgccatgcttaaaatattaactctctggccctttaagaaaaaaacgtgctgacccctgctctagatcaaagaaaacaaacctcaaaaatactttcctccctctaccccacttgacccttgtcccggggcagtaggcatctccgtcaaaactcttgtccctggtctgtggtaactttctcagctccccaacccatgtccctcaaagtcccctccctatagggcaagaacccagcaacttcgctctgccccgactctaggcgggatgtagctcattttgggatacgagtgtccatcgtggagcctggcttcttccgaacccctgtgaccaacctggagagtctggagaaaaccctgcaggcctgctgggcacggctgcctcctgccacacaggcccactatgggggggccttcctcaccaagtacctgaaaatgcaacagcgcatcatgaacctgatctgtgacccggacctaaccaaggtgagccgatgcctggagcatgccctgactgctcgacacccccgaacccgctacagcccaggttgggatgccaagctgctctggctgcctgcctcctacctgccagccagcctggtggatgctgtgctcacctgggtccttcccaagcctgcccaagcagtctactgaatccagccttccagcaagagattgtttttcaaggacaaggactttgatttatttctgcccccaccctggtactgcctggtgcctgccacaaaataagcactaacaaaagtgtattgtttaaaaaataaaaagaaggtgggcagaaatgtgcccagtggaaaaaata

SEQ ID NO: 267170 - DNA, 788 bp, Homo Sapiens
  misc_feature (385)..(385): n is a, c, g, or t
actcgagaggctgaggtgggaagatcgcttgagttcaacatagtgagggcctgtctctaaatagaaaagaaagatcacacccttacgattttattccaatatttaatctaggtgttgataaggtgaaagctaataattctctctagaacagtattatcttcactataaataaaagaataaaagtaaacaggagaaaaagagcaaaaacttaatgttttccacagattgacctttgctttggttcacatcaagacccagatgtccattgtggcatataggaaatgatttacatgtatacagcattactcctcaggtgggggtgcagtatctgtttgagttcttttggaaagcctgtagcataggggcccaccggctctccaaaatnaaaactgatgaaggcctttcctatttttccatgtacattaggatctcttaaagcaaagtgactctctggttgtgtaaaattgtataaccaaaaatcaacacccatattaaaaccattaaaggaaagattttaatagttaaaatcaaaattggctaaaacatagttaacaaactaggaaaatcaccattctagaaaaaaattaaataatgaactaaatttaagttttcaacttttgttttctacatattcatattctaaagaccatgggaacacaacagttgataaaccctatttaatattacatattaaaagccaactattcagcttccttttgacaaatgcggcctgaaaaaatagacaattttttcacccataaatctttttatctttaatttttgtgaat

SEQ ID NO: 267171 - DNA, 680 bp, Homo Sapiens
  misc_feature (625)..(625): n is a, c, g, or t
ctcaaggctcagctagacataaaagaggaggcccttttcctcatgtctcattaggtcatgtccagagttctacacatgtgtatgcccttctagatttctaggaataggtcagaggttttcaaagtgctgtctgaacatctcattcccctgattttccttttgacacttttaaagtcttgttaccttaattgccatctgctcaaaccccctcttcccaggtcggtcaactgcaaaattaaatagttgctatcatttgttttttgactaatgtcctagacatagggctattcacacagagtaaaatctacatcagattaatttaagacaagccctgagaatagagctttttcagggaactgtgcagatagggacaaatagtgacagtctggagatggggcatttgcagagcttcagacttattgtgccccctccagtggttgctaggttgctggttttcacagctgctgtaattgcaaggctactggttttccaggttaccaaagaacaggggagaaaggaatgtttaaattaaaacatcacaaagcatgttgctcttaatgagatccagccacttttcttgaataaacactctttggatttttccaaaattttagataattcctanggttcacaaaaacttaattttgacatttttggcaagtgcacttgttggttttatg

SEQ ID NO: 267172 - DNA, 479 bp, Homo Sapiens
  misc_feature (158)..(158): n is a, c, g, or t
  misc_feature (188)..(188): n is a, c, g, or t
cccaaagaaccaggggagaaaggaatgtttaaattaaaacatcacaaagcatgttgttccttaatgagatccagccacttttcttgaataaacactctttggatttttccaaaattttagataatccccagggtccacaaaaacttaaatttgaccanttttgggcaagtgcacctgtgggttttaanggaagactgattttccttttaagttccttattcctgctgttttagaagtgcatcccctcctattcaattttttagtaatatattttttctccacgaaaatttccaatacttttaaactatatgcaaatagtagttatagctgttttagagcttggatttgaaactattatctcgagtgcctatgatctgttttgtttgttacttcctcattggcccattttgttgtgttttgttttgctgccagtgttgtctttgctgaatcatttctacaaataagatatgttgagctgg

SEQ ID NO: 267173 - DNA, 545 bp, Homo Sapiens
  misc_feature (100)..(100): n is a, c, g, or t
  misc_feature (442)..(482): n is a, c, g, or t
gagattccctactcagattcagaacgtacacccttttaagatgggtctcgtatatattaaaaagagggagaaagaaaggacgcctttgtgaaagtttttnttttaagaaaagtacaaattaacttacctaatggttactaaatcgttacataaaatgaaaaaggaaataagcaagaggaaaacaaaatgctggttaatcacatcctctgccagttgccaaaatacaacaattgactaaaaattgagccctaatgagttgagtagtttcaaaagttaaaacataaaggaaggccactgaatactgagattaggctgggtattatgtgcagaaatgaaaacaagaatatgaatcaaatggagacagcaaaatccaatttgttattctaagaaagacatggaatgttacaagtaaaatttgctgtttaaattgagttaggcaatnnnnnnnnnnnnnnnnnnnnnnnnnnnnnnnnnnnnnnnnnctatcaattcttgtaagtatttattatttaaaaattaatttttaggccgggcgtggtggctca

SEQ ID NO: 267174 - DNA, 608 bp, Homo Sapiens
  misc_feature (20)..(20): n is a, c, g, or t
  misc_feature (32)..(32): n is a, c, g, or t
  misc_feature (61)..(61): n is a, c, g, or t
ctaccccccaatgaaaaacngaccttcccttngccttatcccacaggctcctcccaccaanccaggcccagactcctgcaatccataggatggcaacaccacctctaaagccacagaactttaaggctttgcttcggaagtggcaccatggtctcttcattttccctttcttcaaggtcagaaaactgaagctgttaggagttttagtgttaagttccttccgaggatgttaattaggcttcaaactgttttgttctgagaaataaaaactaaactccagtcattcaagctaacagttgaggtgttctatggcttcaaaatcaagtaagatttgtaaatgaattgctaggtgcaaccattacttattatatgccacacaaacagtggagaaaattatggacaccaccatccaagtgattgagattattaattttaggtagcaggccaattcagacatgtccacttatcctcaatggcagggggcctctcacatcccctccctgtaacccagttcaatacttctgtctaaagtctagaatttcaatgttgaaaggagagcgtggttagtgagagaaaatccacaaagtttatcctgatgatccttttct

SEQ ID NO: 267175 - DNA, 652 bp, Homo Sapiens
  misc_feature (31)..(31): n is a, c, g, or t
  misc_feature (34)..(34): n is a, c, g, or t
  misc_feature (71)..(71): n is a, c, g, or t
tgttctttaccagccttttcaggagccaaanaancaaatccaaccaaccaaaaaaatacccagagaaaaanctttccttcttcccccttcctgatgatgagtgagaagtattgagaactttcggggtcagtgcccttctaaactccccttcccccaataatgcagctgtataatgaatggtaaatgcaccggtttggattcaggcacagccccagtctgcctacaggtggcgtatgtgttcgtgttttaatgtattcagagccattgggcaataagcagtccagaacattgaaaactcaagcagacaactaaactggtaggtggcagcagaggaaggaattcttcagattgatggctactgacttaaagtctgcataggagaagagatagagcatgacataccaagtgaagcaagggggacaaaaatggaaacaggactaagattcctgcattttgactctaaatggttcttttgaagtaaccagtgatcttttttgcttaccctcatcaacagaatggatgaagatagatttgactgtgtgctttttcaagtggagaatatgaatatacagaacaagaaagcaataactccaacctgtttgattccgtctgttttctaaataaagacactatgcgctggaaataacataaa

SEQ ID NO: 267176 - DNA, 452 bp, Homo Sapiens
ctgaattcccaatgaagtgaagatgttggaaagacagaggccagctatttaggaccatacgcacctgtgacaagggctgtgttgaccacagtcacactgtggcatgactggatacccaaactacacttctacacatgaaaagtaagaactgtctttagattttctttactttgataacttgtgattgtttagcttaagacccaagaaatgctgtttgctcatggtaaacagaaacagcatcttcgctacaaccactgacaccagctggcgtcataggtagctagatcattgcatttgttttgaaatgttaatatgttaaatactaaactaatatttcaaaaatgtgtatatatgatttctatatccttgttttttcagataggcctgcttataatttaatataaattaactgatgcattcataagatttcaataatgaaatggttccctttt

SEQ ID NO: 267177 - DNA, 494 bp, Homo Sapiens
  misc_feature (41)..(49): n is a, c, g, or t
tcaaatgtacacatcactcactttctctcagacttcatctnnnnnnnnngtatttaacagaaaacttaacaaaaatttgtatgataatcccaatatctaacattcaaaactcaaatgatgaattcaaaaattcatcaattgaatttcaataatatcctagattttaaaactacaaactaaatcatgcattatgttctccctgatatcccataaacccccaaaaagccctttgatatcctatttgatatgaaataggatgtccttcgtgtctcaaagctacaaatcaagaaattcttcctaaacttcaaatcagtgtgcaaaatttttacctaaaaaaaagcatgactaagatatacatatcaaattccatattataaaacaaattttttagttttaactaaaagtagttaatatatgtactttagtaattctaaataaaagctaaaaataaggtccctaactattaaacttattctagttacttttctctttct

SEQ ID NO: 267178 - DNA, 635 bp, Homo Sapiens
  misc_feature (496)..(529): n is a, c, g, or t
  misc_feature (538)..(538): n is a, c, g, or t
  misc_feature (556)..(556): n is a, c, g, or t
  misc_feature (568)..(568): n is a, c, g, or t
attggtgcagctgcttcgtgttctaggtgcttttgttcagatcatctccatgacccttcacccactctgtgaagtgggcagcttataggtgttgtcatctccctagagatgaggaaggtcagaataccaggaagtggccaagacaggactaggatcccggggttttaaagtcatcacagcgctgcttgggctgcagccttcgggcccctattgaatgttcttcattcttacctcacatgctccttcgcgcttcatgggagatgccccttcccatttttcttccaacaccagcctttgagcctctcggctcctgcctctcccctgtccccttaggatctttgtcttccagcacacttttgggaggtgctgctttacttaagaacctccgggctgttctgtacctggactataatgttcacattccctagactgtcctgcagctgccttgctctggataaattcactgcttctcacccccactcccaaaacctgcttnnnnnnnnnnnnnnnnnnnnnnnnnnnnnnnnnncttgccagntgccacctgaggggctgngaatatgacctnctttttcttccctgccattctaaaaccattatcatcttcaaactccagatgaaaactagccttcttc

SEQ ID NO: 267179 - DNA, 427 bp, Homo Sapiens
  misc_feature (96)..(96): n is a, c, g, or t
  misc_feature (292)..(320): n is a, c, g, or t
cctattgaatgttcttcattcttacctcacatgctccttcgcgcttcatgggagatgccccttcccattttcttccaacaccagccttgatggtcntgctcctgcctctcccctgtccccttaggatctttgtcttccagcacacttttgggaggtgctgctttacttaagaacctccgggctgttctgtacctggactataatgttcacattccctagactgtcctgcagctgccttgctctggataaattcactgcttctcacccccactcccaaaacctgcttacatgnnnnnnnnnnnnnnnnnnnnnnnnnnnnncttgccagttgccacctgaggggctgtgaatatgacctcctttttcttccctgccattctaaaaccattatcatcttcaaactccagatgaaaactagccttcttcg

SEQ ID NO: 267180 - DNA, 371 bp, Homo Sapiens
tgagccaccgcgccccgcctaagagcctgcatttttaacaaaaggaacatgtgattctgaccccatactgaaaaagacatttgaaggacaagtaatttgttttaaaaatacagataatcatactttagctacatcacttcctgtgggatgttttcattttagagactcctttagaattccaagttgtgtaagcagggaacttagaggttgaatattatctgcttgaattccacctaaactactaagtaaaagcaaaacaaagaggacagcctccttaattgattctttgaatcaaggtcctttaaattgtcaccatagtttaggttccactccttcctaatagctcttaaataaaaattaattaagcggcc

SEQ ID NO: 267181 - DNA, 898 bp, Homo Sapiens
  misc_feature (644)..(656): n is a, c, g, or t
  misc_feature (860)..(860): n is a, c, g, or t
aagcggcagaatcttgctccaggatcaagtgcagtggcaaaatcatagctcagtgtaaccctgaactcccgggcttaagtgatcctcccacctcagccacctgagtagctgggactaaaggtgtgtgccaccatacccagctaagattcatttttatagtctaattattttatattagtttttaacacaattgcagattttgcatgtttattctaaacaacaatttgccagttactggaggataagactgttaaactggcaattttctatataaaaggttactatattagaatggcagcaacagccagagatttgggatacaatcttaaatggacagaagtaaaacaaaaagtttacacaagagagctggatcattaattagatcaagagtttggcaaacaggttatgtgaagggtaaaacgggaaattttttcagctctacaggccgtatgttctctgttgtaactactcagcttagcctttgtaatgtggaaacagccacaaacaacagacactttttcagtttgtttgtaactgaaaaactgcagctgttttccaataaaattttgtttacaaaaatcagtaggcagaattagaccaatagtttgctgatctgaatatgaaaatcagatcctgaataatcnnnnnnnnnnnnnggattttcataaacttgaagtacaatattttcactgtcattcactgaaaattctattaatactttccttccctctcgttagtaacattcaaatctttgatatctttagatcttattcctcagaatcatcaattttaacactgatttttaccacacgatattgcagaaacacacagacaaaagattagctcacatcagaccagtnctgggtacttttttttaattggtttgcataaagaaatt

SEQ ID NO: 267182 - DNA, 439 bp, Homo Sapiens
  misc_feature (370)..(370): n is a, c, g, or t
  misc_feature (386)..(386): n is a, c, g, or t
gtcatttctccagacctagctggcctgttcagtgggttatctccaccacctcaggaaagctattctgatcaaatttcttcatggcttgtattgaaaacgtccttggagggcacgccccttcacccttggtagtatctgtggacaaaaatgggaaccaggagctgcaccacgacatgcccctgcaatgtctgagttccaagccagaggatgacgcagagccctgggggtcaacctcaagtaccgctgagaccttccgtcaatgtgctgactgatctgggataggcaaggcaactgggagtgggccctcttgaaaggaacaggatcctggcattcctctttcataggtttgaggagcttcataggacacccntacggggcccaccacntgttgttttgcaggaaggagttcccttagggcaacagcaggaagttaaacagt

SEQ ID NO: 267183 - DNA, 657 bp, Homo Sapiens
cacacacacacatacacactgtctctgttatgtgcagaatgattagaggaagagaaaatgaggagctaagtttcctcgccacttactaacgtttacgtagtgctgttaggtattattctaattgttatccccattttacagatgaaacagacacaggttagcttgcctaaggtcgcacagatagtagttatagagggtcaaaggcagggagaccacctgccgagttcctgctcttcactattatggcgtcctgtgtctgctacttctggcagtggccctgggtgagagacaatgagggacttctctcttaatctgcacaggttgccttttcctgccttttctatcaggtgacactccacttattcctcaagacccacctcaaaaatcccctcttttctttcctagaagtagttgaccttctgcctactagccatattattttatgcatattgctgctgtcacccttaatacgttatttatatgccttatgctagaaaacatttaaggcagttcactgtaatgagaaaatataaaaattaaacggattagaaaacaagacaaaaagaacattgagattaggaaaaataaagggaagtcagaagtggggtgatcctcaaaatgcaggaggataaagtctagtacattaattaagcggcc

SEQ ID NO: 267184 - DNA, 994 bp, Homo Sapiens
tgcatagggctcggcgtgggcaggtcatttgatcaatgtggtggctggaacattcaatatgacttctccattcacatgtctggagtcacagctgggaagctaaaatttctgtgggctggctaagcatctctctgtccacatgatattgccaataaggtagacagatctcctgacaatggcggctcagggctccagcaacatcccacaagaacaagccccagcacacaagtgcttattcaaacctctgcctgcatcacactttctaatgtactgctagccaaagcaaggacacatgtgcaagccagctgttcatggaaaagttctgtctacatagaacatgaatcctcgggagctaccaagtaatagtctaccaaggatttttcaagtttatccactttttatagagagagaatggaaacaggaattgttgcttttccaaatttgttaaatatttgattattttaaaatatatttatgaaatatataagcaataatgcaacctataaaatcaactaaaattaaatatttaaataatttttatgccaaaagtgggctttgcccatggcacacatggcctctgaaccctgagtcaagtccagcactccaagtggcaaataacagaacccattcagttaatcagacgggaccttctcccatttaatcttcacatgcttaggtttacgtacgcttacatttatggtttcacactctggccttgatctctgaatcagatctctttgttttaatgacattctgggctacccttctggtttgggactttgggatccactgttatttctgaggtctgattatttgacatatcaggtgcacaggcccatgtgcaaatcctctatcagtcctgactcatgaaacatggctactactcctacccccatcactgaagcctgtcacttcactactggcaaaggtatttagggaaagttcttaccctcctaataggatgaggttgtagagaaccatttacataatctct

SEQ ID NO: 267185 - DNA, 636 bp, Homo Sapiens
caagctctggcctgtggattaagaacccctcacaccaccagaagattatcaaggtcctccaaggctgtgcagactgccttccccaggagatcaccgagctcaagacacagatgtggcagctcctcaagggccacgaccacctgcaggatgagttttctatcttctttgaccacttgcgcccagcagtctagccggatgggtgactttgaagagatcaattgggactgagggaaaaggagtatgagtttgatggctttgaagaagtggccctgcctgatgtggaagaagaggaggagcctcccaagatacccacagcctcaaagaacaagaggaaaaaagagatcggggtccaaaatcatgataaggagactgaatggccagatggggccaaggactgtgcctgctcctgccatgaaggaggtccagattccaagctgaagaagagcaaaaggcggagctgtagccactgtagcagcaaggtgaggaaagtatcaagggtcccgagggtatcagagctgctgggggattgtttgctaccaagaattgtaccttactgaattcctaaaaaggcacatatataaataacattcagtatacacatatgtgtacatatgcaaaataaatggaatctgctag

SEQ ID NO: 267186 - DNA, 1303 bp, Homo Sapiens
  misc_feature (191)..(192): n is a, c, g, or t
  misc_feature (211)..(211): n is a, c, g, or t
  misc_feature (283)..(283): n is a, c, g, or t
gcttgaacgtgaacttgaggatgatgcacgagttattgcttgccggttccctttcccacattggactccagaccacgtcacgggggaggggatagacacagtgtgggcatatgatgcaagcacttttagaggccgtgaaaagaggccctgtacatcgatgcatttccagctgcccattcaagcataaactnntgactggggagtgtttttntctgaaatattgtagtcttccctgatcttgtagagacttacagctgtgtccttagcaaaggagcataattgnctttggtttggaatgagaaattactattactttccttaactgttggagaaaacaaacgaagaaaaacaggtagatttaaaatctgcttttgatgctattttcttaaaaattgtacttactgcctttccatgcacctggatgcatgaaaagatgaataagtgatggtcatggttatgggtaggaaaataagatgccaatagctcttcacattataaacaatatggcttaatgcctcgataaggagaaatgatttttaaagacagtatatattaccaactgtttgtagtatcctattaactttgttcatacttaagttgtatctctttcctttttgtacttcatggcaaaattaattttctaaaggattcagagaggcgtttatattttataacatttattaggaaataatttgttccaccactagattactgtattttatggaatctaagctgtatatgtgtacatttgtatacatgtatgtgtaaatgtaagcctgacgtgggttcagattccagttttgtcatcagcaagaggcctcggacccatgacttactgcctctgagccttggctttctgtgtatctgccactgggataatggtacacataacagtggagtggggaccaatttctaaaactcatggcacctagtctttggtccataaatggtgtttgttattttagacactgagaaaaatcttattcacagaagttgcagattatttctgctagtcacttttttatttcttgagagctgccactcatttaatatttctcatttatgagaagagacttgactgatttagataaaagacgaattaaggaaaacctttgaacgtgagtagacaagcttcatatatctgtaaagtgaatattgaatggtagcttgagtcattcgtacttatcacagaaaagaattgaactcccagtcatacacctgtaactgaaataccaaactgtcttaatggagatgtaatgaagtaagatggtcacatctttaactaaacttataaaaattgctc

SEQ ID NO: 267187 - DNA, 582 bp, Homo Sapiens
tttgccctccctgcccagcagcctgataggactctcctagtccaacttggggtgggcaaggcagtcagcatcaccagcaacaccacaggaccctcaccccagcatagacacacaccccctgacccttaccatctgcttcctgaaagacttcagtgtcagctcccctacacacaccccacaccttcaccccttgcttcaagattcaaacagagactcccagtcccccttcagcatcttccctgaatcacagccccagctccttgacccccatcctaggtgccaaatgttcatctggcaaccgctatgcagtctggtgagagggagacagccatcacatagaaagtgaccgtacgggtttttaatcactgctgggtggggtgggggtagggggattgtcctggctttgtcgacaaagtcccacttccccgagtattaagggcccttggtatcaagtgaggtaaattcacccatcacagggtctcgccctaccatcctggaattatttcacttttaagataaatgcactatttcactgttcgcctcccattctaaggaggtgaggtggttggaataaaaacagtt

SEQ ID NO: 267188 - DNA, 709 bp, Homo Sapiens
  misc_feature (47)..(96): n is a, c, g, or t
  misc_feature (526)..(526): n is a, c, g, or t
aagatgggggtctcactacattgcccagggtggtcttgaacttctgnnnnnnnnnnnnnnnnnnnnnnnnnnnnnnnnnnnnnnnnnnnnnnnnnngcatgaaccactgtgcctattttgcaagtaataatttaatgtgccagatgagggaagaggcacagtgggagctggttaaggggtggcagataggagagtccctcccagagaaggggtttctgagcctctgaaccctcacacaaggatagacaggcattttccagggaggagagaggaaatgaagggcatttcagcaagagggaaactgcacatacatataccccagagagacagggggagggagttttgtaaatagcccctgatccacttgagaaggagagtgggtgagggggttactatggacatgggacaggggccagatctagggtttagatgtcccagctcctgtccacctgacttcacctccagcttggtggctgccttctcctggtcagcatcccttagtctcctgggcaagtgtatgtgtgcnatgggcagacagacacacagacatgcatgcacacacacacccccaggatacacatcagacatctgcagacacccccagatatgcacacacacagtcacagacacttcaggtttgccttttgtgaatcttacgtggcagataaccaatttttaagaatgcaggttaaattagagaagaacatga

SEQ ID NO: 267189 - DNA, 337 bp, Homo Sapiens
  misc_feature (15)..(15): n is a, c, g, or t
taggattgttactgntcttgttgggcatttggctctctggctttggtagtattacttttaaaaccaatactttcccacactgtcccagaattgcctgaaattggtatgaactgtttgtttatatacgtgacttgatttccccagggcagctccagggcacagagtgtgtggcttgtatgtgttgaactgatccacgtttcccattcccaggcccctatctctctgttcctcttcttttagttgttaaggcaagttgatctgtaccagtgctggccagtagaagtacagcgtgggccacacacagaattttatgttttctgctggatgtggtgctcat

SEQ ID NO: 267190 - DNA, 585 bp, Homo Sapiens
atcatgttttagagggggaccatcactgatactaggacttaaggccaggctttcaaggtttggattaggccgactgatgtggggaagggtggaggctgccagcaaaggaagaaatgagattcgaagttgggataacttgtcaaatgccaaggacaatgaggagacctgtttgttgggagcagagttacatattagaataacaggatttaaagggaacattttttaaaaggtatgttccaaaggaaggtatagttgaaagtactctatccagtccaagaaattcatataaatcagaatttggagagaattttgctgagtacctttccagtgtatacctttgcattttgttaaaggtcacaatccatacccataggggctttagaaataatggtaactttttttaaaaaaggtataatcacctcttatttataatgaacagctttagttaaaatatttggccagatgaaagctcttgagcatcaccatggactctcaggctttacatctctggagtattcctgagaaaatagtaagaaaaaaaagcaactttcatcactttttaaaagctctttttcagaggttgtt

SEQ ID NO: 267191 - DNA, 641 bp, Homo Sapiens
  misc_feature (550)..(550): n is a, c, g, or t
  misc_feature (563)..(563): n is a, c, g, or t
  misc_feature (576)..(576): n is a, c, g, or t
ctatagggaatttggccctcgaggccagaattcggcacgagcacgagagagactgtggcccatcaacagacgttgatatgcaactgcatggcatgtgctgttttggttgaaatcaaatacattccgtttgatggacagctgtcagctttctcaaactgtgaagatgacccaaagtttccaactcctttacagtattaccgggactatgaactaaaaggtgggactgaggatgtgtatagagtgagcgtgtgattgtagacagaggggtgaagaaggaggaggaagaggcagagaaggaggagaccagggctgggaaagaaacttctcaagcaatgaagactggactcaggacatttggggactgtgtacaatgagttatggagactcgagggttcatgcagtcagtgttataccaaacccagtgttaggagaaaggacacagcgtaatggagaaaggggaagtagtagaattcagaaacaaaaatgcgcatctctttctttgtttgtcaaatgaaaattttaactgggaattgtctggatattttaaggngaaacattcaggnccccatcattatntgggggggcttttgtttcttccacaggggtcagggtaaggagatgggcctttctttggccttgcc

SEQ ID NO: 267192 - DNA, 799 bp, Homo Sapiens
  misc_feature (168)..(416): n is a, c, g, or t
gagacctttgtggatgcactcaggatacattcctccttgccccatcccctttgctgcctcttattcattcaacaaatatcctgaaggatgagaaaaaggctaggcttgccagagtgctatggatacaggaaacagtatataaaaaagttccagatggtggctcacacnnnnnnnnnnnnnnnnnnnnnnnnnnnnnnnnnnnnnnnnnnnnnnnnnnnnnnnnnnnnnnnnnnnnnnnnnnnnnnnnnnnnnnnnnnnnnnnnnnnnnnnnnnnnnnnnnnnnnnnnnnnnnnnnnnnnnnnnnnnnnnnnnnnnnnnnnnnnnnnnnnnnnnnnnnnnnnnnnnnnnnnnnnnnnnnnnnnnnnnnnnnnnnnnnnnnnnnnnnnnnnnnnnnnnnnnnnnnnnnnnnnnnnnnntccatctcgaaaaaagttccagaggtgggaaagagcttgctaccttctggggcctaaaaaaaagtgaatgtgactggagggccgtgaacaaaagcagcaggagggtcagagaggcaggcagaagccagattattctggcccttgtgaaccatgtgggggagtttggaatctaagtgctatggaaaaccattaaaagattttaagcagacacatacgactcttggccgctctgggtgaagtggaatagaggcagacaccagcagaaatgaggcggccatcatcatgttccaggtaagaggtaaagagggtagtggcagtacagatgaaagaagttatcatcttatggaaatagcactgacagtaacttgatgatagatttagag

SEQ ID NO: 267193 - DNA, 855 bp, Homo Sapiens
ttaaattataaaagagaaaaatttcaaagtcagtatgacattctcagaatcccaaagagttcacgtatttttcaaatttccagttaacatccagaataaacgtcaaacctaagagaatttaatgagcagtagaactactgtgataaaaactgtcttatcttattccgtggctttcctttaggaaaatgtttagtatgtttttgctgaatgccagaaccctgtttttttgagagtttctgggcctgtcttatagtttcaaagttttgatgagtctcctggagtagctggggagctctatccttgcccatccctagtctgggatgcactctgagcatgttcagcaggttgcatgccagcagatgaagcagatgtttgaccatactgggatggagcgcctgctgcattaggagctgggtattcctcttgacatctggatgttgctgggtcacgatgcctgcctcaggccaggagtctgcgggaactgtggggcagagagcacagagtctttgctgctctttaagcgattagtgcactgaagcagcaataatgttgaattatcgcctggctgctttcttctcaggaatcttgggacaataggagagtcaagaaggagcatttacagtaaagtcatgttcagagagacaagactaattatagagtattaaagagctttattttaaacgatttaatttacaaatagctctgggcagtgcatggaactttttagaaccataaacctgtagcttaaagagacttttctaatttaaagtggctagtatagaaacatattgtttcagcaattattcagttttagagtttgttcaagttgtgccatagaagattcagcatctagtt

SEQ ID NO: 267194 - DNA, 787 bp, Homo Sapiens
  misc_feature (415)..(569): n is a, c, g, or t
  misc_feature (587)..(607): n is a, c, g, or t
tcctcccagggaaacagtattcaggctgcatagagtcattctacttggtgggatgactgtcctaaagatgtcctttccctaagcccaatttccccaccagagagaagagcctgccagggttgttagggccgagaagatggtctcagatgcagcagcgtgctggggcccattgcagagtgctcagttcatcttctgggtagtctgtgtctggtttcatgccaggagggagagctaaaggagaagctacagaagcatccacggttggcaggactgttggacatttgcggcttcagcagggtcaccctgtttggttgagcaggttgtttctgtacaaggcagcgagcatccagggtctgagtcagggactgagatccagactgtgccaggcttgacctatgcctgccatggggctggnnnnnnnnnnnnnnnnnnnnnnnnnnnnnnnnnnnnnnnnnnnnnnnnnnnnnnnnnnnnnnnnnnnnnnnnnnnnnnnnnnnnnnnnnnnnnnnnnnnnnnnnnnnnnnnnnnnnnnnnnnnnnnnnnnnnnnnnnnnnnnnnnnnnnnnnnnnggcggctaccagaaatcnnnnnnnnnnnnnnnnnnnnnaatcttaaaggttgtcttctaacttcagcactcagagtttacataagtaagcctgggtttaccctacccactttttcccttatttttaaaatatctatttccccaaccattgtctttagtaagtactctaaaatgacagtcatcagcagaaacgcaaggattccaggccataagagtttg

SEQ ID NO: 267195 - DNA, 724 bp, Homo Sapiens
  misc_feature (33)..(33): n is a, c, g, or t
tatgtaagtgacagcaggaagggaatgccagancaaagcgaggaaagcagaggtagcatcactaatgaagacacaaatatgtacatttcatgcctaaacatggatatctcgtcaatggagagtgccttcaaccaaacccccttcttggatgtgtgctatatagacctacatggaaaaacacactccaacctttccttcccttctcctaccctgaacaaacagaaacctattattggaaacaattatttcatacacgtctataaacaggattcatatatttcatccaggaaataaaaacatgtcaaaataggaagcccattaacagacagtgtgtagttgggaaaaatcagatcttggagctgttatcaaagtgagacacttgtagtccacatcctcggaaagagtagtataataagtatctgagaagataaatgcgttttcagggatgtcatcttgggcctgcttttctctgatcgtgtagcgatgggctcattttgcagtgatttatacctgatggccgtgaacctatcttctcttgcagtgatttatactgacggccgtgaacctatcttctcattggaggccatttggcacagtaccactttctttcaacaacctctctagatggtcaaaaacttattcaatcctagataggcttgatcttatgctgcatacctgtatccactctcggtaggaatcctctccgggagtccacccattctca

SEQ ID NO: 267196 - DNA, 718 bp, Homo Sapiens
  misc_feature (159)..(159): n is a, c, g, or t
  misc_feature (185)..(185): n is a, c, g, or t
  misc_feature (231)..(231): n is a, c, g, or t
  misc_feature (235)..(235): n is a, c, g, or t
tgtgtgtgtggctgaaaacctgttatcaatttcacatgattcagtctaacatgaaataaaacaggatgcactgaaagggcagagaaacatcagtaaacattgaaaatatggcaggaaaagtaaaatggtcgatacaaagttggaaaatacagtcaagantctccctgagaaagtgtaagaaagancagggagacaggcaggaagggaaagaaagaaaggaaagttgaaggnttantccagaaaagcctacatctgactaatacattttccagaaagaaaaaacaaatcagaaaatggtaggaaaacttatcaaaacgaacaggggccccaattccccctaaagtgaagggcaggtgtttcccagactgaaggtgccaaccaggtgatgaaccaagaaacatggaaatatgtaggtaagcagagagagacagctgaaattggctgcctctagaaagagagggctggggagggggacggaacgccgctgtacaacataataagcttgtaggactgtctggcttctaaggtacattatgttttactttaataaataaaaattaacttgaagaaaaatgcagtgccctatttaattgctctgcatgaaatgtacagaaacggcaacctctgcgattctaagcactgtgaacgccccaggacggtggatgaagaaaggctcccggggtaaggaagggaacctggagatctaagagaaaaaaaa

SEQ ID NO: 267197 - DNA, 753 bp, Homo Sapiens
taattacttaatttctctgagttgaagtttttcaagtaatttgctcaagattatatagcttgtaaatggaagacctgggacttgaacccaagtcctgttcactatgtttttactgaacccttatcaaattcttagacaaatcatcccttaaacaaacattaaatagtaaatgtggcaaaagcaacagatctagccttagtacggaacaagtgaggacggttcctccctaagaggtcttctgcaatttgaggtctgaaggaagaacacgagttgctttggagaaagagggaaaagcattccaggcagaaggcacagaattctatgcaaggatgctctcatgggagggaatgtggtgagggtggggtgaggactgacagaaacaagaaagatggggagggaatgaagagggatctggcaacttcagatgccattagtaaaactgtactttgcctcaccacgtagtgctttgtaggccatggtaaaaagtcattttctttatcctaagcacattgagaatgtattttattttagtgctcgtggtggttcttttccttgggggtgaggggtgtgaactagagtagcagtgccatgctgcctcctacaggaatcttccaggcaccaggataaaaatgtatattctggagcatgaacttctatgacctagaatagacttctaaacattctctatctacccaaacattatatatctaaacattcccagaatggagattaaagctgaaaatgcaaaaagat

SEQ ID NO: 267198 - DNA, 701 bp, Homo Sapiens
ccatgggcaatgacagaagtgcagcttcccgccagcccctgccaggggtaccaggaccctcctccaatgcctggatcaagctctgccgctgctgctggtttcttccctgtgaccccacacagcaccctcatctgcagggagaaccaggcatgtggggctgtcgggcgagctccgccccaggaagggagaagccagctcccagggggcaggctgggtgatgccttcacggcccccatcccggctcaaatgagcccacactgtgcagggggcgccgcggttccacacgcccatcacccatatcctggaatcctgccctacaagtccacaatggcaccgtatgtggacacctgggtgcttcctgcctctctgtacctctgggctgcgcaggctgagttctaagcagtatgtttgggatttgttttgggctggagggtgggggatgggtgaagtacatataagcttggaaaccatcttcagtgagctccgccttgagactgcgtcgactttgtaagtattaccactgcagagacaatattttggatgtgatttctcatcagtacatttctccttccatgaatcatgactgggaaaccacccacaggacttatctggttgggactttgtttttcagcatttacatatcctgtttctagaggttaaagctattaaaattttttgcaatcctgtagttacaaattaaa

SEQ ID NO: 267199 - DNA, 549 bp, Homo Sapiens
  misc_feature (91)..(108): n is a, c, g, or t
  misc_feature (117)..(368): n is a, c, g, or t
aaagttgtgtttttttccttcgtttccttccaaaagcagagttagattgaaatccaatcataatgaaatgtggattttgactatagctaannnnnnnnnnnnnnnnnngagacagannnnnnnnnnnnnnnnnnnnnnnnnnnnnnnnnnnnnnnnnnnnnnnnnnnnnnnnnnnnnnnnnnnnnnnnnnnnnnnnnnnnnnnnnnnnnnnnnnnnnnnnnnnnnnnnnnnnnnnnnnnnnnnnnnnnnnnnnnnnnnnnnnnnnnnnnnnnnnnnnnnnnnnnnnnnnnnnnnnnnnnnnnnnnnnnnnnnnnnnnnnnnnnnnnnnnnnnnnnnnnnnnnnnnnnnnnnnnnnnnnnnnnnnnnnngtgtgagccaccacgccccgcccacagctaatgttgtagttgctagttctccatattgattaaagcaacaataacagtaacctctacccttttgaataaaagataatgagactattataatttcaggccctcagatgatgacttagattttcaaaattgcatttgactatgaatgtaggga

SEQ ID NO: 267200 - DNA, 690 bp, Homo Sapiens
  misc_feature (617)..(626): n is a, c, g, or t
agatactcatagttattttctcaggtcctgttttgccacactggaaataaactaatcattgggaattgcttaaaactgaaaccgtactctgcaattttataaagcacccagagcacagaaaaggtgctgcacaaattctttttccaatttgcttcattaagccaataaaccataatggtccttcaggagaaatcaaactttattggacgtagccaaccagactgaagacaagaggggcttataagtgtgcctgaagtattggcaaattttccactctgccaaaaaccctacaaaaagttttccaaatttatggtaaagcttcctagcacagacatataaatattgaaccacagaactcgctgtttctacattttattacttgtttcatcaaaaggagtttttgaaggtctcttcatctaatcccaagacaataaaattaccacaattaatctttacactaataaattgtttcgatgtatatgtgtgagtgacccagggaaccacaattaaaaaacaaatttgatgaatggttagcttttcggtagtcaaacattaaagccaaatggtagtgttaacctgtttcattgtttaataataaatcttagactataacgtgnnnnnnnnnncagtaaccctgaatgaaaattggcaggtcataaaatattagaggcataatttcctgtgccgaat

SEQ ID NO: 267201 - DNA, 470 bp, Homo Sapiens
  misc_feature (98)..(98): n is a, c, g, or t
  misc_feature (103)..(103): n is a, c, g, or t
  misc_feature (409)..(418): n is a, c, g, or t
aagaagaacaagaggggcctaataagtgtgccctgaaagtattgggccataattttccactccgccaaataccctacaaaaaagtttttccaaatttnatgtnaaagcttcctagccacagacatataaatattggaaccacagaactcgctgtttcctacattttattacttgtttcatcaaaaggagtttttgaaggtctcttcatctaatcccaagacaataaaattaccacaattaatctttacactaataaattgtttcgatgtatatgtgtgagtgacccagggaaccacaattaaaaaacaaatttgatgaatggttagcttttcggtagtcaaacattaaagccaaatggtagtgttaacctgtttcattgtttaataataaatcttagactataacgtgnnnnnnnnnncagtaaccctgaatgaaaattggcaggtcataaaatattagaggcataattt

SEQ ID NO: 267202 - DNA, 441 bp, Homo Sapiens
ggccgcttaattaactatgccaagatcaccagggtagcaaatagtggggccaggatttgaactcagggccacccatctctcctgaaatctgtgttctttctgctcaggcatgaatataatgttgggagatattgacccactctgcctcagtttctccctgtacaagtggctttaccttcaccttctttccaaagaccagcccttccctgatttttctgggcaaagctttgctaaagcaaaggtaatatcagggctggggtgggtaaggacagcaagacctcaacatgaatgaggaagtcagtaaggatttgccttgtcctcaccagcctcttagaagaactaccccatcctcccgaggtcctcagaagcccacggccctcactactttgagtcgtctgttcagtagaaatcaggtctgagaagtcagtgaccactctggtg

SEQ ID NO: 267203 - DNA, 440 bp, Homo Sapiens
  misc_feature (397)..(397): n is a, c, g, or t
gtgatagaagcttcagtgcacatatactatgctatcaataattcatatatgaacataatcgattttagtatttaattattgctaaatctccaccctcaaagagattacaatctagtctgaaagattttaacggtggccatgtcttacaggatcttacattcccagcacattatggatctggcacacagaagattctaacaatcaacattcatagaaatgttggttgagtgaataaataagtgaatgaattatgatttgggaggaaattgtgtagtaggtttataaattatcatcttttcaacacttaaaaaaatattcattattaatttgttggaatgatgaatgggcagggactttaaatgaattaatgtgacaagctgagttttccggaaagaanactggaaaaatggatgggccttttgggttaatttcccctgccc

SEQ ID NO: 267204 - DNA, 915 bp, Homo Sapiens
  misc_feature (649)..(649): n is a, c, g, or t
  misc_feature (660)..(660): n is a, c, g, or t
catgtcttggtaaatgacagatataaaagcccggcttttctcactgtcccactcccacccatgtcctgttagtcaaggagctctgacttttacttttgaaagtatctccaaatctccgatacgtcctccattcccattgccagtaccttaactcagaccttcatcatctctaggctagattgattgtccctgttcaccagcccatcatccccagtacaccaaagtcattttcttacatgcagagccactgtcccatgttccagaccctctctgctgccctcaggcttcactttggccaaccttcgttagctaagcctttgctaacctcacaccactcctcctcttactggggtttttgtgccagattgtcatgcagtagaactttctctccctgagcctggaccaccaagtgacctgtgcctggtggtgactaatttgttatatatctactgcatgtcatgcacgtgctaactgctcttgtgccttttctaatttaaccgtgacagcaacttgctgaggcataggtgctatactagctcccttccacagactaggagattgaggctttcaaatggaaacgatttgccaaagctgatctctagagcagatgcaactcagaggacatctcgattactttgaccaaagtcangattgattagnatagtagcctttgcaggggatagtaacagcatgcagtcaggcggtagagaggggactactgcgataagtaatcccctatgcggtagaaaaaaggtttggggttgtggggtgtaagagtctacactcgggtttttgtacgggcaaggaagattctgaagcctttcacatgagtctgtgtaccaattccgctagcaagggagttaaagtccggcttggtccggttaggagtcacccttgcgccttgctggtgcggct

SEQ ID NO: 267205 - DNA, 773 bp, Homo Sapiens
  misc_feature (157)..(297): n is a, c, g, or t
catatctcgttgttgttgttttttttaagacggagtcttggtcttactccccaagcaatggtgcgatttcgtctcagtgcaacctctgcttcctgggttcaggctattctcctcctcaacttcccaagtagctgggattacaggcgcccaaccacannnnnnnnnnnnnnnnnnnnnnnnnnnnnnnnnnnnnnnnnnnnnnnnnnnnnnnnnnnnnnnnnnnnnnnnnnnnnnnnnnnnnnnnnnnnnnnnnnnnnnnnnnnnnnnnnnnnnnnnnnnnnnnnnnnnnnnnnnnnncacatgtgtatatcttaaaggaaataatgctaggtaatttagtcaggtgcttgatgagcatttgtcatcatcatacggagtcaatttgtccttttctataaaagttctttttgtaaatgattagttgcttaactgctttaatttcttctaggtaccttacctgtcatcaggatctttttaccacaaataagaaaccttaaagcataaaacttggttcagtcttcacatttcttaaatggaaggagaaaggggaataatagggagatatctttatctcaaagccaactgttgttgacttttccagtggcaggggtatgatgctaggacttccagatttcctgattccccatcctagtgccccttttgccaaactaggcaggctttcacagcttttggagcctaatttaagtttttcttggtaagaacagaaaactccattcatagattttaatttgtcattatttgcttatttactg

SEQ ID NO: 267206 - DNA, 752 bp, Homo Sapiens
  misc_feature (61)..(61): n is a, c, g, or t
  misc_feature (337)..(337): n is a, c, g, or t
  misc_feature (485)..(625): n is a, c, g, or t
cagtaaataagcaaataatgacaaattaaaatctatgaatggagttttctgttcttaacangaaaaacttaaattaggctccaaaagctgtgaaagcctgcctagtttggcaaaaggggcactaggatggggaatcaggaaatctgaagtcctagcatcatacccctgccactggaaaagtcaacaacagttggctttgagataaagatatctccctattattccctttctccttccatttaagaaatgtgaagactgaaccaagttttatgctttaaggtttcttatttgtggtaaaaagatcctgatgacaggtaaggtacctaggaagaaattnaaagccagtttaagcaacctaatccatttacaaaaagaactttttataggaaaaagacaaattggactccgtatgatgatgacaaaatgctcatcaagcacctgactaaattacctagcattatttcctttaagatatacacatgtgnnnnnnnnnnnnnnnnnnnnnnnnnnnnnnnnnnnnnnnnnnnnnnnnnnnnnnnnnnnnnnnnnnnnnnnnnnnnnnnnnnnnnnnnnnnnnnnnnnnnnnnnnnnnnnnnnnnnnnnnnnnnnnnnnnnnnnnnnnnnntgtggttgggcgcctgtaatcccagctacttgggaagttgaggaggagaatagcctgaacccaggaagcagaggttgcactgagacgaaatcgcaccattgcttggggagtaagaccgaagctccgt

SEQ ID NO: 267207 - DNA, 964 bp, Homo Sapiens
  misc_feature (201)..(201): n is a, c, g, or t
aaaaagccaaactagtcatgaaagtattacatacagcaagggcagtttagataagttaatgttgctatgggaacccagcagatctccttgtgtctccgtttaaaaatcatggcccaaggtggtttcaaaaacaacagaaggtaaaattattctcacattctcacacatgtaaattgtactgtctctctcagttctaaaaanggcggattcaagcaagcctcttgactggcacagtaaaattcggcttcgtgtctttctataatgtattacagcatgtgagttaacctttagaagcttcaaaaatacatcaaccaaatttggactgtgagacacaaactgggtctcttttgggctctgtccagcatagccttcctattccacatggctgcgcagcgggcccattttccaccagtgtcttctgcttgcctggtcagtctttctggtctcttaacctacctacaacaacttccttctcgggggtttgctgctagatagaaatgtagattttgggcacagaaagaaaagggaaagacctattgggaatttggtcaatagatgttaagaaatcatgaagcgttgcaaatgtaactgcttgggtattagtttaaaatattggataactgcatgaaattctaatttacccctcacatccataaagctaggaccagttggttaggcagagtttgatatttaaaaattcatcttctgagagagctgaatttcaaaaggaccattttctttccaggagtaaaaggtatattctttcatcttcttacagtacagaaacaatggaatatattgtttaaatgcacccttcatttttttctccatttctaaaaattcacttttgagcatcgtccaaatgtaaaaattctcacacatgaggaactgtttccgaaggttgtgagaaagtcaagataacagtttctattattaaaagttttgcattcggtatgacaaaaaa

SEQ ID NO: 267208 - DNA, 419 bp, Homo Sapiens
  misc_feature (35)..(35): n is a, c, g, or t
  misc_feature (272)..(272): n is a, c, g, or t
  misc_feature (300)..(300): n is a, c, g, or t
  misc_feature (325)..(325): n is a, c, g, or t
  misc_feature (347)..(347): n is a, c, g, or t
  misc_feature (354)..(354): n is a, c, g, or t
  misc_feature (368)..(368): n is a, c, g, or t
  misc_feature (404)..(404): n is a, c, g, or t
caccttggcatctaaagtgctagggtacaggatgngcaccgtgcccagccaagactatattcttgacattaatgtttcatgtcttgttttcggacctaacttacccccaaaattttcagtaatgcttaaattaacatgtttattctcacttcagctctgttgccaagaagaaccttcagttcatctctaaaagcatttattggatgcttactatatgctgaatgctagagttatggaaaatgaatgaccctaggtccccaccctatcagggnaccttaaaaactaggtgggtgagggggntttaaaccaaaacttcaatataggnataggtaaaatgtattataggnggggatncccttcaggttatnggggaatccaggggaggggcaccttaccctagggtnagggggtccaaggag

SEQ ID NO: 267209 - DNA, 738 bp, Homo Sapiens
  misc_feature (57)..(133): n is a, c, g, or t
  misc_feature (191)..(242): n is a, c, g, or t
  misc_feature (274)..(301): n is a, c, g, or t
agacgcttatgcctgtaatcccaatgctttgggagactgaggtgggaggaccgcctnnnnnnnnnnnnnnnnnnnnnnnnnnnnnnnnnnnnnnnnnnnnnnnnnnnnnnnnnnnnnnnnnnnnnnnnnnnnntgcatgcccatggcctagctattcagaaggctggggcaggaggataactggagtcctnnnnnnnnnnnnnnnnnnnnnnnnnnnnnnnnnnnnnnnnnnnnnnnnnnnntcacagaatgataacctatctcttaaaaagcnnnnnnnnnnnnnnnnnnnnnnnnnnnntaggagacggtttacgctttttaagcagtcgtagaaaatggaaagagccagacaacaaattaagaaagattgctgggcagcagagaaagcccagttgattttatttaggtcagtgcaaaaataatgatatcggtttttgccattacttttaatagaaatcatcaatttatggtgacataaatctactatttttttaaaattataccacaattctttatttttaaaaagttacacatgcaaataaattaaatacatcctttatgctgggagatctattcctgtgcatgcttttggtttattgagtgacataataaattgcttggtaataatttatacttgaatcatttgaactttgtacatcacaaaatcagtttaccgtaaaattatataattggttacagagagcttaagccaaaaatagacatcagttgaaagct

SEQ ID NO: 267210 - DNA, 723 bp, Homo Sapiens
  misc_feature (321)..(347): n is a, c, g, or t
cactactgaatcttgaaactataaatatattattgatatggaccacaattgctgttttggaaatcagtgttcacacatcatgttcaagcagttacaaagattttatgtagataatcagtcagctgatatattttcatgagtcattaattttaagatactctatgagtcacatctgtgattttcagcaagctatatttatgataaatgatggacagattttgagtagtacagattgaaaatttttgattaactcaaagtgaagtatgctgagagatcaaggacacagacatactctttctctagccatgtgcgcgcgcgcgnnnnnnnnnnnnnnnnnnnnnnnnnnncactcattgtatttgaggtgaagcagttgttaatgtgtgctttgtacctcacctaggaaaatcctaaactttctttttaactattttacaaaattggggcacatacttaagacatttcattaggtggtggtgataatcattatataaaaatctaaagcctgaagtgaggttttaggctttgcatagattataatatggggaaatgtttgcaatgtgataacatatacatgatgtccactactcacctgtaattagtctgaggtagtgggttgatgttaagttctctattcaggcttcaagatactgtttgggggctggcggggagggaaggtgcagcccacttttcaaaagaggaagaattggttgtaatgttgga

SEQ ID NO: 267211 - DNA, 778 bp, Homo Sapiens
  misc_feature (13)..(13): n is a, c, g, or t
  misc_feature (94)..(103): n is a, c, g, or t
  misc_feature (411)..(634): n is a, c, g, or t
gaaatttcggcangaggggtactccataaatattagtaattattagaaattgactaagatttacattgagtaagattattacattgaataagannnnnnnnnnaatcctgagcttcagttttcgcatctctaaataagaatctattcaatcaacagatacttatctggctcctggagctatacagcaaaagacctgtggctatagcagagcgtagaattcagggagttaataacacctacctgcagaatgtatgtgaaaatttaatgagacaatgtatagttgaagtacttgcttgttacacttcctgggcatactttattcactaaataaatgttaatttctttcctttctcctttttagttggtggaaaaatcttacctctttcttattaaagtttaaatatacacttnnnnnnnnnnnnnnnnnnnnnnnnnnnnnnnnnnnnnnnnnnnnnnnnnnnnnnnnnnnnnnnnnnnnnnnnnnnnnnnnnnnnnnnnnnnnnnnnnnnnnnnnnnnnnnnnnnnnnnnnnnnnnnnnnnnnnnnnnnnnnnnnnnnnnnnnnnnnnnnnnnnnnnnnnnnnnnnnnnnnnnnnnnnnnnnnnnnnnnnnnnnnnnnnnnnnnnnnnnnnnnnntttcaataatataatagcttggctaatgggaaaatcatttgttttcttatcactttaatataaatggtatgtgttgatggtatgtgatttattacagcaatcacatacataatgccaaattattttgaattagattggtggtac

SEQ ID NO: 267212 - DNA, 441 bp, Homo Sapiens
  misc_feature (339)..(352): n is a, c, g, or t
gaaagtaaccaaggtctcacacacagccccagcactctgggtggatttcacttcatctactccactcacctacgctgagcttccctgtggacaagctcgtccatcctctttaatcactcccaggcctcgctcacacagcaacaagtgcctgtccctgtgtccttgctgttggcaagcagaagttccctgggcagcctttgaacatagctgaatgttaggtatctttgatctgtctaaggaaaaagtctattttaaactgtgaagtgaagccaatttttttaggtcagattcttacccaacaaagcatacatcatccgtgctcatatagtttccagtttnnnnnnnnnnnnnngtgctggccagcgcagtgtgagtgcactgtgcacatgatgccactgttctctaggttcagaacaccagccttctgttaattacaataaa

SEQ ID NO: 267213 - DNA, 510 bp, Homo Sapiens
  misc_feature (190)..(190): n is a, c, g, or t
gtttgaaggtgtgaaaaggacattgatgagtgtgcctctgatccgtgtgtcaatggaggtctgtgccaggacttactcaacaaattccagtgcctctgtgatgttgcctttgctggcgagcgctgcgaggtggacttggcagatgacttgatctccgacattttcaccactattggctcagtgactgtcngccttgttactgatcctcttgctggccattgttgcttctgttgtcacctccaacaaaagggcaactcagggaacctacagccccagccgtcaggagaaggagggctcccgagtggaaatgtggaacttgatgccaccccctgcaatggagagactgatttaggagcattgtgtcccttcgagatggggatccacacactgtgaatgtgatgactgtacttcaggtatctctgacatacctgacaatgttaatctgcaactgggattacactggaactacaggaatgattcctttgaccaccttaaaaactttcacagtgg

SEQ ID NO: 267214 - DNA, 551 bp, Homo Sapiens
  misc_feature (397)..(397): n is a, c, g, or t
  misc_feature (472)..(472): n is a, c, g, or t
  misc_feature (479)..(479): n is a, c, g, or t
  misc_feature (513)..(513): n is a, c, g, or t
  misc_feature (525)..(525): n is a, c, g, or t
  misc_feature (535)..(535): n is a, c, g, or t
tgaaaaggacattgatgagtgtgcctctgatccgtgtgtcaatggaggtctgtgccaggacttactcaacaaattccagtgcctctgtgatgttgcctttgctggcgagcgctgcgaggtggactactgagtggtaccagcttgctctggttggtcttcattcctgagtagttccattgtcctgaatatttatttgcctttgctatagaattcgcatcccaatgatttcaatctttccagttggcagatgacttgatctccgacattttcaccactattggctcagtgactgtcgccttgttactgatcctcttgctgggccattgttgcttctgttgttcacctccaacaaaaagggcaactcaggggaaccttacaagccccagccgttcaagangaaaggaagggcttcccgagtgggaaatgtgggaacttggaaggccaacccctggcaatgggagaaactgatttnggagcantgtgtcccctcgagaatggggatcccacactgtnaatgtgatgacnggacttaggnatctctgacataactg

SEQ ID NO: 267215 - DNA, 931 bp, Homo Sapiens
  misc_feature (363)..(613): n is a, c, g, or t
  misc_feature (638)..(649): n is a, c, g, or t
acccttaagactgtaaattgccctggaccttttcagccacatctcatctttgtattcctcattatttaattcaattattttaatgtaagaataaaccgagagataaagcaaaaattgtacccacaaaacaagaacaaagttattaaaaggaataagatggatactgttgaataaacaattcaatacgactataaagcagaatggatgcaggaagaaaagcaagataaactgaggaattttcacagaacaaagtcaaaaacaaagatgagtacagtcactggcacttgcccaagtgctgggggtggggagatgaatacagaagaagtattttttagaaagttagaagacatgctggatgcaatnnnnnnnnnnnnnnnnnnnnnnnnnnnnnnnnnnnnnnnnnnnnnnnnnnnnnnnnnnnnnnnnnnnnnnnnnnnnnnnnnnnnnnnnnnnnnnnnnnnnnnnnnnnnnnnnnnnnnnnnnnnnnnnnnnnnnnnnnnnnnnnnnnnnnnnnnnnnnnnnnnnnnnnnnnnnnnnnnnnnnnnnnnnnnnnnnnnnnnnnnnnnnnnnnnnnnnnnnnnnnnnnnnnnnnnnnnnnnnnnnnnnnnnnnnnctgacagaggcaagactccatcttnnnnnnnnnnnngttagaagacatggaaagagatccccaagtttcaacatggatccaggaattccagaaagcatcaagagaatggagaaaaggtatgctgaacaaataacagctgagaatttccaaaaccaaaaatatgaattgtcagacttaaagggcccaacagtttatgttttcaaaactcacatccagaaatattacagtaagtttcagtatattaagagtttctattataggacttaaagtttgtcacatgtgaaacaatttatattacaggatatattctaagaaaaa

SEQ ID NO: 267216 - DNA, 831 bp, Homo Sapiens
  misc_feature (756)..(756): n is a, c, g, or t
  misc_feature (770)..(770): n is a, c, g, or t
  misc_feature (787)..(787): n is a, c, g, or t
ggattcagctcaatatgcagaattctgtgaaagtcgacaattaagtttctccaaaaaagcttccaaatttcgagactggttggactgcagcagtatggagataaaacccaatgttgtcgcaatggaaatcttagcatatttagcgtatgaaactgtggcacagttagtggatctggctcttcttgtgaggcaagacatggtaaccaaggcaggggaccccttcagccatgccatttctgcaaccttcattcagtatcacaactctgctgagagcactgcagcctgtggtgttgaggctcacagcgatgccatccagccctgccacatcagagaggccattcgacgctacagccacaggattggcccactttccccattcacaaatgcctaccgcaggaatgggatggcttttctagcctgctgatgtgacaactgtgatgtgcctgcaacaacaggaaaggcaatgttatattaaggagtaaaccaagccaattcagcacttcctgtttacttccttgtcatatgtaccatagagggtgacagacctgctctcaaaacaagcttccttcgtttaattctgcattttctgcttaggcaaccaccctatcaatatacttgaacaatgaaacaatttggctacggaagcactgtctctgaattcctccttcaacttgtcagtggaaaggaaagtcccttggtggaatggtaggaatagttttaagcggggtatcacacagtgccttacagtggagaatntcaaagcgttttcngctcttcaatcttcgtntgcatgacatgggtgaacacaagactaataaacaacttgatttc

SEQ ID NO: 267217 - DNA, 840 bp, Homo Sapiens
  misc_feature (122)..(137): n is a, c, g, or t
actcttcaagttcttcttgaacccttggtgcacagatccatatataacctcccttttcagtattgctgtgtgtgaattaactacaacacatatgcatgcatagctgtgaattctgcactacnnnnnnnnnnnnnnnnccccccaagaatatctcttgggaaaagtttttagtacgttacttaactttattttgctgctaatttgcgcattagccggtaacttgcaagtctggagaccacttactgttgagggtagctggaattttagacccttggcagtatttaagatttagacatttagccttgtgaaagttaccacagtgctccatgtgattcattgactgtgagcctgttgtccattgcactcagccctgtactcacttcttcactcgctgtcctggttttactgttcagattttggtgggttctcaaagcagtaccactcttcatctgctcagtacatctgcggcaactggctgccttcgatgctgtcattgcgttcagcccagcacatcacagccccatcagtgtgtagccaccgctctcgtttttccggtatcgcttttatctcctgaaaaagatgcaccaaataagagatcatctatatcaggaattgaatgtctaactcaaacctctcatttttgtttaataggtagatctcatttgaagtctcctatctgaatctctgaaacaattatagtttgattagacaaaggtttttaataacacttcttttttgctgtagtcaagcattaatagaaactagtttaattttcacagtggtaaatatttttattcttgagttatctaggaatggattttccacgatgtctagtgactt

SEQ ID NO: 267218 - DNA, 820 bp, Homo Sapiens
  misc_feature (410)..(410): n is a, c, g, or t
  misc_feature (510)..(510): n is a, c, g, or t
gggggagttcacggcaaataccgtccattcccaagaagccagcattgatcactgtcgagcactgaggagattggaaacagggcgcagttgttattttagaagcaaactactccctttcctactgcctttcctaaggactctcttgtagttgggctttcctggggctatttcagttcttttgggccctctgaccaaaaaaaagttcatttaaattttcttttttcaaattttcaaatgacatttggagaaaagaggaggggagctgaggtaggacagtgtttgcctcaaagtaaaccactgagagagtgggggtgccactataaaagatgatggagaaatacacccaagtgtgcactaatgagaatccacatcttcccccaaatccatatagaagagttggcttcaggagnacatttccagaactttccagaaaggtcttcacttaccccttcagagaatcttcgcagccatttcttctccaggggagcaaacttatttccccacagcttncccatgagtacccagtgtcacagccatcctcatgtaagtggcactctgcatggcggcctcatgcagaagaaaggctactctttgaataactcgtgtattgtcataggttttacatccttccccctcctccttaccttctcaatttcactcttctatgtcctattctttagtaatgttttttaaaaaattccctcttttcttgtctgtcttttcctgttcttaaatatgtcgtgttactggcaattatggatttctttacgactagggtcatatctgttgtgagtctttcccagtccttgccttcctcccc

SEQ ID NO: 267219 - DNA, 731 bp, Homo Sapiens
  misc_feature (271)..(271): n is a, c, g, or t
caaaatgtagctctcactaatttattacattggttctgttggaagatgaatctctggtttctcccggggatgatgtttgttttttctgtttggctgctatggccaaagtggatgcagtagccgcaggttccaaagggtcttgggcaggaggtcagggttctttggtgattctgtgctgatcctgaactttggggaaaaagtccctaatgggcagtcagtactatccagggttgctgagaaagggaaaggggaatgcctcaggccctggctnggagcagccttctcagatacaaaggagaatagtctcgggtggtccgtgtgtggaaatgcgtagaaacaatggtagcatgagactgttaggttgaaaaaggctaatgatatgaaatctggcatacaagtgagtagtgtcatttttgttacgactgttatttctttgtcaatagatcacaaatttagtgttaacatctcatctaatttttgtttcttgtagtctcaaaccatgaattatgtgggacagctggctgggcaggtgattgtcactgtgaaggaactctacaagggcattaaccaggccaccctctctgggtgcattgatgtcatcgtggtacagcagcaggatggcagctatcagtgttcaccttttcacgttcggtttggaaagctgggagtcctgagatccaaagagaaagtggtgagtgtcctcaaggagaggaaaagtcatcctgagattc

SEQ ID NO: 267220 - DNA, 413 bp, Homo Sapiens
  misc_feature (335)..(335): n is a, c, g, or t
actgtgtctgcaagcagtttgtactcagtttgtcaagagagcagctttctgttttgattatataccttcatctctgaaaaaagacatgctagttaaatttcaagatgttttacttagaagatgacaaggaagatgaggtggtttgtaaaggctcattaagtaaaactcaagatgtttaccatgacaagtcccctcctgggtatcttgtctcaaaccatgaattatgtggggacagctggctggggcaggtgattgtcactgtgaaggaactctacaagggcattaaccagggccaccctctctgggtgcattgatgtcatcgtgggtacagcagncagggatgggcagcttattcagtgtttcacctttttcacgttcggtttgggaaagctggggagtcctgaggtcccaaa

SEQ ID NO: 267221 - DNA, 473 bp, Homo Sapiens
  misc_feature (351)..(351): n is a, c, g, or t
  misc_feature (371)..(371): n is a, c, g, or t
  misc_feature (380)..(380): n is a, c, g, or t
  misc_feature (392)..(392): n is a, c, g, or t
  misc_feature (403)..(403): n is a, c, g, or t
  misc_feature (447)..(447): n is a, c, g, or t
  misc_feature (453)..(453): n is a, c, g, or t
ccttcatctctgaaaaaagacatgctagttaaatttcaagatgttttacttagaagatgacaaggaagatgaggtggtttgtaaaggctcattaagtaaaactcaagatgtttaccatgacaagtcccctcctggtatcttggtctcactgccacccagtctggagtgcagtgtaggaggcaacctctgcctcccaggcttcaagcagtcctttcgcctcagccttctaaggagctagggacctcagttacgggcacccttgcccctgccttcggctggactttcacactggacttcctctggatggaccaggcagtcttttgcccgcggagtttgctggctggcgctggnttcagtatttcttccaggantgatcttanttggggctgttncattttgtttntttcacggggggataattttttagggattttaccccattcccgnagggcnggtgttcatttttttgttcc

SEQ ID NO: 267222 - DNA, 457 bp, Homo Sapiens
ctggggcagggtgattggtccactgtgaagggaactcctacaagggcattaaccccaggccacccctctctgggtgcatttgatggtccatccgtgggtaccagcagcagggatgggcagcctatccagtgttcacccttttccacgttcgggtttgggaaagctgggagtccctgagatcccaaagagaaagtgattgatatagaaatcaacggcagtgcagtggatcttcacatgaagttgggtgataacggagaagctttctttgttgaggagactgaagaagaatatgaaaagcttcctgcttaccttgccacctcaccaattcctactgaagatcagttctttaaagatattgacacccctttggtgaaatcgggtggagatgaaacaccatctcagagttcagacatctcacacgtcttggaaacagagacaatttttactccaaagttct

SEQ ID NO: 267223 - DNA, 616 bp, Homo Sapiens
  misc_feature (54)..(247): n is a, c, g, or t
gacaaggtctcactgccacccagtctggagtgcagtgtaggaggcaacctctgnnnnnnnnnnnnnnnnnnnnnnnnnnnnnnnnnnnnnnnnnnnnnnnnnnnnnnnnnnnnnnnnnnnnnnnnnnnnnnnnnnnnnnnnnnnnnnnnnnnnnnnnnnnnnnnnnnnnnnnnnnnnnnnnnnnnnnnnnnnnnnnnnnnnnnnnnnnnnnnnnnnnnnnnnnnnnnnnnnnnnnnnnnnnnnnnnnatgagccaccacacccagccccagctgtttgtgattaattagtcttggggaacagatgacttttggatgtatatctgtggatccaaaggctcttacggcttagttaagtactctttgttaatgaacagtctgttccatggtgaagtatcattttccataactgggttaatcatcatttcctcttatactaaaaagaatttttatgtcactcctagctagctctcattagtaaagtaagtcccctgttttgcgtgggaagtggtacagtttcatggccagtatgcttataaacatttgtcagagaaattgagcacacctcaggaaatgtttagtgggttgaatgccccagggaagctgttaaacatttta

SEQ ID NO: 267224 - DNA, 458 bp, Homo Sapiens
aaataaaggatacaactgaggaaccacatggaagagatgcatacggcaaggtggggaggggctgcagagtttccatcaagtctctgggcatgctacccacccagtatgtcgagttgttcaccaatccagaagcacatcaaattaggagttttttatagagttccaatctctggccctgcaaccccaaggttggcaagtgggctgacaagttttaaccctcaaatcaagtgattggcctttctgactaaaccaactatgaggctatctaggggccccaccaaaatcacctcacagtaggaacaaactcaggtgtggtccaaagtggatcactaggaacgacaaagacactcctagcactctgcaaactccgagtgtttttggagagctctgtgccaagaactgggacaaagaccaaatatttacttactctattacaatgctaaaaacaccaaataaag

SEQ ID NO: 267225 - DNA, 747 bp, Homo Sapiens
  misc_feature (344)..(344): n is a, c, g, or t
tgggagacacctgaagccacctcggaaaatgttcagtggggcatttcttgcccagagctgtgtgagtgaaatatttgactaaatggggagttccttcctcggaggaggataaagcgggctctcttttcctgtccctttgtctcttgtcccctttgtcccagccctccagctctgcggcctcccctcccccagcggttccttcctttgtgcccgccggccactcaccagtgaaacttaacttcagccccgggcctcactcccctcgaaacaacagaaggagctagtaggggcaggcctggctgtcagcgccttggactaaaaggaaccaaaccgccgtcccagcnccccaatggtggcagttaattttgaagtttggcgttgactgttggcagtcccttccgagggagcagctttggagggggtgttgctgccccagccagagggattgggggctgtggctgagcccaggagacctggccttacaccccttccctggtaaagggccctgggttctccaccacagcccctctttgtcctgctctgagtggtttggagttctttgtgcagtggcccagaaatatggacgcgcaaactgtaacagagccccacccacacctctgggtagcgaagcacccatatttgttacatgattgtcttaatcctctttaagcaaggattagcgataactagggggttaaacaaaaatcagaaggaaaaactgtaagttggggaaaatctatccatgaa

SEQ ID NO: 267226 - DNA, 512 bp, Homo Sapiens
tgagtattagttgtatggtcaaactggcaaattttaccataggtataaataatagagaatgtggaagaatagtgaatagtgtcagagatagttaaaagtccatacaatagtagagaaggtagtaagtaatagtggcttggactaaatatttgttgaataaatgttttaaaaaacaggctacctacaatttgtgttgaagatatgaatgaatgaagtttccacacctttatgtgggagacctgataagtaaggcaacaataagggaagggtccccaggttggggaggagccccaagttgagaacaataatgaacaattattgtatgaacaattgttagagacagctaatcacaaacaacctgcgggcacaatgacctcattccacacgtagcacccttcagcaggaccctataaaactttcctccagcccttgcctctttgcaggtagccccttctctgctgagctgcccactgcaacatattttcacaatttctctaataaatctgcccttc

SEQ ID NO: 267227 - DNA, 1011 bp, Homo Sapiens
  misc_feature (65)..(104): n is a, c, g, or t
taccacatttcaataagtcttcattgttctgggtccttacctttcctgtcctcctgttatatgannnnnnnnnnnnnnnnnnnnnnnnnnnnnnnnnnnnnnnntttcaatgtctgcatggttctgggggtaacaaaggcaagaagttaaagtaagaccacatttgagtattacttactctgtagaatcaaaacagagtagttaacaccaattatgcaaactacttttttttccagcagaaagggagctgacatgatcaaatccatgttttcaaatgaactgaaaaaggcatccagcaccacttataacacatttatttcagttccaggctgacagccctggggcatctagcaggatgcataattgtcatctggtgagagttgggactttgctcaattttaataccaatctctcctgattgtaattacctccactactttcatgatccccctacaatatttttttaaatgatatatttattcactgaatcaaatgtcattaatgagttatcttctgtggaggatgactgttctctttgttaatgttcacaatcaagatcttgggctgagaagaggcccttcacccaaggagtttgaagtatcacagcgtgtgggaaggtgggaaccaggatacccattcatttccaaccgagacacagagaagtgagtcacagaatttgagcccgctctcttgactgcccagccagagacactgatttctgtaacctcttcacttgatcctgcctcttaagcattaaaacattctcctaaacctctgagtgttttgtgggttctgggtgttttgtacattttagccaagctaaccacttgtctgcaagtactgactttcctatgaattctttgaagattattgagtcagaaaggaaaaatatagccccaaattcccaggcttttaatgcattacattaactgcctattgaaatgagaagttcttcacaaacttgtatacccactaacaagattgcacataaacatgcattaaagtatatac

SEQ ID NO: 267228 - DNA, 556 bp, Homo Sapiens
ggccgcttaattaaaaagctaaattagaaattaaaaactgcaccatatgcactggaaaatgtggtttctgacaatatattaagcaccatgttaaaacagagtgttgcaaaagggtcttaacagaaacagagcaagaggatttttggaaaagagagaaaatggaaaaggaatagacatcttttgaatatcaagcccgggcaagttagaaccatgcatcagcttttcatccatggtgtaacttaaccctcaggctgtcctactcaatgtggtttgctagcctcactcgcacacaggaagcttggaatttggaggctccaagtcactctccagagtcggtgtgcggtaggcctgcaattccaaaccaaggtctgaagccaccggaagccactgtgctttccaaaaccaccctcttggaatctgccacaaatccaattactaataagagttatttaaagtcttaaaaataaaattgcctttttaaaagttcagcattttaaaactaggatgcaatccttgtcatttctttctaatgtataataattaaaggaataaatag

SEQ ID NO: 267229 - DNA, 712 bp, Homo Sapiens
ggccgcttaattaacacctgctggctacaaatggctaattgttcttagccttttaagtcaatttgccactaggggctttttttccctctttaattcctacctcttgaggatcaggtaacaaatctgagcacgttttaagccactttttagactgctctgtctctgaattcaactgattcattacagactgagggctggatagtggcagaattcccagtgggtgcctaacgttgctatgttgagaagggaactttcaaatgcctcttctgaaaaaagagtgaagtcctgtcttattgccaaagtgaaaagagtgatggaattgtcatttctttttaactatgttccatttttattgcattctgcaactattttcagcaagtataacttttcttaagaaaaaaagctccttttgttttcaaaaaggcacttgtccaatgtaacagaacattcaactctctagctggagacattttaccagttccaaaaaataagaaactgctcatgcatctttaaagacattttaggtctattaataccacagtagagacaggctggagctgctattttaaatcatgttagatcatagcttatctaataatgacaaccccatttaattgctaaattggtcatctgaaagcattggttaaataattaatgcaataaaaagaatcccactatctgcaaaggcaaactgctgagttttaaattccta

SEQ ID NO: 267230 - DNA, 746 bp, Homo Sapiens
  misc_feature (678)..(678): n is a, c, g, or t
ctgcaacataaggcccatgaaaccgggccaaaggaaacaatcttaaaagaacagtgacttgatttactgtctggcttaacagcaagtcttggagcccctgctagttgactggaattaaacagcagatttccatttaggaagacagtcagttcctagaatgcctgtccattctttgcactgtatgtagttccagtgcgtagtgaagtgtctgacatgtaataggaactcagttcatgtgttatgttctttgttctcccatttttaatgaggtgagcaggaaatatgtattctagttaatgagatttcagttaattcaggtttcactgcacgtggcttgacacagttgcttacaggtttccccaagtaaatcattgttagtgggccattcctaaaatgaattctgggcaaaactataattaaagctacactttacaagtgagaggcaattggtaaacagctggaacagccaaccccaaccccaagtaggttggctcttcctggcaggcttctccctggcagaccacgaaagcaatttcagaccaacgagtcaggggaggctttggctccccaggatctgaaagcagcaaaggcaacccgccccctcctcaaagccctcattcaaggggtggatcacgaaggccacctagaatgcaggcagagtgaggcttactgtgcctncacattttgaaattgcttgaggcactacttatagctctctgcatttgtaaaagcgattcctttgtgac

SEQ ID NO: 267231 - DNA, 442 bp, Homo Sapiens
  misc_feature (391)..(391): n is a, c, g, or t
  misc_feature (407)..(407): n is a, c, g, or t
  misc_feature (412)..(412): n is a, c, g, or t
  misc_feature (426)..(426): n is a, c, g, or t
tgcaacataaggcccatgaaaccgggccaaaggaaacaatcttaaaagaacagtgacttgatttactgtctggcttaacagcaagtcttggagcccctgctagttgactggaattaaacagcagatttccatttaggaagacagtcagttcctagaatgcctgtccattctttgcactgtatgtagttccagtgcgtagtgaagtgtctgacatgtaatagggaactcagttcatgtgttatgttctttgttctcccatttttaatgagggtgaggcagggaaatatgtatttctagttaaatgaggatttcagtttaatttcaggttttcactggcacgtgggctttgacacagtttggcttacagggttttcccccaaggtaaaatccnttgtttagtgggcccnttccntaaaattggatttnggggcccaaacttttt

SEQ ID NO: 267232 - DNA, 529 bp, Homo Sapiens
  misc_feature (47)..(47): n is a, c, g, or t
gtgagaggcaattggtaaacagctggaacagccaacccccaaccccnaagtaggtgggctctttctgggcaggcttctcccctggaagacccacgaaagcaatttcagacccaacgagtccaggggaggctttggctcccccggggatctgaaagcagcaaaggcaacccgcccccctccctcaaagccctcattcaagggggggatcacgaaggccaccctagaatgcaggcagagtgaggcttactgtgcctccacattttgaaattgcttgaggcactacttatagctctctgcatttgtaaaagcgattcctttgtgaccccctacatcgttgcagatactctacctcaatcattattggtccttaggagtgcacagtatatggatagtatacacacatcaaaatacgtcagccttcccatgaaacctagaacataggccattgcagtgttttttagattactcttcccctaggaagtagacaaagaataaaaataagatatgagcatttgtatagcttttaaaa

SEQ ID NO: 267233 - DNA, 659 bp, Homo Sapiens
tcagccatttaccagcaactgttgcacatggcccattagcactcgaagaataaaagcaaacatacaggaccagataaaattcccctactaacccaaatgatccatttccttaacacaattttaaaaccacagctagggatgtgaaaacagacatgtttttgtgtgtgtttgtgtgccacaatctgtccaaacccttaattcccttttaagtaacatatctaataaaaatctgaaagaaaccacattagaaatgcaaagaggtttgcaaaacaagaggcttctttcattccagaaaaccagaccaaaacaaggggaaagaaatgaaagcaatggatacgtgtttgccaaagtttcaatcctgcccggtggagacactacactggcacaaattctgaagaggaaaaagaggaggttggcgggaggagagaagagagagcgagtgtggcctgcaaactgcaacaatgcaatctccattttgaacaatgcgcctctttcctcttgtaaatctagttttttcccacctgatgtgccctcgcattttcctctgggggtcggcggggttggggggagatcggagcaggatgcacagcacacgagtgagcaaagggggagggcagagaaggtggggaaggagtctgcagcaactgggctcgtgccgc

SEQ ID NO: 267234 - DNA, 732 bp, Homo Sapiens
  misc_feature (102)..(345): n is a, c, g, or t
  misc_feature (368)..(380): n is a, c, g, or t
gaatttcaatgagtgctttttggttaagaagctattgtgaatatttctgcctttggagatggctaaagaaatagcattattaagccggtgcagtggctcatnnnnnnnnnnnnnnnnnnnnnnnnnnnnnnnnnnnnnnnnnnnnnnnnnnnnnnnnnnnnnnnnnnnnnnnnnnnnnnnnnnnnnnnnnnnnnnnnnnnnnnnnnnnnnnnnnnnnnnnnnnnnnnnnnnnnnnnnnnnnnnnnnnnnnnnnnnnnnnnnnnnnnnnnnnnnnnnnnnnnnnnnnnnnnnnnnnnnnnnnnnnnnnnnnnnnnnnnnnnnnnnnnnnnnnnnnnnnnnnnnnnngatgagagcaaaactccatctcnnnnnnnnnnnnngaaacagcattattattaaacaatacgcacagaattcatggaagaaacatgaacttcccacatataccttccttcatttacccagcttttccccactgctcttcaaacaagatcattcttatctgcactaattgctgaattgtggccacaagatgaacatactcctctttcactgacacctacaagatatttaagcttacattttaagattgctaagaagttgaagtcagttagcaaaattccttaatctgctccagatatgaatatatccaagactttgaccatagggctatattaacctctgctatcataatcagtggaactaatttaccaatattttatttaccagggg

SEQ ID NO: 267235 - DNA, 459 bp, Homo Sapiens
  misc_feature (387)..(387): n is a, c, g, or t
  misc_feature (395)..(395): n is a, c, g, or t
  misc_feature (423)..(423): n is a, c, g, or t
actggaatggcaacactgtctcttggctggcagtaaaaacttgcatcatttctcaggtgatagttctacagcattggttaggaacaaggatgtctacccactgagccaaacatagcatgagacactggaaagctcaacttcccagtgatggagtttgaaacttgtattttgattctggcaccacaataatgagctgtatgcttgccacctttctgcatttcagtagttccccttatctgtaaaatattagtaatatccgccactaaacccagcccacaaggttcttgggaaattcaactgagacacgttcaggaaaggttttaagaccacatggaccgtatacacaaaaacagggaatgacaggccagggtgcagtgggcttcatgnctggtaantcccaggcactcttagggaggctggggngcagggatggactgctttgagggccagggtgtttcg

SEQ ID NO: 267236 - DNA, 664 bp, Homo Sapiens
  misc_feature (411)..(411): n is a, c, g, or t
accccccaccaagcagcaagataattccccatcgcttagcatcatatagctgcttatgtgaccttgagaatgtccacatgtcacaatggacagtcacttaacactaagcaatgacacatgctaggagtggggctgggccttggggctgctggatgaatgagacccagcctctgccctgggagtgcagagactcaagacagatacgaccacgtggagagacaactgtaaaacaagtggtaagttatctacagccatagccacggggcactgtgagaccacagagcagtgaaaactaagccagtctaggcttggcaaggagagatggagtgaggtgggcaatggctaaaggtgggaaagaccagagctgggaggtgagatgggatttgggtttatctttaccaataaggatgnaggagcctgtttcatcttcctcccaggcaggtcacagaagctggaaccagttgatcgggccgagcctgcagactccctcatcctttccggccttcaacactgatagctctgctctctctccccaacctcagtgccttcatcctcccctgtgttcccatggatgcttggtcctgaccttgcacctctccctcacacccagtgtcctttgtttttcctctgccacttgggaggctgatgggaggatcacctgagc

SEQ ID NO: 267237 - DNA, 1131 bp, Homo Sapiens
  misc_feature (833)..(1039): n is a, c, g, or t
tatcatgtgtaatctttcaaaatgaaaaaagaataaatcaataatatagtgattttgtttggcttcacgtaataatagcagggggatcccccaccgtgtgagtcattgatgtatagtcatacactgcagctgtgactgtctcaaatttagtcatttccaggcgaatttgcagttaaatgattaacctataggtactatgagttgccattaaaaagccaagcctctcctgatgtctttcctgtcctgggcctattgtgaagcctttaggtgggcatctaccttcagttcatcaagatttaaaaagacagtttggaccctttttgtccaaggctttcccggggtcttttcatgcccctgggaaggtcctcctagcacgtggcaggtgcatacttctcagcatttttgtacatgctgggacacatttctcctttcctgggtacctggggcaggagggagtttgctttgtctacctgtggggcatgccgtgaccagcccctccctccccatttatgtcctccatgatacagaaacggtgagcaaatttcctacctagagggtgtatcaggaaacccccaatgaaataaacagaaatagagcagccagtttttataaagcctgaaactcacagaattggaagtctgagtgacacagatatgttaacagaataacccaattgtttctcaacaatggaaagatgtgggatccagagagcagtttttgtttttgtttctgctattaagtgactgccctccatgtgataaaattggagaggtgaactgagagttcttcattacaaatacagctgactttattgcttactgaattttgatacnnnnnnnnnnnnnnnnnnnnnnnnnnnnnnnnnnnnnnnnnnnnnnnnnnnnnnnnnnnnnnnnnnnnnnnnnnnnnnnnnnnnnnnnnnnnnnnnnnnnnnnnnnnnnnnnnnnnnnnnnnnnnnnnnnnnnnnnnnnnnnnnnnnnnnnnnnnnnnnnnnnnnnnnnnnnnnnnnnnnnnnnnnnnnnnnnnnnnnnnnnnnnnngtgagccccacaatggaagggctctgtccattacttgctgacaagaacaagacctcaaacatacacggcactcaagaaatatctgttgatgg

SEQ ID NO: 267238 - DNA, 684 bp, Homo Sapiens
aaataacatctcttacaaaatcctgtttactattatctccatattgcctagccattgggatctgaagctactgaaggggggagaaatcctagccaattaaacaattcttcaaaacaaactaaaatccttaagatataatttataactcatttcaactttttaaaatacgggcattactgacatctataaacaaaggcaagagaggaaggtgcagatgaagtcccccttttcaaatcaaacttctactcaaatcagaattggaaaattgttttagaattcttaaaataaagtttggtgggttttttcccccagaaacctgtgtgaggtcagttccatcaaaagtcatcatcaccccgatcacctcctcagacatggggaatctcactcagctgagaccaacagttgggaggaggtactggtcccattgtacagatggtcacagccctttaattgaggtcagctgacttgcttagtcatatgccacctctctcaccaggtccaccacaggacagtaatttctccctgcctgtgtagtaaaaatccagctttagtatcagcagaaaatccaaacaatgtgatcttcccaaatcccattctttcctgtgctcagttgatccatacttactgtctacctggttttgctaagtcccctagagcaccttggaagggctataaaagcttgaa

SEQ ID NO: 267239 - DNA, 582 bp, Homo Sapiens
aaactatatttcatgttgcatagatttcaaaacataattttatgttcaatgggtatttttttacatatacatactcacatattatatcatggtgattatgatggttaaagcctttacactgaatgtaatgtttaataaagaaattacaaattctcactttctaagaagctttcactaatcattacctatgttaaagctcccacctggtggctcatttttcatagcattccttgtgtaagccaaggtatatgacctgcgttttctgcagatgctgctgctgtcacaacatgaactgctgacacagtcctttaccttgctccacctctgcagtgatcataagtgctttgtgcccagaggccactgaagatggtaggcaggattctttccaagaacccaaactgcctttgcctcagctttatggttacctaaaattgccactttttttaggttaaaaaaaacttcagtatcctcattaacatttgaagttggtttcttatgaatatttcgtggctaaaatgattttatagggaatctatcttctaggatctaagccactaaataaaaggataaatgaatgatgat

SEQ ID NO: 267240 - DNA, 676 bp, Homo Sapiens
  misc_feature (312)..(312): n is a, c, g, or t
cggggaccttagtttgacagggacagggatggacgaattacggtggcggagctgccgggaggcggtaccggctctgctcggggagccgctggcgggtcctgagctggacgagatgctccgagaagtggacctcaatggggatggcaccgtagactttgacggtgagtctccttcccggaaaaccctcccgtgcttccagggcctaggctgagcccagcacctcctgggatccctgacgtggactgacccaagccctgcccttctctcccgcagagtttgtgatgatgctctcccgccactgaggctccaggnagggaatatctgttgcccctgcggccccagacaccagccagacccaggctgcaggcctcccccaggagcctccaggatggagatggagacccagcagcccccagactacttctatccctgaaaacacctggcctcaatgttggcttgttatgttacctgcccaccctcatccttacctcctcctactcaagctgcctggagaagacctgctctcagctgcccaccgttcctcagtgtgagcaagatttgggtctctccagacctctgggaggtagggagttccctggcactggcagcattcagtggggaccccccagtggcatgatgaatggagaggatggctggaccccttccactacttatg

SEQ ID NO: 267241 - DNA, 612 bp, Homo Sapiens
  misc_feature (331)..(331): n is a, c, g, or t
  misc_feature (342)..(342): n is a, c, g, or t
  misc_feature (440)..(482): n is a, c, g, or t
  misc_feature (487)..(487): n is a, c, g, or t
  misc_feature (491)..(491): n is a, c, g, or t
  misc_feature (493)..(493): n is a, c, g, or t
  misc_feature (512)..(512): n is a, c, g, or t
  misc_feature (524)..(524): n is a, c, g, or t
  misc_feature (527)..(527): n is a, c, g, or t
  misc_feature (548)..(548): n is a, c, g, or t
  misc_feature (578)..(578): n is a, c, g, or t
  misc_feature (592)..(592): n is a, c, g, or t
aagcaactcaagttgcaaggatattcctcatgtatcatgcaaggatattcctcatatatcatgtaagtaaaaagtcaccaaatcctgacaacctgtccacatgtgcccacacatgtacaattatataataaaaagagcagaatgcaatataacaaacatcaatggaatatctattaaacttcttaagagtatcatttctttactgctatatatttgttccacttactgatttttttccagatgcatataattcttacggtttgatcaacagtaaaagaatgctatgagatttaaccataaaaaactatcttgttcctcaagaaaagttaantgatattggangagtactcattttctagtgttgaattgagaattcaggggcaccaaattctatgtgtagtgggaccaatgaggatggatttgaagaaaagaaatggaannnnnnnnnnnnnnnnnnnnnnnnnnnnnnnnnnnnnnnnnnngtgcncgcncncgcgcgcgcctagcattgngctgaggaatgnggngagtatattaatgagatatanattaaatttatttcactgaataacatcagntcttattgaacagntatatatcatttttttaatg

SEQ ID NO: 267242 - DNA, 490 bp, Homo Sapiens
  misc_feature (92)..(200): n is a, c, g, or t
ctttaaagaagtttcttggccggtgcagtggctcacatctctaatcccaagtagctgggactacaggcacgcactaccacatctggctaacnnnnnnnnnnnnnnnnnnnnnnnnnnnnnnnnnnnnnnnnnnnnnnnnnnnnnnnnnnnnnnnnnnnnnnnnnnnnnnnnnnnnnnnnnnnnnnnnnnnnnnnnnnnnnatgagccaccgcacccagcctaaaaaacatacatattttttaagtttctagaagcttggtcccatgacatctgtataatctcattggccagaacttggtcacacaaccattcctgctgctgtggagccttatgaagttaaaaatcagggttttattatcaagaaaggaagagagaccagatattggtggtcagttagcatcatgtgccaggaccaggtagtgtttaatcttagaaatgcaaggatgatttaaaatgggaacatccgttagtgtaactcattacattagca

SEQ ID NO: 267243 - DNA, 499 bp, Homo Sapiens
tgctgcttgaataccagtttgactttattattttcctttttgtgtcaattgtgtatcctgcactttctcaccgtgtgcccccccgccagtggacactcttggtaagtctaccatcccaaatctctggtggctgctcacggtgtggtccttgctgtgggctttccgtggttgtccagacctctgctagctgcccaggttttcctaccagctcaaaacaatcaactgtgcctacctaattttcccacaactttaagaaaattgtgtgtgcgttgtgttttaattgttttcttttttggatgtttagccatttacgatgttagcacaacactctgagagcctttgaatcatcgtaattcaatattagactcatggaaaaaagaaatacagagtgacttaaactgtcatttccacagtcaataagcatttttgcatacatatatacctgcgtatatatgtatgtatatatttatgccacaaacaaaacagagctgcaagcctc

SEQ ID NO: 267244 - DNA, 631 bp, Homo Sapiens
atcctattatgcctaattgttccgtaacatatccatcctgttggagcaattttgtgttttcaaagtaagtatagaataaatagctcagaagccttggacttgcagagcttcaggaaggctgaccaagccttgctcctgttagctgtctgagggagagagctggccccactgacttcctttggaccacctcccagaaaattggcgctggaagggtcttctgttcttctgaccccaattgtgctcgatttcttgtaccataataaacaaacaactcccagaggcaggaacttcctatctttgaaggcagctctacttcacccttagggagatctggtttaattcttcttcctgctggcttctcaaggctgtagtgacttgcctgtatcctggggagggatacagctatttttgtataataaagttaaaagaggcggagtggaaggtgggcatggtctgtggctcctggctcatagggtaccacaatttggttgatattcctgtttctgattgtaagaatccagtttcctttttagttcataagcatgatgattgggttttcatgcttgtctgtgagatgtgcctcccttaaatcttgtcatgtcgttggtacattacccatgtgacatgaaaa

SEQ ID NO: 267245 - DNA, 480 bp, Homo Sapiens
  misc_feature (11)..(11): n is a, c, g, or t
  misc_feature (21)..(21): n is a, c, g, or t
  misc_feature (39)..(39): n is a, c, g, or t
  misc_feature (48)..(48): n is a, c, g, or t
  misc_feature (58)..(58): n is a, c, g, or t
  misc_feature (66)..(143): n is a, c, g, or t
ccttcgctctnttcacccagnctggattgcattggtgtnatcttggtncacttcaacntctgcctnnnnnnnnnnnnnnnnnnnnnnnnnnnnnnnnnnnnnnnnnnnnnnnnnnnnnnnnnnnnnnnnnnnnnnnnnnnnnngttcactcacttccagaggaaacccagctgctgtgtcatgaggcactcaagcagccatattggagaggctgatgtggtagggaactgagacctcctgccaacagccagcatcgtcttgccaggaggtcaccctgatgagctgcccatctaacagataagagcactgaggcagaggtgtttcatctgggcctcaggacccaaaatctgtttcattttggagcatccaggctgagctaggtcctgagccagacactgaggatgtgatagcaaatcaaacagacatgtcttctgtcctcttgaaatttacactccagtggggagacgcaaataaacaagt

SEQ ID NO: 267246 - DNA, 418 bp, Homo Sapiens
  misc_feature (18)..(18): n is a, c, g, or t
  misc_feature (44)..(125): n is a, c, g, or t
atttttagtagagacagngtttcaccatgttcaccaggatggtnnnnnnnnnnnnnnnnnnnnnnnnnnnnnnnnnnnnnnnnnnnnnnnnnnnnnnnnnnnnnnnnnnnnnnnnnnnnnnnnnnagcctagacatttttaaaaatccaaggaaggagtgagagaagcctggctacctgtctaaacttccccttggtcctggatcctaaaaacactctgaggcaaggaacacaaaggcccagctatcttctgagaacaggggtgggtaaaattccggaagaacaaaaaacacattaatatctcaataaattatcctaccacatgggtgactggtcatgctgaggaggaaaggaggccaacatttgctatcattctcttggtttgcaaatcaggtggaaaaataataccacgccgagcc

SEQ ID NO: 267247 - DNA, 704 bp, Homo Sapiens
cagctatatgcagcccttaatgtttaggaaccatttctagttcacatagaatgatgttcacaaagtgggatacaaacatatatatttatgtaatcccaacagtgtaaaacaatagtgtaaaaagaagtgtgctgttcagagtggttatttctacgacctgaagtatagatgacttttagtcttttctctgcactttcatgtattttctagtttcctacaatcagcatgtgttattataaacaggaaaaggtttatctaaaaatggccacagtgactcagcagtctcccctttgccctctgaaggaaacactggcttatcattaaaggacatttaaaagctcattgtggtggaagtgtcattaccaggattgtttaagaaaagaaaaacaaaaaccagggaaggcccatggggaagtagagaagagtgtcatggggtttccaaccaaagatccatatgctgtcactgcaaaatgtttagggaaagaagcgaggactgacttccaccctctccatacacaagttcctgaagtctgtccatagttcaacagaaagcatggatgggccatgccagcactgtgctgagcatgcatacgacattaaacacaaccctccctcaggcagctctgctgttctaagatgtgtaaccaagattcgtacatgaaagaactcagggagcctatgtagcattttcattcgctcattta

SEQ ID NO: 267248 - DNA, 1036 bp, Homo Sapiens
gcagcttaaatatagttcatgcagttcttcacagttcagcaagcaccagcaaatgatagaatagggtagtatttttcacatcccatctgctgatcagcctgaagttgacatcttgaaaactcttaagtcaggttgatgatttctctgtgtgtagtggggctcagccaagttgctgtggataattctggtgcggagaaaacttctctgcccataactgtgctcacgtctcatcccatgtgccttaggtgatcaccattttcacttataaatagacgtcaagcacagaagcattgtcatcctgcacttccagagtgttgggctcagcggtcaagtagatggtcccctcttccaaggtaaatgttgaactggaaggtaaccctttgctgtttgaatagagtgtaggcctgtcgtgtggatagtgctcattgacgtataaggaagaagatgaaattgtggttgccaaggaagcagcttcaaacagtgatggagtgctagggaccaggtctggcctgtgtcgggatcccagggcttcttcatcaaggctgctaaaactttgtccttcagtcagcaaatcccgcttctcatccttccattcctggctaattgaggacacaatctcctgtgaagtggcctttagggcggcgattgaattgcaccgtttcttagacggtgaagccttcaaagcttgaattttcttgaaaactctggaattcatgaacttaagaaatctgtctgcataaaagcttggtctatgaacagaaacagtgtccccatcataaacaagagctttcccaggaatgttctaacttcttcattaacctatatgattgcagaatgtcaataatgcccataaataaaagtagtttttctcccctatggcttttagctggaatgcctcccattgtgtctgggttctctgtgattatcccatctccagatttccctggaccctggatagattccatggctgttgagtagagaaccttctgcatcccagtccgcttagcatcaggcacattttgtggggtctcctcct

SEQ ID NO: 267249 - DNA, 685 bp, Homo Sapiens
  misc_feature (493)..(517): n is a, c, g, or t
cttctatttcctatattcatcataaacttcatgcttgatgttgaaattgttttctgaaaatagagaatacaaagaggagattttaaaatgtcagtggcagccccacactcctttttaatcttatttcctgatatcttgagtttacttggacgtagagttttccttgactatggttatttctggtagtagcagctccagattaggcaatggttttcttcagagatagcttagagtgagccccagaacaaggtcaatgcgaagattgcttgtgtctgcgtgtccagggcacagtgatcctcatcactagccggggggctccgtgaggatctgctcctggtcgtttctgttctgtatcttctctgcagcccttactgaagccgttaccaactggcacaattcaattcctactgtacccatcatgcacagatggctgaagtattgagaacgctccagtgaccgggaggcaatagtctgtctctctgtctttctcatnnnnnnnnnnnnnnnnnnnnnnnnnaccttgttgcttaattttcagagagtctactttcagaaaagccttcaggaatacatcatgtacaaaactgagaaattacctgaagtatctttaaatttagtaaaaagttgcattgttttttgaacatcacacttgaaaagtacatgaatacaaacatacttaggaaaa

SEQ ID NO: 267250 - DNA, 774 bp, Homo Sapiens
  misc_feature (361)..(361): n is a, c, g, or t
  misc_feature (425)..(425): n is a, c, g, or t
ctaggcaatttttacaactgaaagaaagaaaattgtctacataaaatagcttagacatagttaagcctttattatctaggcatttagcataagttccataaaataaagtttcagctttataaactaatggttcatttattcagagactgatccaaaattaaattagaatgagtttgtctatagttttacactataggacttggttgccccaaagtgcctttactgtgagctctgcttcgtgtgccttcatgatctgcaaggcgccacaggagactcaatcactggagctgaagtggcagtttttgcaccagtagagctgttagggcagctaattttacagcctacaatgcaaattgttggnaaatacccccgggtacattacttccagcacattaatgaggctgttccacaaagagagtttattnacaataagagatagatgtttattagatcagtaatataattatagaacatgctgcatgggaaaggcctctgggagccataggcaggataattttgcaggcattaaacaaaacaaaaaagccaaacatcattatcaaaactgccacatttactgtatcacagttatgggtaaatatccacactattaaatatccacattattaaatatccacattattttcctttcaaaaatgatgcataggcatgctttctgagcttacaagcaatgaggtttgggggtgggggtggcaaaaatgaaacaaatcaaactcagagaatttactgttcatcttaaataagtcccacttctaa

SEQ ID NO: 267251 - DNA, 727 bp, Homo Sapiens
ggaagtttagcttggaagttaaacattattaaatattaaagaggaagaattttaaaaactaaaataagcaataactatagacaataagaatgttattaccttcaggtcgatattgtgcaacaattgtgacagcctggccagcatttttcaatgcagctgctgcctgctcatgactagcagctctgaggtcaacactgtttacctgtaaatcaaaccaaatcttaatttgggagaaaagaatcactgtgattagaaatcacaatagtctattctttgagtaagcatgtattaaaaaattagttgcaataactttaccactaaaatgtttcttgttctgattgactaaaaatatattgtgtagtaaaacaaaatattatcattcaaagctattttatttactaaaaccaccttgcttaatgtcaagttagtaaaaccaaaacattttcccctagaaggctgggtatcaatccattgagaaatgtaccttaatttgagaacctgaaaaatcaagtggcatcattttgcacactttattttgctaggaactcaagcaatgggagggaaagtcattttgcttgtagcatccatttacctcctgccacattctcacgcctactgctcaattcagttccaattatttttcttcctgtacaaactaaaacttccattcttttggtataataggaaagctattatttagaaatattaaaacagctcagatttcaag

SEQ ID NO: 267252 - DNA, 907 bp, Homo Sapiens
attccacagtaaatcaagctacagcctattctacctatctttaggcagtgtcttttatgaaatttttttcagaataactctatgaacaaaagagcccaggttgttagcaccattaaaatgtgtgtactacataaaaacaactagacattttccatggctctacatgacacattttcaagtttgtggtataagcatttacaattcacaccatatgtggtgttcaccttttatcttgtgtcctgctcaccaatgacattttacttacacgtacttgttcagtaataaatctgtacccaggaaagacaacataagtatgaaatctatacactgaagttagccaaaagtgagcatgtgttttctgctttaatttactttaatgcaaaaacagaaatgactatttcttaaagtgtatattttaggagaagatgtttcaaatgaaaaagagcaccacaattgcatcaatatggagaaatagtgaaaatcctatcctaacttcttggtgttttcaatcttttagaagtgctggcaaagtcatatatctggtttgcccaactgaaccttctcatctgcatcttcccaaagctttatagtagtcttttttgatggatgccatttgctcttccctccactcaggtttatttttctttgcattcataaagaattcactgactctttgttctagttgatccattgcattctgcacctgcaggtccatctcgcgcatttccgtgaagcggtcacgcagatccataggaagctgctcaatcatttccagatagtcttctaggtacaacatcgcggcccttagagctgagggaacaagggggtccaggggtttatttgtgtcaactcgtgtcgccggagttttgtcccctccaatatggcgcctccgctagcagcacccgct

SEQ ID NO: 267253 - DNA, 387 bp, Homo Sapiens
  misc_feature (25)..(25): n is a, c, g, or t
  misc_feature (67)..(67): n is a, c, g, or t
aattccacattgtaggccattgttnagaagaggctgtggcaattattatttcgaacaacctagtgtnattttccttagaggcatctgacgtaagggtggatagaagagcttcagatttaaatttcttttcaggaatatgatctgttgtcgtatggtgagaagttggattatatttcctttttcccactggagtatgtgaaatgaagcatggtgattgttcactggctgtgaaggagtgtctaattccaaagatcgcctctctaatatttctgtaattccagcattatcacttccagctccattttaaacttagccagttcctgatccagctttctcaagtgtcgatctaccaagtcatatatctggtttgccaactgaaccttctca

SEQ ID NO: 267254 - DNA, 395 bp, Homo Sapiens
  misc_feature (378)..(378): n is a, c, g, or t
attccacagtaaatcaagctacagcctattctacctatctttaggcagtgtcttttatgaaatttttttcagaataactctatgaacaaaagagcccaggttgttagcaccattaaaatgtgtgtactacataaaaacaactagacattttccatggctctacatgacacattttcaagtttgtggtataagcatttacaattcacaccatatgtgggtgtttcaccttttatcttgtgtcctgctcaccaatgacattttactttacacgtacttgttcagtaataaatctgtacccgggggaaggacaacattaagtatggaaatcttattacactggaagttaggccaaaggtgaggctgtgttttctggctttnattttacttttatggca

SEQ ID NO: 267255 - DNA, 641 bp, Homo Sapiens
acataaatacaaactggagagtattctataattttggacacagcatttaatacaagaaatctttgaaacatcagacagtggcaaagacccacctacccttctggtgatttttcatgggccctgctgaatagcttgagttcacaaaatcaaattcctatcccaatatgcacaatgccactggatgtgctagatcagatggtcatcacacacccagattaatgatctacagcactacagaaaggtgttacacttgagagccttttgggtccagtaagaggggcaagtgcagcactttgcagctctctgtcccacctccattgcctaactacatctgttctcttggccacatcgtgaactcccaggacatgcttccactagcacagagctacagctggacaagaagcagacccctctctctgcctatccatatgtagctgattatagaattacattctttactttctaatactctcatgtaggttttagcattttcagtatgtttcacatatttgttttattttcaaaagaaagaaatcaatcttttaaaaagttcctggggcagatctggtaaacaaaaatgggagaatgcactcatggtaactgtcacaggacaataagagacaaagggagtccaaattgct

SEQ ID NO: 267256 - DNA, 475 bp, Homo Sapiens
  misc_feature (280)..(280): n is a, c, g, or t
  misc_feature (349)..(358): n is a, c, g, or t
  misc_feature (375)..(430): n is a, c, g, or t
cgcaatgcctggcccagccactcttattcttgtaccacctcttcctcacatccttgaggagataaagaatgtgtcatggctctcctttctgctcttgatcatgataacgttctaaagggtgtggaataaattacagtacagaactggtgtgtgctatgtgacatgagaggtactgagattagtttatggaagtaacagtgttatagttcctttataaattatttttctctaacttcatatatgacatagttgctaagtcattttgggaagtgttcgattngtgtatggcatcaccttgttatttggggcaaatacaatatatacaaaaaaatattacacatacataacnnnnnnnnnnagacagtgtcttgctgnnnnnnnnnnnnnnnnnnnnnnnnnnnnnnnnnnnnnnnnnnnnnnnnnnnnnnnnttgggcttaaactatcttcccgcctcaacctccactacaagcagt

SEQ ID NO: 267257 - DNA, 708 bp, Homo Sapiens
agatgacagtgtaagacagtgaaaaagaggggccagttggttatatctgataacatgatcttacaaactctctccatttaaaccccaatatgtctgcatttctccagccctcgtttcccagaggctcactttgctcatggaggcctttgttgccaccagctccatcctactttatatttcctcatagcagcacgtgccctgtgctagatttgcttttggtctgtgctcactggaatgtgagctgcatgaaaaccttttgtgcgctgctgaagctctagtgcttgcaaatgtcgggtacatagtagccacttagtaagtattaagtggattgaggaccatgatcattcattgacagttattaggtttgccttcagctctcagtcccgtgggggtacatggacacataaataggtcatccaagtttagtgagaattggtgggaaggcaagaaatggaaataaggaaggatgggcacttggtcaatatttacatagactttacccaaatattgggctttttgtaaacatagaatctgttgcttcttaaagcctaagcccgttggaaattggggtaatgtgagcaatttctttctttccatcaaagaggtggtatggcatgcaagaaaaagcaagattcaaaactttaatagcatttgtcttgatgtcttgctttagaggactctaagacaattaaaaaatacaataagagt

SEQ ID NO: 267258 - DNA, 808 bp, Homo Sapiens
tctagctctccacctgctcgctatcatgaaaagcacttcctcttcccttttgctttatctcttgtcttcctccacattaatccagagcacatacacaaacatgtacataccttctcccaaataagtacatacctgcatctatataagtgtcacgtcttcaaccttacctctccccctagacctaactcactttttaaaaaaaattcccacagttacagcatgtatcacttaatttattctctacctatggtttgtattgttttgtgttgtatatcttatgcttatatggttttatatggctgacttaccttcctggttgtaagcttcttgagatcagggatttaattttttctcatgtatctctcgtatagcccttaccacgttggtaaatatgtagtaaatgcttattaagtcttaaaataagcctgtcctgtggagcagaaacgttcctcaggaagtgtcttatcgagtgttccccattttacaaaagagaaaattggaacagtgaagtgacccattttctttatgacataactggtgagtagcaagccctgaaccagaacctagggctcctgactcttagttcagtgtgcctgttcccaggcagccttgaccacgctgatgctcagggaaacactgccacgagaacatggcatttactgctgctcacgtggacagtggtgatatccattccctgaacaacagcctgaagttcttcccagcattccccatttttcatcttgcctccttaactttataaaaccctctctattcaggaactagggaatgaatgagagtcctctctcat

SEQ ID NO: 267259 - DNA, 950 bp, Homo Sapiens
aattcggcacgagcggcacgagaaaaagtatggttttcatttcatgaatggcgagtctgaagttcagagaggcttaccacatgtctaagaccacataccttccatcagttcttctatgctcccttttcacattctcagatctctgaaatcaggatgctttttacaattggcagtgtcttacaatcaagtggaagtatttttctgtttttagtggtatataaaataatgtatcttatattagcttagattcaatgaaatatggtagtcagtattgaagtcaaaattgaaacatatttcaaaagtctgtacatcttcgcttttcaaggagtttattatctagttggagaaaaaaataagtaggaaaactcccacaaatctttctcaaatacagagtagggtttcatgaacactgagtggaggccctcactaaagctgcaggggtacatgactctgaagggctgagtggaggagccacagcgtgggcatttatgttgatctcagcaagaaagatttggatggatggaaatatgagaagaatggagaggagggaggactaggttctagacgatggcaaccctgccgactcttaaatgcaggtctgagccacaaggctgagtttggtggagatggttgcttggtggctcccctctgactctttcccttctccttctcccatggtaaattattcttccaaattctccctgtgttcaccattataactgttttctgctgcaatctttttctgggaaagttccccccttcctacctcctgcccattcctcccaatcagttcagctcttgtgtgtgctggacagaaatccctcttggcagcctaggcaacatagcaagacccccaactctatatatttttttaaattagccagcatgataatgcacacctatagtcttatctactctggaggctgaggtgggaggatcacttgagccca

SEQ ID NO: 267260 - DNA, 789 bp, Homo Sapiens
  misc_feature (246)..(246): n is a, c, g, or t
  misc_feature (250)..(250): n is a, c, g, or t
  misc_feature (314)..(314): n is a, c, g, or t
  misc_feature (320)..(320): n is a, c, g, or t
  misc_feature (323)..(323): n is a, c, g, or t
agtgtatgagaatcattaaagcagaagcatttttcttaatgtacaaggttctatacaaatgcaagggaattaatgtataacatatatgtggggctaagtctctaaaacaacataataaaagttgtttttattttagtcaatcatttaggtattgtgtctacctgatagcatgtaacaagattgaacacttgtgtaggtcgtatgtgcctttaatctgaggttggcctcagtgacaatcaaaattancagntgaggaaaaaggtcatacatttttctcttgcccttgctggaatagggatcaagaggaatataanagcagnggnatatctggatttcttatactcagtcaaccacaacatgcccttagtactgaactagcccagggtttcaatggaactcggagatctcattcccaaggctggtcctggttgaagggagaaggtcaaaaaaggacgtgtcttctgaaaggcattacccatggaaagccaagggggagggttgcccactaggaggagcttcttttgtagaagccagaatggaggaaaggggctttctgacttggagcatctgaggaaatagattatttgaggatctagtactcccagaataatctgtaaccacaagaaacacatttcttgaactccagcgccccagaacaggatatccatatccaatcccatcgtatccatcctggatgttatgaatttccagagagggccacttctacccccctaggagtcatacatctggctacttatttgttaaaaataaaattctgtaccatttata

SEQ ID NO: 267261 - DNA, 750 bp, Homo Sapiens
tcggcacagcggtgatgtttcccgcctccctgtaatcccagcacctagtagcgtgcccagcaagtgaatctctttgtcaggtagttaagacagtggattaatatgaaataaaaatatccctttggcgattcttttggtcacactgtgttatctcctccaggcaggaaaaatactattgtattacaaggctcggaccaaagacatcctgattcgattcactgcttggtgttgtattcttgtaagtaagcagcattcctcgctaaaattcctttccttcacatgtatagatatttaaaaggaataaaatgtttagcaacactgagctagccattgtcaccacatggcagcaggtaccattttcttcacttgaataacagagaggaacaaatctttccacctaaatgcacagatttattttcttaggaaaatgtctttatcaataaggcagtgtttgccatcagatagcccggaatgcctgaagaaatgtgaggtatgggctctgtgtggagaggcgtatcagagagactgggcaaatcagaccaggttgcagacatcaacttccagattatatgggaaagagagttgcaaggttgactgtttgttcatttcatcctgaccgcagccatgcctcctcttcagagtcactgtcatttaatcagtaagcttaccctcttcaactcagtagaatggtgaagagattttgggagagtatttttcagttcatacatttaaaaaaatatgtttccattt

SEQ ID NO: 267262 - DNA, 782 bp, Homo Sapiens
  misc_feature (127)..(137): n is a, c, g, or t
  misc_feature (417)..(417): n is a, c, g, or t
  misc_feature (580)..(595): n is a, c, g, or t
  misc_feature (597)..(738): n is a, c, g, or t
catagagacctctactgggcatatctatgctaggttttctcagacttctcagtcactatgtctcattaactttttaatcttataagaattcctcgatttctgaactgcggatagcagatagtgttcnnnnnnnnnnnccagccgagttaaggatttcttactcacttaatggtaacaatagtagcaataccacctgccactaataatagtgatttaaaagggattataggcagaaatgtaagtagatatgtctgttcagactgctgtctgtcttgaaacaaggttatcttttcaatactcatagcttttagcctttagcttttagtcttattatttgctaggaacacattctgattttggacagcttctaacattttttgcagatgcatgtctgcctttctggaaagcgtgggatgnaaagccaaatggcaacatttggggggaaattggtgtagggtggaattttactttttcttactggcagagtatgtgctaagtattcatataaattagagatggtataggaggggaattaggtggtttgaagattaagatgtatctattcccagcactttgggtnnnnnnnnnnnnnnnnannnnnnnnnnnnnnnnnnnnnnnnnnnnnnnnnnnnnnnnnnnnnnnnnnnnnnnnnnnnnnnnnnnnnnnnnnnnnnnnnnnnnnnnnnnnnnnnnnnnnnnnnnnnnnnnnnnnnnnnnnnnnnnnnnnnnnnnnnnnnnaggctaaggtagaaagatcgtttgagctcaggaagttgaggctg

SEQ ID NO: 267263 - DNA, 349 bp, Homo Sapiens
  misc_feature (45)..(45): n is a, c, g, or t
  misc_feature (71)..(122): n is a, c, g, or t
  misc_feature (256)..(256): n is a, c, g, or t
ccttacccttgtctccacccctttgtaattttatttatgtatttntttgaagacagggttcactctgtccnnnnnnnnnnnnnnnnnnnnnnnnnnnnnnnnnnnnnnnnnnnnnnnnnnnntgagctcaaacgatctttctaccttagccttccacctcggcctcccaagtagttgggaccacaggttcacgccaccatgtccagctaattattttgttgttgtatttttttataggagagggaaggtctcactntgttgcccggggtaggtctcaaactccgggggctcaaggtggatccccccatccccaccacccaaaggtgctggggaataggatacattttaa

SEQ ID NO: 267264 - DNA, 892 bp, Homo Sapiens
  misc_feature (322)..(322): n is a, c, g, or t
  misc_feature (626)..(750): n is a, c, g, or t
ttgtaatgttgtgccattgtatcaccaatatattgctttaatcaggaagagaggatcctgtattccagattccatcttgttctcagtttctcaacctttaaatgtatttgttatcttggtcatctctgaatctgatggctaaaatctaatctaacttaagatagttttttttagtatttgaattccgggtctagtgtgctttccttcacttgtgttcttcaggccgacagtggaagttccccagtctttgggtttgcttagtttgttctttataatgtgggttatttttctctaagcatgttgtagttttgtaatgtccttncttaagttaattatcaccttttacagcccaagattttgtccaggaatggaatatttttagtagtatcctactgttaaaaacatgagtcttagagagtaaaggaaatagaactgcttgccagattgtttttcattttcatcattatgagtggcagcttttgtaaaacttctctttaaccatcttcaagggataacctaaacatcttaattactaacctttccatttcccagaatgccatcagtatttagttttgaaatacccttttaaaataatgtgccagttaccttttaaaaaaaattgtttnnnnnnnnnnnnnnnnnnnnnnnnnnnnnnnnnnnnnnnnnnnnnnnnnnnnnnnnnnnnnnnnnnnnnnnnnnnnnnnnnnnnnnnnnnnnnnnnnnnnnnnnnnnnnnnnnnnnnnnnnnnnntgatgcattataattttcatgttttttaaaaatgtaaatatacatgtggttcaacagagaaaaatctgaagaaaaacttaaagcatttttggtgatgatttgcccttactcatacaaaatcataattgttgacttaatgaac

SEQ ID NO: 267265 - DNA, 809 bp, Homo Sapiens
ctgctatatcacacaaaatttccagtaaaaatgtacaaattaagagctcattaattgttggaagtagccctgggtttaattgctctgatgtcctaactaatgatgatcctaatattgaactcactgctgctcatcggagtcctagatctccatcaggtgggagaagtgggatttgttggcctacctttgcttcagctcataacatggcaacccggaaagccccatgcaggaatcatgagttacaatgccatcagtggccttttggacatctcaggcaagtacacagtcttttacaaatcttctcaattaatttctgtaaagaatatgtagaggataactaataatgtttcattgttagtaaaaatgatttaagtgaatttttatagcaatctgctcaatatgacaaagaaatcagacatcagagtcaattttgagaatggtttcttggcaggattcttatactgtatgttgaagaattgatgttaaattttccttctaaaacaacaacaaaacactggcatttgtgatttaatattaatttgtataatttgtaaatgccctttcatgtaagtaggattatatattatcatccctttttaaaattgaagaaccttaagctcaaagaacttagtgcctggccaaattcccacagctattggcacagctaggattagaatcaaaatcttctgattcaaactccactgctctttcactgaaccaggatggctgcttagaaatgtaaaataattatatataaattaatgtagtaaacacatcaattatttttatttgggcctattaaataacac

SEQ ID NO: 267266 - DNA, 629 bp, Homo Sapiens
aaaacctacatcctgtttaggtggaaagtatctgagacttgagcacagccatagtctcatccaggtatgacatgtgccactgtgtctgaaattcctgagcaccgagggccgcttcaggcaccaggcactttgccaacctgagagctgtatggggctggactgtctagtctaactaggcagtgaaccctgtcctgaacagagcttgtttgttcataaagcactctaaagcagtgacttttaaatcttgatctgtgcataatctcactcctcccaaagagtcatcaagggagagcaaacacccaagggtaacgttggctcacgttcattttgttgttgttgttgaatttttgcttcctcctatgactaagcagaaagagagaaaagcagtgtttgggggcctcttctcaggctgtgtttaaacccaggtcacttccctcaacaggaaaatggattttgacaggccatcttgcttagagatttccctaatcacaccataattaatgccaaatggtttctttgctaaccttagtagcacttgaataattaacttttactcttttctttttttaaaagatacctgcgaatccactgaaaagtacattaaacaaaacagtatagttttgttcccc

SEQ ID NO: 267267 - DNA, 545 bp, Homo Sapiens
  misc_feature (162)..(257): n is a, c, g, or t
  misc_feature (261)..(281): n is a, c, g, or t
  misc_feature (327)..(377): n is a, c, g, or t
tcactgatagcctagcaatacccaaattagaatttgttggctatcaataaataatattttataagcaacagaaaccatttaaaaacttggaagaattgtgataggctagctaaaatacaacctacaaaataatttttgtaaggccaggaacagtggctcatnnnnnnnnnnnnnnnnnnnnnnnnnnnnnnnnnnnnnnnnnnnnnnnnnnnnnnnnnnnnnnnnnnnnnnnnnnnnnnnnnnnnnnnnnnnnnnnntccnnnnnnnnnnnnnnnnnnnnnttagctgggtttgggtggtcccagctactcaggaagctgaccccannnnnnnnnnnnnnnnnnnnnnnnnnnnnnnnnnnnnnnnnnnnnnnnnnnagtggctggagaccccgtctcaaaaacaagaacaaaaaataatttttgtagctgtaatgcaagatagtgtttatttattagtaaagaatgttcatagtggctgggtgtggtggttcaggcctgtaatcccagctactcgagaggctgaaccacgataattgcttgagc

SEQ ID NO: 267268 - DNA, 394 bp, Homo Sapiens
gagagctagtaaaaatattctcttaacttactgagagttcagttttaataggtgatgttaattagaaaggatctatactgtctagtttatggaggtattaaagaatttgacaattagataaaatagaaaataattgcaaaaataaatatatgtttctttttatcagctcacctttgagtttgtagttttccaaatgaaatttagttcgtatatagtctttgtactcaggaactttgggatgggagataaattactactaaatggaagcggcagaatgaatacttcatcaacatgtcaggaaaatgcaaaggtcagtctttaggaatattgacacctaggcttttttcttatttcagacatttcagggataaaattaaaggctcatccttctgtt

SEQ ID NO: 267269 - DNA, 634 bp, Homo Sapiens
ttaagatacaaaggaatgcaaaattaaaaaatgatgccaggaaagtaaaacccagacaccatttcgttatcctgatatctcacatagggctctaataaggcaatgtggtgttgaacaaaagctcatggttcatttaacttcctgatagtttcatattcagattgaaatctgccaataaaaacatattgaaaatattattagataagattacccccagaaaaaaggcaaaggaaagtaacagctccaaagaaaacattcgatgtgtttaaacggtgttgaggcgccccttgctggcatatgtgtgtattatccaactctatctgcatttcttgacctttttttggtaaatttggtggtgcaaattagttctatattttatatttttatatatgtctcttttttgggtgttgcttgaaatggtgtaaaatgtgattcattctccagtttcttccacgcgtcttaatttgtcagagttttcctcagttcccttttctctgtgaacttttcatctttccctgcctggtcactctgtccttttactgaccttggctttactttttaaacaattggttctacgtcctgtgaggtttgggttttgtgggacttggtgacagccctcctgtgactgcctttg

SEQ ID NO: 267270 - DNA, 686 bp, Homo Sapiens
  misc_feature (414)..(585): n is a, c, g, or t
aaatatccaaactatatcactcctctctaaaccgtttagagggttcaaactttgccttctccagatttgcctcttccctgagaccttccctgatagcttcccacacatactgctctccccagtccatcaatgaattcctgcatccaggtggctaatggttccatacttacccttcagctgtgaccagttttgtgtccacctctgtcttcctccctctttttgcttagatgacacccactcaacctctagatgtcccctgctacaggtgggatgcccttgttatatgttcttatagcaccacctgtcttcccttcatggcacttatatttgtaaatgtattcatgccatagagtactgcatgaaggcagtcgagtgggtggttcaaacgtagaccctggtgtcagcctgcctggnnnnnnnnnnnnnnnnnnnnnnnnnnnnnnnnnnnnnnnnnnnnnnnnnnnnnnnnnnnnnnnnnnnnnnnnnnnnnnnnnnnnnnnnnnnnnnnnnnnnnnnnnnnnnnnnnnnnnnnnnnnnnnnnnnnnnnnnnnnnnnnnnnnnnnnnnnnnnnnnnnnnnnnnnnnnattgtacatgggattatttgatgtctgtatcccatcccccatcagacatgaaaaaataggtctgcttttgatcaccattttacacttaaagaaaagggtca

SEQ ID NO: 267271 - DNA, 776 bp, Homo Sapiens
  misc_feature (602)..(602): n is a, c, g, or t
tctgggcgcagcaactgctcctctgtctcatcaggcagtgtcccctgtgttcctgacctcctgaggagctgctggatggcttagccccttgacactggagggctgaccatgagctaggcaccaccaatcaaatgcacataatcaagactttaaattggaaactagtgatacatcaaagcagaagtcactcgcaatgggaacaactccatccagcttgctgatggcatcagtgggcagcagattcaagggtggtttccagcatctactgtcagtgtggcatgaggacaagcttcagtatctgcacccagcaggagcaggcactgggattttcaccaggccagttctccagcacaattttgcatattgttcctggcttcgtagcccctgagcctggcccctggacctttctggaaattctgtgagccagggccagcttcatagctatgcaacctgtgccatcacacaggaccccaggttcagcacggccctgtgcttggtttaatgctctgctgttgccatcttgcaattcttacagttcttttaacaagaggcctcacctttccattttgcttggatcttgaaaattatgtaaccaatcctgnctatgagctagctaatatgctttaggtcagggagttcttaacctcttatgctcatgagcccttggtagtctggtgaaacctataaagcttaggaggaatgtttttaaatgaaatgcacaaaatgaaatacataggaaaccaattatattaaaatatagtttaaaatttaaaaaa

SEQ ID NO: 267272 - DNA, 390 bp, Homo Sapiens
gaacagaattaagtcatctcagctgaggccatcctagaccagccagctgccagctgaccaacaaagctcagctcagagaagccaaaccacccagcttatttttaatgcctattaaaaaaagttttattgaagtataacagatgcacaataaactatatgtatgtaacatgtacagtctgctaagctttgatgtatgtgtgcacgcatgagaccatgaacgtgatgaacgtatgtatccattatccataaaaattttctgaagccccttggtaatccttcctgctggtccctactggtccccaaccccaggagaccacttccatgctgttaccacacgttagttttcattttctaaattttgtatgtatgaataaaatagtatgtactttt

SEQ ID NO: 267273 - DNA, 457 bp, Homo Sapiens
  misc_feature (362)..(362): n is a, c, g, or t
ttatggtgatgtgataaccccagaagaagcgtctgatttttctgctaggtcatgagcaaatggggatcccacaaaggcacacacatggtgaagaatcactccttctagatctgctttcttttctcttcctgtctcttaggatagcttatcctgtggtgcagatggcctcccaaagggctgggattacaggtgtgagccaccgtgtctggccccacataaagtttaggttgggatttttctgtttcttcaaaaaatattgtgatcttgatataggattgcactggaatctgtaggactgcattggggtagtattgggcatctttacaatattgtcttccccatccatggaatatgaagtatcntttccatttactgggcatctgtaagttctttcagcagtgtcttgtagtcttcattgtacaagtcttttgctcctgtggttaagattattctgcta

SEQ ID NO: 267274 - DNA, 452 bp, Homo Sapiens
gctcaggcaagcaccgtgggtgtggggggcgtgtccctgggagcgaggctgagttcacggagcatctgctgtgtgccgggccggtgctgagtgattcccaggtctagcgccagtcccaacacccaggaggctggtgtctacggggccacatgtctgaggtcaccgtcagtcagcggcagagcccccctccacgccctggtgtgtgtcaccttgacaggcaccatccatttccctccctggtgtgtgtcaccttggcggtcagggtctccctccctcccctctggagtgcgttcacctctgtacccttctcaaagagactcacaacctaagattagacgagccccagcccagtgtcggtgacctagtgccctcctcgctggtggctggaacctcaccgggtggctctgcggtgccggcttcagaacccaccacgccgagccctatgcagtctc

SEQ ID NO: 267275 - DNA, 402 bp, Homo Sapiens
  misc_feature (218)..(218): n is a, c, g, or t
  misc_feature (231)..(231): n is a, c, g, or t
  misc_feature (286)..(286): n is a, c, g, or t
  misc_feature (328)..(328): n is a, c, g, or t
ttggactactaagttgaggcctctgccatgagcagcttcagaaggcctgctagtgttcccttctccttgcctgcatgcacagaaggccacacaagggaaacagccatggccagctgataagaacaggggccatcatgcaagcagaaggggaggacaaggccaccttccaacaggcactaaagtaacaatgagaacaacaaaaacaaaatacatagganaaggaaaaaaatnggcaaaattgcacttcaggctttaatgccctccttactttcaccccagataatgnaaaaatttttcctcttccttcgacagagcgtaaatgatatgncctggctgggcgcttgtgtacgcctataatcccatcactttgagagcctgaggcaagaggactgctggagccca

SEQ ID NO: 267276 - DNA, 959 bp, Homo Sapiens
gataccaaaaatcacatcctactatacagttgttttggaaggctttccacaaactaaccttggatgaaaagaaaaaattcctctttttccttacaggacgtgataggctgcatgcaagaggcatacagaaaatggaaatagtatttcgctgtcctgaaactttcagtgaaagagatcacccaacatcaataacttgtcataatattctctccctccctaagtattctacaatgggaaagaatgggagggaaggcacttcaagtaggccatccaacaacaacagaggatttgtcttcacccatgcttcacacagttcataatcacctctgagagactcagggtgggctttctcacacttggatccttctgttcttccttacacctaaataatacaagagattaatgaatagtggttagaagtagttgagggagagattgggggaatggggagatgatgatgatggtcaaagggtgcaaaatctcacacaagactgaggcaggagaatagggtacagagatagggatctaaggatgacttggacacactccctggcactgaagagtctgaacactggcctgtgattggtccattccaggaccttcatttgcataaggtatcaaaccacatcagcctctgaatggccatgggccagacctgcactctggccaatgactggttcattccaggacattcatttgcataaggagtcaaaccacaccagtcttggattggctgtgagccaattcacctcagtctctaattggctgtgagtcagtctttcatttacatagggtgtaaccatcaagaaacctctacagggtacttaagccccagaagattttgctaccagggctcttgagccacttgctctagcccactcccaccctgtggaatgtactttcacttttgctgcttcactgccttgtgctccaataaatccactccttcaccacccatt

SEQ ID NO: 267277 - DNA, 471 bp, Homo Sapiens
tggtctcaggcatcacatgattacaggaacttaagaaatagacctggatggttaaggagactggactgaatgaacagtgactctaagagccttgaaagtctggtagaaaagggacatttccagtctttgatagtaatcctttctaaaattggagagcattaaatgccctagtcatttgaagagtaaggttaattttgcctcaactttggaagggattgttgaaagccccttgttttatagttagaaaatcccctcaaattgtaacttatcccaaaggtttgatgggaccaaaaagccctctgattccatgttgtcaagtaaagtgaaataataaagatcttgtatttaaaaatcttactgttagtaggcaattgtgagttcaatttaaatcaaacatttgcaattggaaataaccaaaaatcatcaaaatggctacaaaaaggaagaaatcacttaaaaaccctgaaaaca

SEQ ID NO: 267278 - DNA, 564 bp, Homo Sapiens
  misc_feature (155)..(247): n is a, c, g, or t
  misc_feature (269)..(338): n is a, c, g, or t
  misc_feature (468)..(468): n is a, c, g, or t
  misc_feature (477)..(477): n is a, c, g, or t
  misc_feature (489)..(489): n is a, c, g, or t
  misc_feature (528)..(528): n is a, c, g, or t
aaaactttaaaattttaagtattaattgctcaggaaaaaattaaaatgctggggtgctgaaatctcaagggccccattacaaaactccttaggaacctcgccctctctctgctgtaaggactggttccagaatgagagaatttaaaagacattcnnnnnnnnnnnnnnnnnnnnnnnnnnnnnnnnnnnnnnnnnnnnnnnnnnnnnnnnnnnnnnnnnnnnnnnnnnnnnnnnnnnnnnnnnnnnngttgctaatgggctgaccttannnnnnnnnnnnnnnnnnnnnnnnnnnnnnnnnnnnnnnnnnnnnnnnnnnnnnnnnnnnnnnnnnnnnnatagtgaggtggcttgagtcagaggcagagtgatgcaatgacttgaaagactttaacccagcccatcacccggcttttgaataccgggaagaccggtcattgagccagggggattgcaggcaggctcttngggaccttnaaaaaagccagnaattggtttttcccctgggggccttcccagaaggggttncggtcccttcccaccccctttttcagttagcctttt

SEQ ID NO: 267279 - DNA, 690 bp, Homo Sapiens
  misc_feature (340)..(340): n is a, c, g, or t
gtatgagctactgcgcctggacagacacttcttgataaacacatgttgaataaatagcttcaaagcacaccacaccacctggtatttgcaacttagaagcctgcttacatcagacagggcatgggacagaggaaaaatacatgggttctaaagttgcacatgttggatttaggccactgttccatcacttacaagctacgtgatctatgcctcagtttcttcacctgcagcataccacagaattgaagaaaagattgcatgcaaaaacgtattatgagacgaatgtaggttaaggcatggaacggtgcctggcacccaaggccatacacattctgtgagnaacaaggaacttgtttatttgcccagcactgaacccggagccccagtacaaaacaggcctacataaagttttgaactgcatagtgggtgctgcctacacagtgatttcaaaacctggtgaacgatcaaaaagtagaggtgactacggaaacagtcaataactaataaagaacaggatgagtcacgttcacttagagaacatcaatgcatctcaatgtatctatctgggatcaagatgaaatggtcttgtattcattatcaaataaagtcatgtgtcacttgacaacaggattcattctgagaaatgtgtcattaggcaactgcttcattgtgcaaacatcacagagtata

SEQ ID NO: 267280 - DNA, 423 bp, Homo Sapiens
tgtgagcatacatgcacaagtctttgtatggttatatggtttggctctgtcctcgcccaaatttcatgttgaattgtaattcccagtgttgggggagggaccctggtgggaggtgattacatcatgaggatggatgtcccccatgctgttctcatcatagtgagttatgagatccggtggtttaagagtgtgtggtactctcccccctgctcactcgctctctctcctgctctgccatgggaagatgtgtcttccttcactgtgagtcaatgaaacctattttcctcataaattacccagtctcaggtagttatttatagcagtatgaaaacagtctaatatatatatggacatatattttctttcctttggggtaaaaacctataatagaactggaatcttatcaatgtctgggaatatttg

SEQ ID NO: 267281 - DNA, 466 bp, Homo Sapiens
  misc_feature (44)..(44): n is a, c, g, or t
  misc_feature (67)..(67): n is a, c, g, or t
tctaaaataagaactcctataaaccttcactgataaaatccctntcagttttctccagttatcccangtaaccgtcctttatagcaaaaggatccggttcaggatcactcatacccagctgtcatatctttccagtctccttcattctagaagcattcttcattcttccttcatctttcatgacactgacacttttaattacaggccagctgatgtgtagaatgtccttccttttcttaggagatgttttctgtccttccttgaaaaccccactagtgttacctgccacgaggagagctaggcgctctgccccctaccccaagctggttgctctctcttacaacgcttcattaatcaagtacccttttttggagcattgatgatattcattcatccttttagccagtaaatattttttgatgtctattacgtgccaaatgggatacatttaagaacaaagcagacc

SEQ ID NO: 267282 - DNA, 800 bp, Homo Sapiens
cgtggtcaggagtggtgtgggcacgccactgcagcacgtcagccaggaacaggaacttccgtgcctggtcgctgtcctccaggtgggcgagctctctcccggaagcctgagccctcgaaactgttcctactctgcctgttacccagatccaaagtcactcccacatttttgggtatcttaatatcagcaccccactctaccagtgccaatttactgtattagtctgttctcatgctgctataaaagtacttgcctgagatggagtaatttataaaggaaagaagtttaattgattcacagtttcatatggctgaggaggcctcaggaaacttacaatcatggcaaaaggggaagcaagcacatccttattcacatgatgccaggaaggagaagtgccgagcaaaagaggggaaagccccttataaaaccataagctcttgtgagaactcactatcaagagaaccgcagcatggagttaactgtccccatgatttaattacctcccactaggtccctcccacgacacatagggggattatagaaacttcaattcaaaatgagatttgggtgggtcacagccaaaccatatggcatatctgcttggagtaagcctgttatttagagagcattgaaaactagccagaaaggtttacttttaacttagttggctgtaagaaattattgaaatttttttcccgtaagaaaataatacgattgaaataaaagtgaaattcagaaatcaaatacagttatgaggtatatgcaatatgcaaactcaaattaaaaatagtctagagatg

SEQ ID NO: 267283 - DNA, 795 bp, Homo Sapiens
  misc_feature (169)..(186): n is a, c, g, or t
ccaaaactaagatctaattccatgaagtcaaagttcttattagaaataatattacttgatcttttaaaaataataaaagaatgtacactgttaacgttgtagtcctgttactgaaattttaatacaggtgtgaggttgcagtaacctaataagaccaaaatcatttgannnnnnnnnnnnnnnnnnccatgtctgtcctgtctgaacttcggtgactcttcacaaaatagtacggtaagaaaattatttccatccatttcaggcttttgcagactttctgcattaacagagttaggggtaacatgcttagcatcctttgcatatgagagcctttctagccgccatggctggcaggttgtgaagggtgcctactgcaccctggcctgtcctggggagcctagacacgagctctgtgacagccatgctcctggggctgctccctactcctgtttttagaaacaagcatataattacttcattgataacagtcacagtggagcctagcaaccgatgaaaggaaatagagaaagaaaaagagaaagcaggaaaagaagggtgggatgattttttcctgtagggtggagttcatttccatggcttgattttcacacaggagatggtgttgtataattctgttggaactttcttttcagcacaattaagaattataatcaagtaaaatgttttccatttaatccaacatatgttaatttctttttgaattttaataaagttccttatttttctcaaaattgactgctgaatatctgacagcataaatcaattgtattctaa

SEQ ID NO: 267284 - DNA, 910 bp, Homo Sapiens
  misc_feature (16)..(16): n is a, c, g, or t
  misc_feature (30)..(30): n is a, c, g, or t
  misc_feature (94)..(94): n is a, c, g, or t
  misc_feature (155)..(155): n is a, c, g, or t
aaaaatgtgaaaatanctaaaaactaaggnaaatgacatagaacatttgtaagctgtactcaccccactttaattcaagtagagccctctttgntccctacagacatctgttgaatttttaaaatcctcagctgttgtttatcatttactcattntctgagtttttaaaacttgcgttttatctttcctattatatttaatactaacaaagggaatgggcaacacaaaggcaatattcaatgtaatgtatcttacagctcaacagcaccttctgaacaatatctaagtggcagcaggggagctataagaagtcccatatcatggaagaataatggaagggagaataaagaggtgggcatgggtcacatcatgatcaggcagacttctaaaggcctgtgataaaaaacccagacttcgtcctgaaggtgctgaaagccaataaagggttaccatcaggaaccgcctatgttttataaagatgtttatggataatgaattcgaagggaaaacaccacaaggaagatacctggagtaagtggaacaaaatacaagcaaggagcattgttactcaataacttttactacaagtgacagaaaactatcccaagatggcttaagcaaaaaataatttattttataaactcacaaaattatgtaagaaattgagattgcctacagagtacacagcctgagaaaagagatattataaagggaagttagatatcccatcccttagttccccctgccaaggtgaactttctagaaccttataacaaatctcccaccaccttgtttcaaagagtaatttactacaacaattgcataatccacattcattcatttaatgaaggtttaatatgagccaagcaagctctgtgttgatagctgttaggtatatatactggtagga

SEQ ID NO: 267285 - DNA, 598 bp, Homo Sapiens
  misc_feature (312)..(312): n is a, c, g, or t
aaaggtaaggaaatagcttctaactaagcaaagttgctcaaagctggcacatagagtgaggtctgcggctgttctcttactccaaatgtggggtatctcagaaattgccatcctccagaaggctacagtctagctcagactgtgcaaattgttctccatttgccatgcccccatgcactcaacactattccatgtcttccgtgtgctctgggaagctgacccttgtcatttgcatgactgggactctctgctctctgtgtttgtcttggggtggggcctatggaaggctttagcaggatattgggagggcanggaagagaaagaagtcagggtatttcttcttcatgccctacttcggccctgtgcgctggccgtgatcatgtcctttcaggatataactcccttcgccctgttctcctctgtacctcttctgatgcagggctcctaaggaaacactgctccttttccttgactgtttatccctaggggtagtattatattctcaccattgctatcctttgggtgccctgccaccttgtttgctccttaagtctgtctacaattaatgcaaataactcctttattaaaatctctttat

SEQ ID NO: 267286 - DNA, 793 bp, Homo Sapiens
  misc_feature (133)..(324): n is a, c, g, or t
  misc_feature (396)..(643): n is a, c, g, or t
  misc_feature (781)..(781): n is a, c, g, or t
ggccgcttaattaaattcctcatctttcacttagtttttggtgtcatgatgacatagccattggtgctagctgaattgattccggtattattctatatacaaaacagagcttgagtatcctaaactgaaatcnnnnnnnnnnnnnnnnnnnnnnnnnnnnnnnnnnnnnnnnnnnnnnnnnnnnnnnnnnnnnnnnnnnnnnnnnnnnnnnnnnnnnnnnnnnnnnnnnnnnnnnnnnnnnnnnnnnnnnnnnnnnnnnnnnnnnnnnnnnnnnnnnnnnnnnnnnnnnnnnnnnnnnnnnnnnnnnnnnnnnnnnnnnnnnnntagtaacttagctgcatttttgagatcttatatcttaatttatttctatcgggtcgggcatggtggctcatnnnnnnnnnnnnnnnnnnnnnnnnnnnnnnnnnnnnnnnnnnnnnnnnnnnnnnnnnnnnnnnnnnnnnnnnnnnnnnnnnnnnnnnnnnnnnnnnnnnnnnnnnnnnnnnnnnnnnnnnnnnnnnnnnnnnnnnnnnnnnnnnnnnnnnnnnnnnnnnnnnnnnnnnnnnnnnnnnnnnnnnnnnnnnnnnnnnnnnnnnnnnnnnnnnnnnnnnnnnnnnnnnnnnnnnnnnnnnnnnnnnnnnnnagattttgtctcagggtggcaggggggaaattctgtaatgacagatcatatattttgttttgaagagagttgcgtcccttacagcaagattttatcggacagaaacgtatagggtattgaagctcatggtgctagctncctgtgccgaat

SEQ ID NO: 267287 - DNA, 873 bp, Homo Sapiens
  misc_feature (319)..(319): n is a, c, g, or t
  misc_feature (341)..(341): n is a, c, g, or t
attcggcacaggaaaggggctggcctcccaggaagggactattcagaagggcaatgaggttctttccatcaacggcaagtctctcaaggggaccacgcaccatgatgccttggccatcctccgccaagctcgagagcccaggcaagctgtgattgtcacaagaaagctgactccagaggccatgcccgacctcaactcctccactgactctgcagcctcagcctctgcagccagtgatgtttctgtagaatctacagcagaggccacagtctgcacggtgacactggagaagatgtcggcagggctgggcttcagccgnggaaggagggaagggctccctnacacggagacaagcctcttcaccatttaacaggattttcaaaggagcagcctcagaacaaagtgagacagtccagcctggagatgaaatcttgcagctgggtggcactgccatgcagggcctcacacggtttgaagcctggaacatcatcaaggcactgcctgatggacctgtcacgattgtcatcaggagaaaaagcctccagtccaaggaaaccacagctgctggagactcctaggcaggacatgctgaagccaaagccaataacacacagctaacacacagctcccataaccgctgattctcagggtctctgctgccgccccacccagatgggggaaagcacaggtgggcttcccagtggctgctgcccaggcccagaccttctaggacgccacccagcaaaaggttgttcctaaagtaagggcagagtcacactggggcagctgatacaaattgcagactgtgtaaaaagagagcttaatgataatattgtggtgccacaaataaaatggatttattagaatttcaac

SEQ ID NO: 267288 - DNA, 749 bp, Homo Sapiens
  misc_feature (738)..(738): n is a, c, g, or t
cacctgaagaccatccacgcggacaagccccagcagagcacacatgtcagatctgcctggactccatgcccaccctctacaacctcaacgagcacgttcgcaagctgcacaagaaccatgcctaccctgtgatgcagtttggcaacatctctgccttccactgcaactactgccccgagatgttcgccgacatcaatagcctgcaggagcacatccgcgtctcccactgcggccccaacgccaacccctcttgacggtaataatgctttcttctgcaaccagtgattccatgggtttccttactgagtcctccctcaccgagcacatccagcaggcccactgcagtgtgggcagtgccaaactagagtctccggtggtgcagcccacgcagtccttcatggaggtctattcctgcccctactgcaccaactcccccatctttggctccatcctgaaactcaccaagcacatcaaggagaaccacaagaacattccactggcccacagcaagaagtccaaggccgagcagagcccagtctcgtccgatgtggaggtgtcttccccgaagcggcagcggctctcagcaagcgccaactccatctccaatggggagtatccttgcaatcaatgcgacctcaagttctccaactttgagagcttccagacccacctgaagctgcacctggagctgctgctgcggaagcaagcgtgcccccagtgcaaagaggactttgactnccaggagtccc

SEQ ID NO: 267289 - DNA, 666 bp, Homo Sapiens
  misc_feature (103)..(103): n is a, c, g, or t
acttgattgaagaggccattctttaaatgtatcttactgctcaatttcaccattgcctattgtagaatgcgccctgcccgctcagcatttgcctctaggcagnaccaggactccttcccctccccaactaatcttccttctcctgtatcttattccctagggccacttgcacctttcaaaatggataaattaaattcccctgctccccttctaccaactttaacatcatatccttggtgtatgatgccctacttttcattgttttgcctaaataagagtatgcttgggaattttaggcttagggctgggaaaagatgggatatggaatcgtcagctatagattgccggacaagaaattttaggagcagtagacctttcaaccgccctcaataggatggaactgactgtccccacaacctatttccctttcagtggcttgctccagccaaggccccttatttaagagatctttgtgcgctctgaaaaccatgcatatgccagaactaggtgctctgtttcatgaaggcagtttgataactgaatggactttggaagtgcccagtgtttgactattaccctggtgcgatgatcacactgggcgtatcattgtcacatgatcccatgtttgttgatgaaaataaacagtggttttcaaaaaccaaaaaa

SEQ ID NO: 267290 - DNA, 595 bp, Homo Sapiens
ggccgcttaattaaaataaatataaatgaaattaacaatctcggacagcagtttatggttaagtagctagtaaatataaattcaaagaattctgacaaaatcattattacctttttctcaagtcacatatttatttaggaggaaagatgcttgaaagctagctataagaaaaggacaactttagacactgggtgaatcttcagcttaaaaggcccagtgctggatgaatgactcacaacagccaatccaccaaatgcagagctgctaagcagaggcagaaggatgctgctcagaagcacagaggaatttatcaaggctataagctaaacttgctgaaaaatgtgaggctgatttttatattttggtatgtgatggaaaaataaactaattcagaaagaaaaacacatcttcttaatgggttttctacacaaaaacttacattttcattgcctgacatttagtatacagagtaattttccatatctcacttaggatacaaatattgtctgactacttctgttttaagaattataagtagttcagatatacttgaaatattttccaaaatacttcgaatctaatagaaatagattat

SEQ ID NO: 267291 - DNA, 707 bp, Homo Sapiens
  misc_feature (48)..(123): n is a, c, g, or t
  misc_feature (355)..(355): n is a, c, g, or t
cttaaaatgaactgtcatttatttgtgaactctcttcttgtataatannnnnnnnnnnnnnnnnnnnnnnnnnnnnnnnnnnnnnnnnnnnnnnnnnnnnnnnnnnnnnnnnnnnnnnnnnnngtgtgagatggaattagtttaaaattggactggaaaagctctagttttgtctgtagggactttaggtatctcattttgacatttaaatgcagtgagctttattattattgtttaacatctggaagatcccatgacaatatggagggcaagtttgactgctgatggtttctggttggcatacgtgattaggtaggcactctggctcaactgtgttaccccagaagggtataanaatccctgcatgggatcatctgacttgagctctcctgaagccagcatttctctctcagatattggtggcttgatctggaagtgaatcatatcagtgtatgaatgggagtctggaaaactgcctggatttgtgtctgacatagcatatgggcacgcattctttctcttgctgcaccatatcctttgccttaacaaaacctcacacgagtattctctgtggagttttgtgagtattttcaattacatttttgaaattttttcatttggtgatgaaaatgggatatttgctatgatctctgagtccattttaaataataatggctaaggagttattgggcagaatgaaatatggt

SEQ ID NO: 267292 - DNA, 741 bp, Homo Sapiens
  misc_feature (291)..(299): n is a, c, g, or t
  misc_feature (340)..(340): n is a, c, g, or t
ttccatgaccactcttgctcattctgaggtcatctttctataagcttctccagtatttatgtctttaccactttttttagcgtttaactgtgaatctctttgcactatgattatttttaatctctcagtaagactgcaagctttcccagtgaagacgtgtaagtgtttagcaaggaataagatatgcagcagatactggctgaaataattaattataggtttttaaaagtagattattttgggaaaaaaccgtaagagtaaaaaaagaatagtatagtattataactgatnnnnnnnnnttctagtcaaactctgccttttgaaaaacttaaacaatggnaactttgtactgctttgagtggaatatgttgggatgacatatgactgcaagtcaaggcagttcttttctgcccaggccctgagggaaacaaggaaataggtattcactctggtggcaaaacagtgggtagcaagttggaggctctgggtgatcctctggcactcgcacatctgttagttaggcaaaagtgaagacaaaagcatgtggaggagacctttaatacacaaaagcaactgataggttttaagtaagggattagcagaacacatggatggctttatattacactggtttatttgatttcaaaatcagttattttcagtttttaaccaaaaacaaagggagtagtaatagggtttttctttatcataaacaaagagaaattgagaaaaccctcaagt

SEQ ID NO: 267293 - DNA, 395 bp, Homo Sapiens
  misc_feature (271)..(271): n is a, c, g, or t
  misc_feature (350)..(350): n is a, c, g, or t
  misc_feature (367)..(367): n is a, c, g, or t
  misc_feature (384)..(384): n is a, c, g, or t
atgataaagaaaaaccctattactactccctttgtttttggttaaaaactgaaaataactgattttgaaatcaaataaaccagtgtaatataaagccatccatgtgttctgctaatcccttacttaaaacctatcagttgcttttgtgtattaaaggtctcctccacatgcttttgttcttcacttttgcctaactaacagatgtgcgagtgccagaggatcacccagagcctccaacttggctacccactgttttgccaccagagtgaantacctatttcccttgtttcccctcagggcctgggcaggaaaaggaactggccttggactggcagttcattatggtcatnccccaacattatttccnacttcaaagtcaggttnccaaaggtttc

SEQ ID NO: 267294 - DNA, 912 bp, Homo Sapiens
  misc_feature (155)..(155): n is a, c, g, or t
  misc_feature (512)..(590): n is a, c, g, or t
  misc_feature (720)..(752): n is a, c, g, or t
ttgagataaagagtaccatgtgggagacatttatagggctcagtggctgctttattcccatcttccttacctgcacccacacctgcagggcctgtccaagcaattacccagcacccacttcacaccatcacctgaccagagcaaagctctcatangtgatggtgcataggctagtggtggcccctaagacaccaatgccagtggttcacatctgctagccagctcgtctccagaaaaaagtacagcacagaaaatatcacagttctaattgttccatactcagtaagaaccatactaactacacatattcagatgaaaacagtattagaatacaggtattagacttcagagctttactaagccccattctagaaggttgggactaaaatactaaagataaaaggaggaccaaagttaggaaattacaagatatataagaaaaattctagcattatatagcttttagaatttgtctagcaggttttccagtttctaccagaaacccctacccnnnnnnnnnnnnnnnnnnnnnnnnnnnnnnnnnnnnnnnnnnnnnnnnnnnnnnnnnnnnnnnnnnnnnnnnnnnnnnncgggagagaggaaaggaacttcttatatgaaacagggagaaaatctcgttatctgaaagttctccctaaaaggagattgactgcattttcagaactagcaacatgtgatggggccctaacaataagactnnnnnnnnnnnnnnnnnnnnnnnnnnnnnnnnncagaacaatcagagaaagcacattgctaaatatgttcagcacattcaagaagttccaaagcaccttcgcaaacctatcacttgatccccaaggttcccccacaaatttaagtagtatagtcaaagatcctagggccaggaaataaaactctagaaatttg

SEQ ID NO: 267295 - DNA, 457 bp, Homo Sapiens
  misc_feature (29)..(29): n is a, c, g, or t
  misc_feature (81)..(81): n is a, c, g, or t
  misc_feature (93)..(93): n is a, c, g, or t
  misc_feature (95)..(95): n is a, c, g, or t
  misc_feature (111)..(170): n is a, c, g, or t
  misc_feature (283)..(315): n is a, c, g, or t
aaattctagcatttatattagcttttagnatttgtctagcaggttttccagtttctaccagaaacccctacccaaaaaagnacggaaaggaananagaaaggaatgtaaannnnnnnnnnnnnnnnnnnnnnnnnnnnnnnnnnnnnnnnnnnnnnnnnnnnnnnnnnnncttcttatatgaaacagggagaaaattctcgttatctgaaagttctccctaaaaggagattgactgcattttcagaactagcaacatgtgatggggccctaacaataagactnnnnnnnnnnnnnnnnnnnnnnnnnnnnnnnnncagaacaatcagagaaagcacattgctaaatatgttcagcacattcaagaagttccaaagcaccttcgcaaacctatcacttgatcccccaaggttcccccacaaatttaagtagtatagtcaaagatcctagggcccagga

SEQ ID NO: 267296 - DNA, 722 bp, Homo Sapiens
gagaggctacccaggctggtcagagactattacattttatgcagcaaaacccagatgtcctgcagcagatgatgtctgtcctcatgaacaccattgtctttgaagactgtcggaaccagtggtcagtatccaggcctctcctggggctcatcctgctcaatgagaagtatttcagtgaactgagagcaagtttgataaacagccagcccctccccaagcaggaggtccttgcccagtgcttcagaaacctaatggaaggagtggagcagaacctgtccgtcaagaacagagacaggttcacccaaaatctgtctgtattcagaagagatgtgggcagaggcgttgcgcagtgatggcaacactgaacccatgcagtctcgacatgatgagctgaccccgacttttctgacccatgtgcggagcagcctttatcaagagactcctgaaggtctgggtctcaggacagtgatgttggctagcccaggggaatgtatttttcaaaacatacaagcaacagcaaaagccctaacttcttatacgtctagcctaattataagaatttctaacagtaccagtgtaaattcagtcttttctctgaaaagcaaaggatgtgttttcagtctttctatcaaatattatctttgttctcctaatgctctgaaaggatgtagaaacaatatttaaccaaagaacgtaataaaccagtttgcacctaaaaaaaa

SEQ ID NO: 267297 - DNA, 585 bp, Homo Sapiens
  misc_feature (21)..(21): n is a, c, g, or t
  misc_feature (33)..(33): n is a, c, g, or t
  misc_feature (48)..(48): n is a, c, g, or t
  misc_feature (62)..(62): n is a, c, g, or t
  misc_feature (296)..(436): n is a, c, g, or t
cccaagtaattcggcacgagnaaaaaaacaggnaccttcttcaacagnataaaacacacagnacccgcagctttgggaacaggctgatggcccctgcacagtctagtcacaaggcattgaccaagaaagtaatgactaactgcccatctgagactgtgcatgattcacaagaatgtttctttgttttgttttttgagacagtcttggtctgtctcccaggctggagtgcagtgatgttggttcgctgtagcctctgcctcctgagtagctgggactacaggcgtgtgccaccgcannnnnnnnnnnnnnnnnnnnnnnnnnnnnnnnnnnnnnnnnnnnnnnnnnnnnnnnnnnnnnnnnnnnnnnnnnnnnnnnnnnnnnnnnnnnnnnnnnnnnnnnnnnnnnnnnnnnnnnnnnnnnnnnnnnnnnnnnnnnnccacaagaatgttttgatcattatttctcctaattttccttaaaatccctggatctagaggcacaactgagaaaggtggtctttgaatgctagtgcactgccttttgcaggttgctggtttctcgaataaagctaactttgctttcacc

SEQ ID NO: 267298 - DNA, 317 bp, Homo Sapiens
aaagaatcctggattaagccgaggctgagttctctggaggtctggggcactgacgggctactgggtagagggccagcttagggaagggtgtggtctgaaggtatgggtagggcaagacctgactccactcagtgatgtgtccccagtgaggcatcctccctagaacctgtaagtaacaggaagaccctaccctgaacagagctctagggatgaggggagggtttgaacccctgctcgcaggccgaggcaaccccagtgaaagcttggctggacaatatcgccctaccgtggaaatgtcgttaaggactaagtccttt

SEQ ID NO: 267299 - DNA, 533 bp, Homo Sapiens
ccgtcaatgctagaagaacccttggaaaacatgctggcccagccctctagttttacaaataagggagtgcacagccctgagaggttacatggcctgcccaagatcacgcagtcaatggcagagtaaagagcatagcctaggcctccccactcctctagtaatgctctttcatcttctccaacctggctctaagccttgtccatcctgagccccatatctagcccaacctagtccctgaaaacaagaagtggcccttagaaatctctctccagtcccactatcagaggccaactgctgtcttccagtctccttcagcctgtgctcctctccctccctgactgacaggcagaaggtactgtgcctctggatatccccacagtgccctgagctgcatctcttgctgactgctttaatacatcacagtgacattgtgtgtgtctctgccaccagactattgctccttgatgctctgggtcacctgcatctagcatggcatatatctagtgctcaataaatgtgtattgtacagaaaa

SEQ ID NO: 267300 - DNA, 573 bp, Homo Sapiens
  misc_feature (463)..(463): n is a, c, g, or t
gcagattcgaaaccaacactaccccaagtcatggtctgcgaccatggctcacccatgaactggtagttacccgtcagtgacaacagaagtatagtaagcatctagaaactttcacagcaaactgacagttattgtatatctgttgaatctgataacaaaaaattatggcttgtagtttgctttttaatttttctagtgatttttattacatttctggaaattatcagtccatgatggattggccataaaaatggcttcttcactacagtttgagaagagtgagattagaaaataaagataaatgaaaagaaacagaaataaaaattcttatactatttacctaccaccttacatatactgtaggtgaagagggggtattcgcttgactttggagtcagtttcagaatataaacagtcagttctaaaatataaagagtcttctgccttcatcagaaaaaactgncaactaagtttgggtgaagaaagtgaagagaataacatttgtgccacaccttcctcagcaacacacagaacttgtcttcaaagagaaaagaaaggtctgataagacccta

SEQ ID NO: 267301 - DNA, 275 bp, Homo Sapiens
acgcctggctgatatgtatttttataattattttaggtgatatataaataaaaagattacacagaaagtcactgtgtttagttgtccttagtgtatattttgcagctagtttttcttggagtgctcactgctccaagctgggtattctgtgggtgctttattaagatttatttatatggcagttagttgcacctgcactaaaattttttctaggttaggctgcaaaataaatatacaaagaagtagcttttttaaatgctaggaataaccagttt

SEQ ID NO: 267302 - DNA, 494 bp, Homo Sapiens
gtgtgagccaccacgcccagccaaaccttcttttattagtgaactatcaattaactagaacttaattgtcacccagcaaataggcttgccggtttaaaggtttaactgatttccatatactttcctatctttcaaaaaaaggtgaaagaaaattttttaagattttttaagttgcccattataatgttctatcaataacatttcatagatatctgcattttttgctttctgtgcacttcattttaaatagttaacttattttctgtcatcacagaaaatagtataaatgagtttaatagaaatccacaggtgccagtaaaagattagaagattgttcagactgctaaattgcaggctatttggaggtaaagtactccttgcacagtaattccacctcttcaaagcgtccttgttcgtgagaaatatttgccagcactgcactacttagagacaatgaagtatcttgtctacagcttgtcaaaagagctaccatg

SEQ ID NO: 267303 - DNA, 730 bp, Homo Sapiens
  misc_feature (105)..(105): n is a, c, g, or t
  misc_feature (671)..(671): n is a, c, g, or t
  misc_feature (715)..(715): n is a, c, g, or t
gattgcacaaatcctgaagaggggagaagcttcctccacctccaccctcacccctacatcttctctagggcaggagtcatcacagcccctggtttagatgcttcncgctgggtggcccttttgaaagtatgtggaccctaagagacaggagactttgagtgcatggatgggggataatttgcttttgcagaaggacagaaaatttatctctaggttcttcctttattcggcagttaggaattacatcctctgtattgcacagaagaatctaccatattcagagcactgagtacatggattatattcactaaagattggagagctaaaagtttctctgcaagagtgacctgatctagtaagaatgtcaaaattgttactatatttgtacccttgctcttcggtttagagggcaggtgcttccgtgtgtacatagaagcagagcttgttggagaagaggagctaaaaaggaattagattagaatccacctctgtacaatggcaccatctggactcagtctccttcatctctaacactgtccccactttctctgcaccccaaactcatactggctcccaaaagctcattgttaaactttcgagaattttgagagccagttgtaaaacacagccattataaaaactaaatcatataaacttacaattaaacacantatatgaagagccaagataataaatactcaaaactcttcctaantattttgctatggtt

SEQ ID NO: 267304 - DNA, 459 bp, Homo Sapiens
  misc_feature (358)..(358): n is a, c, g, or t
cacagaggggcaactgccagtccggtgccagcgtgccttccaatattcagccatctcctcatgaagcctgggatgtgattcttgtgcctctagctctttcctgaggggcactggtacctccaggacctggagtgtactggaagaaatggtgcagtccaggtacagcatggaccccagatcacccccaccccactccctttcagtgattattgtcttatgaactaggagggggagtggggcagagatgcctctttcatggctccctgcacacacagaacccctttgtactgggcacttctactcccaaggaccctgacttgcacccagcagctaaggtcatctcacccccacctcccancctgcccctgggccagcaggaggtgcttggccatatgtaggcgagacaggacttcttgaagctgaaagatttcccaccccataaaagagccagaatgtgac

SEQ ID NO: 267305 - DNA, 540 bp, Homo Sapiens
  misc_feature (225)..(225): n is a, c, g, or t
tagaagtcttaccatatacatacattgatacccaccctttccccctattaaacgtgataaagtaggcatttctgtataattatgaactcataaatatgcacattttctgattattgtgcattgaattatctctgtcctcaaattcatatgttgaagtcctaatccccagcacctcagattgtgaccttatttagagatgggatctctacagagctaatcaagctnaaaatgaggtcagtagagtggaccttgatccaatatgattggtgtctttataaaaggaggaaattcgctaggcacggtggttcatgcctgtagtcccaactactcaggaggctgaggtgtgaggatggcttgaacccaggggttctgggcagtagtgtgctatgccaattgggtgtccaaaccagcatcaatatgataacctctcaggagtgggggaccaccaggttgcctaaggagggatgaagtgacccaggtcagaaatggagcaggtcaaaactcccttgctgatcagtagtgggatagcacctatgaata

SEQ ID NO: 267306 - DNA, 937 bp, Homo Sapiens
  misc_feature (39)..(39): n is a, c, g, or t
aacaaaggctgacatttaaaactggcccacgggggtggnggagtgggagtgactggagggggtaaaagggagggactcagaagatgggggtggggattaaaacaggaggtaaaagcacatttggggagacagccaagcagcagttataccgttaagcaatgagcagaaaaacaggctggttcattttgggagtgtaaactcatccttcataggatggcaccaaaattaatttaatgtagctctccttgaatgcctgtaatttcactgttagaaacccctggacccctgtcttagttttggcttcttcagcacaaagcacacatgcacagctgtggagtcacctgatcaaagcaggtggctaatctagctatcttggggccaaaggggaatacctaggtcattattaatcataaaacggccgactctggacttcatcttttgtaaaaggcaaaatgatttttagtttcctcttctgtggctccctgggcagaggcccagccagctgctcactgagccataatgcatgaaacagattctgacaggaaaacaagattccctattagataacaagaagttcaagctatggccctttcctcagggagcatgatcaatgaactaattaatattactctcttaaaaaaagacaagacttaaatatctaacacctggaaactagatggaaaaagtgtgatccaattaactaggttccaaggctttctgcttccaaaatggagtggtcctgacttctctccaccatcctttctctaatggtgctctaagcccaagaacttggaacacctgccaggagctccactaggcgctagctcttcaaaggacaacaataggttgaacactttgatgtgtcaataatttaaaagccaattaaatattaacaggatttccagacccttcaaagagaataaggagtgagagattt

SEQ ID NO: 267307 - DNA, 882 bp, Homo Sapiens
tggccagtcagctgaacaaccaatcaagcaaccaactgatcaaccaactagccaatcaccaaacatccatccatcctttcatctacccacaacaattacccaaatacctatggagcatccaccatggacccaggcctgtgagggctacaacaaaagtggagaatcacagcccctggttcaaggagcagaaaactcagccagtaaagcaggatgagcacaaataaaacagctggagatccctaaaaggcagcaaacagggaaggctgcaccagttgccagtgccagaagcagtctggggagggagagatcatcatggacaggagaaataagggaggatccctgggagagctgggactggagctgccttctcttgcagtaaggccaaccctagaagttaccatttattgagaacttactctatgccaggcattctaagtgatttgcatacagccaagaaaccaacctgcctcacaacaatcctgggacaaagacagtgttatcaccctcagcgtacagatgaggaaacagaggcacaagtaagtgaagtcatttgtcacatacctttcacgatgagcatgaacttcagggtctctgggtaattctcttcaaggaggccaaagaactgtggaaccaagagagatcccttcagagagcacatcacatcttctcctacctccatctcctgtgcaatctcctgttgggaggtttcagatggctctggagggtttcccttcatgccatcacctcccctggcctctggagggaaccttctcacctcatactattataaccatactctaataataattacataataattgtttttagtaaatattataataatggtagtataataataatgactactgtttattaaatgtt

SEQ ID NO: 267308 - DNA, 562 bp, Homo Sapiens
  misc_feature (412)..(465): n is a, c, g, or t
acgtgctgttcctttgcccagagtagccgctgcttcctgcagccttctcctcccctagctaatgcccacccacctattgttgtcacttgggaagaaaacagacaccttcaaggagagggctcccctggtagcccccaccccaagacagagctggatgcccctcgcttccgtagggaaagcacttctcctgcaggatggcattgctctctccccttccatggcacgtagtatgtgcttcagtaaatatgtgttggatgagaaactgaaggtgtccccaggcctacaccactgccatgcccgaacactatccatgctatggtgggcaccatctctctgatgacagttctgtgtccacaacccagacccctccacacaaacccagatggggctgtgccgctgttttccagatgtnnnnnnnnnnnnnnnnnnnnnnnnnnnnnnnnnnnnnnnnnnnnnnnnnnnnnnatcagcatcatccgatggaaatagcatatgagccatgtatgtagtttcaagtttttcattagccccattaaaaaagtaaaaggaaaccaatgaaaac

SEQ ID NO: 267309 - DNA, 739 bp, Homo Sapiens
caaagtgctggctacctgctgagcgcccccgtaactctgacacagtagtaatttgagcctctgcaattgccgtctgcttcctgtgaaagtcctttccgtgcccactgacccttgagtgggcctttgagctgctgactttcagctggaacttgaagggaccccaaccctgagacactatggccctgacctcagacctggggaaacagataaaactgaaagaggtggaggggaccctcctgcagcctgcaactgtggacaactggagccagatccagagcttcgaggccaaaccagatgatctcctcatctgcacctaccctaaagcagggacaacgtggattcaggaaattgtggatatgattgaacagaatggggacgtggagaagtgccagcgagccatcatccaacaccgccatcctttcattgagtgggctcggccaccccaaccttctggtgtggaaaaagccaaagcaatgccctctccacggatactaaagactcacctttccacttcagctgctgccaccgtctttctggggaaaacaactgcaagttcctttatgtagcttcgaaatgccaaagactgtatggtttcctactaccatttccaaaggatgaaccacatgcttcctgaccctggtacctgggaagagtattttgaaaccttcatcaatggaaaagtggtttggggttcctggtttgaccacgtgaaaggatggtgggagatgaaagacagaca

SEQ ID NO: 267310 - DNA, 391 bp, Homo Sapiens
  misc_feature (165)..(165): n is a, c, g, or t
aaaaataatagtggaacaatatcttcaaaaaaattactagagcaacataatgcatgatatacaatatataaaataggacagcagaatccactacagaaataaaacatgggacttgggacagattgcattatgctctgaaaagtgaagtaactaagggtaaccgtnaaagcttcgtatttatagactgcctttcccctgaggatctcagagtggttaatgttccagggagcgagggtgcttatggacttctgcaccattacttaaggcaacttcattttttgggcagaggtgccagcttggatatggaaaccacatgctgtgcaagggaccatttatattaattaactccatttttgttaacacacctgcttctaagtggacatcaactacc

SEQ ID NO: 267311 - DNA, 647 bp, Homo Sapiens
tttaaattcttgaagtttgagaactttcatatacttccttggcatcttatgtttcctttaaaccttttattaatttcccaatctgtctgcaattctgcctaagacttttctgtcatccttaggaaggtgatgctgatttttttccccatactttggtccacctttctttaacccattactttctagcaattattttggcagttatttcattttcctaagacaaagattggaatgtgttgtcactgatgaaataatagaaatatatggttgagtcatgtacaaaataacttacaggccccaaccagtggccctcttcagggggtatttggaattatttaagtgacagacaacaaatttggactgaatcttaatatctagattctgtgggtaacaaaatctgtaaatagaaaataataaaatggttaggattagtccatatgagagtttgcgttcagaggtttggagggcaaaactgacgatttcctgctcttgactattatagagcagtctcttgcttcacagttgtcaaaatcccacttcatgaacgatcacagaccaaatggcagaaaacaacccagttgttttcccagttgtttctattcctaaaaattgcataggtgggtacatatcgtattctggtgtgtttt

SEQ ID NO: 267312 - DNA, 577 bp, Homo Sapiens
tgttgactgtcctttcaaggaaaaacttgcaatagagggaaaagccattaaagcagctccctgcttcatcattaagtcctgtcattcctaccagccaatcccagtcaaagaagttatgctttattcacttctgtggaattacaagtgagagacacttttaggacctgatggacaaagcaggagattcactgtcagctttcctgggtcctctccttacttctgtgggccttgcaccgtcttagtttacacatctgccaaaggggtagaattacacttctttttacaggtaaatgtcaaggcacaatcagttttcaggaagtgcttcaagaccccaggtgaaatgaaaatgctaagtaccctctgaatggccatgcctgttaccaggtgctgcttcttcagatgatggggagcacttttcagggtgaaattcaggcgagttttgcccaggcctgctgtcttgagtacaaatgtgaatgatcgactgactgcttgttgccaaactggaaatgttctgtagggatttactggcatggtatcattcctagaagaaaaaaagagagaaacttgactgcacatt

SEQ ID NO: 267313 - DNA, 446 bp, Homo Sapiens
  misc_feature (389)..(389): n is a, c, g, or t
  misc_feature (429)..(429): n is a, c, g, or t
cagggagctactgaagattgaaagtagaagagtgattcggacttggtcagatttgtgttttggagggctcactttcacagctgtgaggagtggatatgagggggaaaggactgaagacggggtggccaccaagaaaactgttattcaggtaacagaggaagcaggtctgactaggacaggagaacttgattgtacaagcatcagcctggcagatgccaccaggccaactgagcccctgacaatagcaaagaacccctttctgataaataagaaaagtggctgccctcatggaagactcttgataagtacttcattgatttattggctttatatcattttgtcccaaacaagtacttacgggcacaaaggaagaaagaaggagccaaganaaaaaatgggaaggttacacacaaggttaaacaattggtngaggaattgtttttttt

SEQ ID NO: 267314 - DNA, 575 bp, Homo Sapiens
ggaggaaacgttgaggccaaatcccagtcataaagactgcacaaatgccatggggaggtaggcagaaagttgcaaacaagtgggtttgtatttcagataaccatcttggggctgcaattctaaagttagatataatcacacaggtgagaatagggctgctggtgcatggcaagcgccctccacattccctctggtactgcataggcatgagcctgcaggctaaaatgtcttccatacttcagacagaggctaggggagacagggctgactggtggccaaatgtcaaggaaagtaactttttaatacgatatattcctttaagtgacttgtccgtttttagccatcaaattacaaattaagagctagtgattctgcagtaacacacaccaattcctcgaaaaccttctaaagtcacaccagtttaataattccaaccttagggaaacaaagccaaacatattttaacaagtttgaactttgacctttctattgcttcatctctcctcagtgctgtttattctatatagtttttaaaatagtgttattatataactagtataaaatatttgaaaatc

SEQ ID NO: 267315 - DNA, 737 bp, Homo Sapiens
  misc_feature (106)..(115): n is a, c, g, or t
  misc_feature (193)..(276): n is a, c, g, or t
cagaaaatgccacagtcctcacctcaataaatgagaggacattgtggcagccaaagccacaacttggaagatggggctgcacctgccaacgaagacgggaaatgannnnnnnnnnagcctagtgtgaacctgcccctcgtcccacgtatagaaaaacctcgagtcatggtgaatgagtgtctcggagttgctnnnnnnnnnnnnnnnnnnnnnnnnnnnnnnnnnnnnnnnnnnnnnnnnnnnnnnnnnnnnnnnnnnnnnnnnnnnnnnnnnnnncattttgcaaagggtggacatttcagtgtatctcccagaaaggtgatgaatgaataggactgagagtcacagtgaatgtggcatgcatgcctgtgtcatgtgacatatgtgagtctcggcatgtcacggtgggtggctgtgtctgagcacctccagcagatgtcactctgagtgtgggtgttggtgaacatgcattgcacgggcctgtctccctgtttgtgtaaacatactagagtatactgcggcgtgttttctgtctacccatgtcatggtgggggagatttatctccgtacatgtgggtgtcgccatgtgtgccctgtcactatctgtggctgggtgaacggctgtgtcattatgagtgtgccgagttatgccaccctgtgtgctcagggcacatgcacacagacatttatctctgcactcacattttgtgacttatgaagataaataaagtcaaggg

SEQ ID NO: 267316 - DNA, 917 bp, Homo Sapiens
  misc_feature (404)..(404): n is a, c, g, or t
gactaaaccaggacactttgagtatgaacatgggtgctattggtaatcacaccgagacacagcaacgtccgggaccaactcaaccctcagtccgctcatggggcacaggtttcctggtccttccctaccctgacttctcttcttctgatgtttggtggtctgcatccttttaaaccactgtgctcccagaactgattcccatatgtgtctgccatactggaaaataccaaataggcaaggagatcgtttcaatactgtctgctgaacaccttaatagaggcaagagagaacgcagaggaagaaacaatggactctttctgagagagtggaagatggcttcgcagaggagctgctgtctgagacggatagcatgagtaggagtttccccaggcagggaaggtgtntgttgtttctcctcagggtagaggggagagcagggttccccgtgtgtctgttgctgaatgtgactcatgctgttttcctgctttgagcctgctctagggtgttatgggcaggatggacttgtcctgcgtgcttgttggtccgccgtgtttctgatcttcagatttatcgtaaggaagaacagccgatgtacaggcagaacttgacaaatgaggcaacaagcaacttgatctgggatccatcgtcctctagaccccagtaggagtctaagcaccagcgtggtggccaccccagcagccttggacccctgaagccttgagcaccaaagcacacacagcttcctctggctgagttctgtggtcgcctgcaccccctccacctgcttcccccggaggatggatcatgaagagtggaattgcttttcctcttggggcaggcacaccaacagtgtatgtgaggcccctgctcccactccccaggctggccagtactttgggccaatctgctagacccaa

SEQ ID NO: 267317 - DNA, 523 bp, Homo Sapiens
  misc_feature (24)..(24): n is a, c, g, or t
  misc_feature (44)..(44): n is a, c, g, or t
  misc_feature (47)..(47): n is a, c, g, or t
  misc_feature (64)..(64): n is a, c, g, or t
  misc_feature (80)..(80): n is a, c, g, or t
  misc_feature (107)..(240): n is a, c, g, or t
cttttttggccctagccccctttnattcggcacgagggcaaggnagnatatggcccccatcagnactggagctccacagnagcagatggagtctggatctgtcacgnnnnnnnnnnnnnnnnnnnnnnnnnnnnnnnnnnnnnnnnnnnnnnnnnnnnnnnnnnnnnnnnnnnnnnnnnnnnnnnnnnnnnnnnnnnnnnnnnnnnnnnnnnnnnnnnnnnnnnnnnnnnnnnnnnnnnnaactgtacagtgaagcacagacttctgagccagactgcttggtctgaactctggtgtcaccacttagtaagttctggtttgaatgtactcactgagtggtcttcataaattacctcttctgcacttggagtctcctgtctgtaaaatggggataataatcattacaacgaagcctcataggattctggtggagaccaaatgcattaatacatatgcaaagcgtttggaacagctggcatatataagtgccatatatctattattaaaaatttttaaattataa

SEQ ID NO: 267318 - DNA, 837 bp, Homo Sapiens
  misc_feature (257)..(257): n is a, c, g, or t
  misc_feature (619)..(629): n is a, c, g, or t
ttagttggtttcctgaaactttatgctgtttatttttaaccaataggatgttccagttaccagcatttgagaactagggacttttccatgaaaataattaagagctaaggaattctgacgctcaccatttttctttgttactctgcagttcattttcctctcaaaacactttcagccttttttacccacaatcttgctgcaaaatctttaacactactatttgaatataatgtttccaacacttttaccataagganatcagttgtttgtgaggactgacaggtggaaattaaatggattataaatcattttcaatcttttcttcttagcaaaaaagttcaatagcatattgatctggaaaatattatttaaaaaatgaagaacactcagggctctgtgttttgtgatgggtcctgatgccaagaatagttgccgttgcctttctggtgtgtggccaaccttgccagatgactgcagagagctcaccaagcaggatgctcaccctgcctcacactccgaggttcctcaccagaaattcacttctaacactttgcaaaacagcaatggcaaagggactccaggaagaacagtagcaactggtcacaaataacagttgtcnnnnnnnnnnnccacttttgagagactttttgagttttctttcctattcctagagtcaatctactagcacattttccaagaaaatcatctattccatccaattttcaaatttatttgcagaatttgggtaggataaatcatttattatctaatgttgtgttttcttctatttcttgattacactggtagaatatatatgtgtatgtatttttttaaatt

SEQ ID NO: 267319 - DNA, 336 bp, Homo Sapiens
cagacggagaatgatgatgttcagctgcttcaaaatgacagactctaatcaggattgcccacctatcacaccaaattaccagtaaaaaatgcaaattttctaccgacatgacacttttaaacacagacatctcacagacctccagaagccctgggtatagataagacttgaattactttcctccaatgttacattaggattggaaggcagattttaaaattatgtttttaaaaagcggtcattcttccccatgttaagaatttaaccttaaagatgaaaaagctaagaaactgaagtttgtcagtggattctagcttctgtaaaagttgggaagga

SEQ ID NO: 267320 - DNA, 749 bp, Homo Sapiens
tgagccacagcgcctggcctccttttctttatagtaatttgaatgtggtgattttaatcctccatggttttcttatccttcctcaacaaacagcaaagaggctgctggaaagccacatgacatttgctgtgatttgcacggctgatgggaaaacactacttggttctgaaggacagggttgtcattggatacctttgccctctgacccgagtgagaatctcacctggacaaagacccgagttgtgaaatcacacagataaagtgtgattccgaacctgctgctgtcctgtgcttcctgaggacaagtgagtgactgactccgtgtgccagggaactgcaggaggttaaaaactttcagaactaccatgcaaataagaaatttcaaaggacttttctcttaacacacatttcatagtgaacgtctcagctggattaacataattaacgctgtgttctttctggctcctgaaagaaattgtgattaggaacactttcagggctgatgagtctaaggtatcaactttgtcccttctgcccacttgaagttcaaatggaaatgtttgctttcatagctccagtcatgatgttactgtatttagtagctattaagtttccaattccatagactcctgggagaagttccagttcgcactaaggcttctgttgcatttagcaccactgcctatggtgtgtggagctttcctgaacaagtaatagcagcaaggttcttagcttagtaataattttaa

SEQ ID NO: 267321 - DNA, 539 bp, Homo Sapiens
  misc_feature (450)..(450): n is a, c, g, or t
  misc_feature (500)..(500): n is a, c, g, or t
  misc_feature (511)..(511): n is a, c, g, or t
gccccagtccctcttggagcggaagcttctggacctgttgctcctaagaaagcaagcggcccctgacgcgttgctgtggcctggtttgaccctcgtagccagcccatgttctgtgaggcatgaagcgccacgcagacaccacgacaaagtgagatgaactaagacctcttcttgattctaagcagggaacgcacagctcaccctgtcacatgcagcgatcataagctgagaattaccctcttccttcccacagcgtctaatctttttttatgtttttgtggcaaggtctcgcttagtcgcccaggctggagcgcagtgggcgattcatgggcccacttgcggccttcggacctcctggggcttccagcgtggcgttcttaattcttaggaaccaaatcctcccttcccttagaatcattcccccaaattcacccaatttacaggtgaaantcctgttaattagttttccttccgaaacaactgtttgctgaggacaattnaacgttttaantggggtttgttttgttaggtaggagttt

SEQ ID NO: 267322 - DNA, 354 bp, Homo Sapiens
  misc_feature (53)..(124): n is a, c, g, or t
gtagagacagggtcctcatctctcgatgttgccccaagatggtcttgaactcnnnnnnnnnnnnnnnnnnnnnnnnnnnnnnnnnnnnnnnnnnnnnnnnnnnnnnnnnnnnnnnnnnnnnnnntggccctaaaggtatcctttttaaaatgaagtattttgaataataaacgaaaaagggattcatttcaaacgtacaaaataggccatctatatttttctgaaattaatacactttttggtgtagaatatctggaataccaaaaatacattttgtagcttttccccagaaaaaatctggcattttatatctatctcttctaaattaatctttagaagattaattaagcggcc

SEQ ID NO: 267323 - DNA, 478 bp, Homo Sapiens
tagcgtctaggctctcagcagggacactggtaatcaagcttgtgttcccagtcagaaatccaaagaaactctttttcatcagggtgttcaacctgggaagcaaggagtgggtgcaggatccctctgtttctgtttgagcagtggcactccctctggcctctggaatggtaaatctgcaccattgctagcttggctgtttgcgtttgggggctgactagaatccactgtcatacactacttgttcagttcaatatttcttgtgctttaaacaacatttaaacctagatggtagggataagatgattcctgcacttaaagagcctgtgacgtttaggaaacaagggaatgcaaggctcaccatggagggtagaagaatgttacagataaggttgtttggtgttgtaacaaacacacaagatggaaaatctatgttgctgctattagctactattgattgaacaccttcttagtttctatg

SEQ ID NO: 267324 - DNA, 386 bp, Homo Sapiens
catcttgtaaagcagactacactccttgtgttcacccccacaaccactgttgtaaaacaagagggaaaggtggggaggggaaagcatggggcactttcggcaattgacagtactttcataattaacaccacagttaccttcagacctaggaaagaagagatgtatgaccacccacccagcagctcgagccaacaggtagtattttatgacagtaaagatggaagccaagaagacagataataatcaaagctgatttatttagcaagaccttgggtatacaattggagaaaaactgaaacagagactatctattatctcatctgcctagccacactgcaaacaaattgagaaggaagaaaattccagccaggcgcggtggttcacac

SEQ ID NO: 267325 - DNA, 423 bp, Homo Sapiens
tacaggatcaaaataaaagttacacaatttctgcaatttctctcctatgcatttgtcccatagttgatcacctgctgttatttacatttgtctacaactattgactaaacatcttgtaaagcagactacactccttgtgttcaccccacaaccactgttgtaaaacaagagggaaaggtggggaggggaaagcatggggcactttcggcaattgacagtactttcataattaacaccacagttaccttcagacctaggaaagaagagatgtatgaccacccacccaggcagctcgagccaacagggtaggtattttatggacaggtaaaggatgggaaggccaaggaaggacaggattaattaattcaaaggctggatttattttaggcaaggaccttagggtattaccattggggggaaaaa

SEQ ID NO: 267326 - DNA, 712 bp, Homo Sapiens
  misc_feature (35)..(35): n is a, c, g, or t
gtattaaatgcagatattattattatcaataatancttcttttgtatatgctttataatttcccaagcacttgctatgcatttgatgctcaaaaaactctgaggcagatagggcaggaattactgatttcattcattcagtgaatattcattgaatatcaggtactattctcaatgtttaggatatgttaaaggacaaaggtaagattctcctctccaatagggtttacattctagtgagagaagcaagacatgaacagtgataattaataagttctatagtatgtagaaagtggtaagtaatgggagaaaaaaagcagtgtaaaggggaatcgattgtcaagaggtggaggtgggcatgtggaaaaaggcaatttaaacaggttagataatgagattatagttgagccaacttgaagaaggtgaggcagagagctatgggaagtcccaagcagagagcagccagtacaaaggtcctaaggcctttgagtgcttgatgggctcaaggaacagccaaggaggccagtgagtgtgcagtagagtgggatgcaggggagaatgccatagaatctctgtttaaagattaactcaaattcccataattaaaagacatagccaaagtctggttaaggtagaacttgaaactacttacgtgactctagattagttgcttctgtgaatattttccctcatatttctagaaagggaggatt

SEQ ID NO: 267327 - DNA, 724 bp, Homo Sapiens
  misc_feature (212)..(220): n is a, c, g, or t
ggataattctaccacattatttgtcttgcctcagaaaatgttatttgacagaatttttatttttaaaagatttatcaccatcttccttatcaatatataagtagttggctcactctgtttaaaaaatagcacaatagatgacatctagaatatagctttaaaaaaactaccatttgatagcacctagaaaatctcacacttcttgcagatcnnnnnnnnnttatgtttctatcatatttaaaatattttttcaaacctcaattaataaatatctttggtatgagtcatatattatagtttactgaggtcagaaacaaaaactattttaatggaattctgaaattaaccacaaaacagttttgttataattgagtgtagggctcccacatctctgtgggataaaagtggctatctatattttaatccctttacatcctcaaaaagtactacaaaatcacaatgagagaaaaaattcagcaaacacccattcctagccaagtctaggaggcattatgactgcatgaataccttaagccaacagagctggatccagagcccacactagcagagagaactggggaattttgcactggaagtagtgtacagcagagtcaaggtactggcccatcaaaggcaacaccgtataggtatcatacctggaaggaataaagtctactttgagtgggaaaatactgaaaagagccctgagactttggtggtttag

SEQ ID NO: 267328 - DNA, 776 bp, Homo Sapiens
ataccaatgaaaagaattatagcaataaataaatcttaagggaaatatgcagaacacatatgagaaaattcttaaactccagaggggcataaaggaagactttagtacatggaaatgtatatttcagtcttatggagcaaaactcaaaaatccaaaaatgtcatgtttttctaacttaatttgtaaatttgatgtaattaatttgatttgaaatgctatcagagttttcttcataacctgacaagctgatcctacagttgaaataaaataagcatatgaaaatattcaggaaagttctggaaaaattatagaagaatcagagtgagatagggactagctttatcagacatttaaaagctgtaacaagtaaagcagtttgctatggagcagaattaaatagtcacatctacacccaggcacaaatgactgataatgacttagtgtaatattcatcccaggaaatagttttcaagggttcatgatgtcttcagacactgccatggtaatgcatgtgggtttcagtccccagcaggagactgtgattagtttgggagattctcacatcctcaaattctttcactgctcaatcaaccccaaagcagacccggctccaggaacggaaccaatttggagcacatttctaagtggcttggggaacagaagccccagtcctctggatctcttcctggcaatacctgctttgatagaaagctcgctttgctatagattccctagactgcgaaacctggaggaaaagcagcaacaagggtattttc

SEQ ID NO: 267329 - DNA, 486 bp, Homo Sapiens
  misc_feature (288)..(288): n is a, c, g, or t
agtaatatgaatttcatcagtgtttggatatgtggttctatactagacatgttaaacattttttattttgctgaaagctctaatatgttatcagttttgagtctaatatacatagcatttctatttgcaaaaacaaataatcatctcagccttgagatacaaaaggcaattcagtcaatttggagaacttgggttttctcctcagggttgtcctctttttaattcttgttgattcagccataaatcttcccctccaaagaccttgcttttattcccacagcactgaangtctgctcttactttaaagagccacagtaactgctcctaacatgcacatctttattaggaaatgtagggaaccttgaccagatagcgcagagcagctgggagcctggaaggtgaagaaatttgggtaaagatgaatgggttattcagatattaaaagtgttatggaaacggacttcatcgaattgaaaatcagctcag

SEQ ID NO: 267330 - DNA, 389 bp, Homo Sapiens
  misc_feature (19)..(19): n is a, c, g, or t
  misc_feature (24)..(24): n is a, c, g, or t
  misc_feature (47)..(47): n is a, c, g, or t
cagggggtggggatccccngcccngtgtggccatcctgtccttgaancgccagccacatgaagcctgggaggggaatttggtctggagttgtgagctgggactcaggctgtggctgtgaagtcccaagctaaagggcttcggctgggaccctgacgcttgcactccccagtcccgcagcactggtctcaagtggaatgtgctgtcagtgtaaacacacacagggttctaaaaatgtggtatgaaaaaaaatgtcaatgatctcatttatagtttttacactggttatatgctgaaataatattttggagatatatatataaaatacagtattttcttaaaattaatttcacctggtttttactattttaatgtggtaattagaaaattt

SEQ ID NO: 267331 - DNA, 599 bp, Homo Sapiens
ggccgcttaattaagataaaaccaccaccaccatttagtaatagcctggggtaacaagggctgcgtcacggactgccacttttgccatcctgctcagagcagggccatgcctaacccgtatctggggattgcttcagatattatgaatcgcttcaatattatgaattactacaattcataataattgcttcagatattatgaattacaatatggttcaaaggtgctttagcagatgaagacacaaatgtgtaaacacatatgaattacaatgcagactgcccagatgtgtaggcaagtcctctgaatgtttactaaacagtaagggtgattccagagggaaggatggcttgagggacaatttggggaaaactgacaacttgaaaactcagtctctctaggcaaggcctacttgcagataaccttgggagttctgtgctgggaggaaagctaaaggactaagttaggcctctgaatctgctctggaagcctgcatgcacttgggtcagaacaagccaatgtgtcaatgtgggtaaagattcctcagctgataagcaggaaaatgggcagggcattttggtctttgaggttcaaagctcag

SEQ ID NO: 267332 - DNA, 870 bp, Homo Sapiens
cttcctggcctgctttctaatctcatataggttcattttgtttccccatccattaggggaaactctgtgagtagccactgtgactctacttttgtgtccaaaaatagccattgtgtacttgaatgaatgaggttcaagagcttaggtagcataacctattaatagtaggcatagaacttttaataaactagacttgagaatccgacatagttgcacccatactggcaattatcataggagcttctgttctgagtcttacagacagtgcattaaagctatacattgagatctattgtgcaggacactttgctgattctcaaaaaaagaaaggcacagctcttctagaattgtcataaaggaaacaagactcaagctatgtaataaaaatgtttgcaaaacatttgaattagaacagcttgttctgagtgacagtctaatatacgtaggagaaattttagaaaggaaagagattttagggattaagatttttgccatcagggcaagctagtttttgaaggcattaaggggtggaattatcagaaggaaagaggaaagtaattagaacgaaagaaatgttagagctggaacaggttgccctcctgttggaggtgtccacctgcagaaccagtctcacctttctttgctacaaaggggagtcagtcctacatgactataaggttgctggccacgaggcactgttttgctctttatcctttttttctaattcctgatctggcctatattaccatcttacatcactctagctctgaaatgtttggcatgcctactttattttcttctaatctctgtaccctccctgaggtcatccatgattttcagctaagaggacaattttgcagctatttctat

SEQ ID NO: 267333 - DNA, 326 bp, Homo Sapiens
taagtttatttagggcatctccatttttttcaagcttttggaatcttttgctttcaattactcttaaatacagcaaatttatattttgctacaggttccactctgagtcattttttcttaatagattattacatcccatttacctttattgaaaatctttctaaagtagtttgtagagggaaacattaatttgttcaggtaaataaatacagtaattctagtatccaataagaaattacaaattctagatatgtgaaactaattaacactggaaaaaagtaaaaccccataaccttatagaaatgtgttgttcttgtggtgctcat

SEQ ID NO: 267334 - DNA, 481 bp, Homo Sapiens
aagtaaataagaaacaataggtcaaggtcattatagtagtagttacacaggtaggtgcatatgcttctagtctagccagtgggatgctgtgtaaattgtagctatgtggagaagccttgagatttccctctctgaaagtaaaattattgccttagggcagggttagcaaactatagctagcccctgggtatctacctgtttttgtatggctcatgagcaaagattggtgtttacatttaaaaatagtttaaacaaaataatgttttgtgatagatgaatgaaaattatatgaaatggaaatctcagtgttaataaagttttattggaacacagccacattaattcatttacatattgtctgactacttttgtgctgcactagctgagttgagttttttgtaggagagaccttttgtggcccacgaaacctaaaatatttataatctggccttttattatagaaaaagtttgttgagccttc

SEQ ID NO: 267335 - DNA, 1213 bp, Homo Sapiens
  misc_feature (22)..(22): n is a, c, g, or t
  misc_feature (28)..(28): n is a, c, g, or t
  misc_feature (60)..(60): n is a, c, g, or t
  misc_feature (758)..(808): n is a, c, g, or t
tgcccccaccgtgaggttgccnagtatncctttgtagaaaatcaagtgcttgccaataancccaactggctgcaacctgtagaaggggacaattagtgcccctacagcaatttaatgaactattagacccaccctctggatcccgggaggtcttgatcacagctggtagaggtggcccactcactgttcctatgtcttttaggttaacagttctttacataacagtgaagagtccctggtgcctcaggaaaagcaagatcaacctaccaaggaagagttgatggagtcataattttcctacttaacacccactgcaaatttaaatatgtgttctagggctgtttgttaattctattatggtctttactaattgtgattcccagttctgggtgaataaaaagtttttgttttaatgtaattgtgatcaacactatgcttgaagacatagacaaagctatttctaccaccatgatgtttacaaaatatctggtatttacgcctatatggccattaaaaaaactagatttgtggataacaaaccaccaagttttaattgtttttatttaataagggagaaataagacagaaaaagagaattaatactctttttcccagactgagaggcgggcttctaagtaaaggtatgtgaaaaactgagtagaggcttgtagtactaaaatgaacctccaaaatttattcttttctctgaggatttatctcagcttctctgtgtaattggatattaacacatcttaaannnnnnnnnnnnnnnnnnnnnnnnnnnnnnnnnnnnnnnnnnnnnnnnnnnttactcacaggtgcagtcatggcacactgtaacctcaaactactaggctcaagcaatcctcttgcctcagcccactgagtagctggggctatatgcatgtacgaccactggcatgcttaaatcttctaaggagcaacacatgtctctactcatttactaccattagatattagatgagtcatttactaatgactgctcatggtgtctctttattctggatatcagatccattacagcacgccacactaggatttctgcgccacactacgggggggtggtcgttgttggtaggtgtgttcaccacgcaggcccatctttggaaaaccgcattaagtgtggggacgtctgggtttctccgtggtcctggcgtggccttcgttggttaatccgttcgggccctcgacg

SEQ ID NO: 267336 - DNA, 590 bp, Homo Sapiens
  misc_feature (217)..(217): n is a, c, g, or t
tgctctagaagactagttcttgccttcttgccaattatttctagtcaaactgaaacctacttaaatgtacattttaataactttaacaatttattttggatcacccactgacatttacaatgttgtaaatataattcatctaagatacaaataacttcatggcaattaggaaaccctatttaggttcccactttttaaaaattgtgaaatccttagnatcacagtatcccttcctacattaagacaatgcaaactttgtgaaaaggctagcaattgtaacatactatggattttaagctgtgttcaaattacttacttagtaaagtattttccactgaatacttgctatgggtagcacaggcatagtaactgtcaattaagactttttttccaattttgactaaaaaaagaggagtttagtaatttttctttctgtggtatacaaagtatcccaattattaaaactgggagcataaatatctcctaacaatctctgtgcttctttatatatgtttttaagacacttgctaaccctatgaaaccagagtgaagtacatgcatacatttcccaatgttttacccatcttttt

SEQ ID NO: 267337 - DNA, 1036 bp, Homo Sapiens
  misc_feature (258)..(258): n is a, c, g, or t
  misc_feature (948)..(948): n is a, c, g, or t
  misc_feature (962)..(962): n is a, c, g, or t
  misc_feature (1017)..(1017): n is a, c, g, or t
agattttattgatatattttctgattatgctaatttcaaatgaagattcctgccttaaaatattttttaatttaatggtcagtatattttgtaaaaatcatgttaatttatttcatagttgacattaatatcttccctaatttctttgtatatattttgttatgccttaaaggccacctgctatacagttgttaaatcttaaatatggctttttaaaaatggggaataatgtattaaggtcaaattaatatccccatnaaaatatatatttctggctaatattaggtaaatatcttaatttttcattagattcatatcatttaatttcacatattcaacacctttaaatgttgtaatcttaatatgcgaagtgtgcctctgcaagatactaacacaaagctcatgttaagaaaacagttgaggactcagaagtcagttcgaaaatgcactttcctaacagtgaattcacaaccctgaacagcagcatttttggaaggcaaactgttcgtgatggtacaatgtaaatggggacttctgtaaagttctcagtttcggtccatgtggtttatctttacattttaaagatcaaagaagtctttacaacctgaatccaggtctaaaacacactagagtagctggtgactataaataatattttaaaatgctgtgtctacaccatcaagactgtgtctacactatcttggctgaacgagaagagatgtaaatgctgggtggtcccgttgacccacggcgttgggtacaacaaaaccagccatcggagttacaccccaaagcaccatttgctgtccagctgcctgtcgtttggcccagaccaccctcagaaaaaaaccagctgcctctcccattctcccctcccgttctgccacagcggcctggggctggtccagtggttatgcctgggaggttcaacacaaaaactttcccatnccaaacatttcagntggaactggaggcgtctttacacacgcagtaacagggggaggcacacattagggntaggatacagtaggaatta

SEQ ID NO: 267338 - DNA, 470 bp, Homo Sapiens
ctggaaaataaaataaaataactcctctaggcagaggctggatgggaggcagggtggagtcatatttgttttcctgtttccaaatccctggggaccagctcacctgtgtcccagagccttcagggtataccagggcattctgggatctcatttaatcctggcaactcccctgctggggaggggtgaataaactcatcctctatcctgggacaccgaaatggttaggaagatcccacagctgtgaggggtgaagaaaggtgggagggctgtttcctgagcacccctctgaaggtgtgctgggtttgcttgtacattcccaactaacgttgttttgtgctgtgtcagcccctgttctaaatgctggggactcagcagtgaccagaatgatccacccctgctcttacaaatcttataaatcagtggagagatagaccattatcaggaaaataaaattaaaaccatgatcattt

SEQ ID NO: 267339 - DNA, 716 bp, Homo Sapiens
tgagtagcccactgggaagcccgtgcctgcatccatactgtgaaatctcttgggcttttcagtccttctggaacagctaagaccattcaaccatgccctatcctcagggccggtgtgcctcagaacatggagttggcttcccaaacatacccagagctgatcccagggggccttctgtcggaatgtggcagggtcagggcagcatggctcttgctatggggaaatgaaaagccttcccgtgcagccctgcagatattcacgattacgctggtaaaggactgactggtatgtctcaaaaaaaatctttctgcagctgaaacaaacatgttttttccctttagaacattccagagagcagacatatgcagagaaatgatgccctcggaagattcagtccccaacgtttttacatgcccagacgctgggaaatacagagaatgaggaggactaaaaagctttcccctgcaatgggatggggaacaggctcaccccaagatcacaaagcatttgttacattggggcaactgccttcccaactttcctaactttcaggcatgagagaaattaattacaggtaaaactcttgctgaagtacacaatttcatcacaataatgactcacatacaaataaggtttcaggtcatttaagccccaacaggctatcagaaccacctatctagggactgttcaggaagtgaataaatactgcatccccg

SEQ ID NO: 267340 - DNA, 756 bp, Homo Sapiens
agtcctcatcccagcgtagacatcccagctggagctcgcagtcagagactcagaagatcacatcactcccagagattgtaaccacctgagagcttctcattgcacttggcctgatgtccagactcttttctctggcgatccaaaccccccaagatctcgcccttcccttcctccccaccctcgtttcttcccacatcccctcatctgccgtgcagcaaccatgcaggctttctcttgttcttcagatacaccaagcctggttccaccttatggttttgcatttgctgttccctatgtgtgcaatgctcgacctgagcccgggttccctggctcagggaacagaggctgacaccacactcataacacctgatgggatggaggagatggaggtgggcggaagaatgtgttccctggctcagggaacagaggctgacaccacactcataacacctgatgggatggaggagatggaggtgggcggaagaatgtgtaatcccagacagcagcaagagtaagggagaagggaagcaagagagagaaaacaaaggctgcaaatgcattactgagctgacccatcacttcttgagaaactctagccagttgctctgacacatgggattctttggagtggcaatatggaacacacttataccataatgcaacatatgtgttcccccaaaccaccacactatgcagaattgcactttacaaatcacagggcttatggggaaaatgttgttagggactcaacactgg

SEQ ID NO: 267341 - DNA, 796 bp, Homo Sapiens
  misc_feature (782)..(782): n is a, c, g, or t
tcggcacagcatggggaaaggggagttagaattggatcttgaaccatgacaaggatttaggcaggtagaaatggggagagagtgtgctaagtagagcaaagaggatgagaaaagggcaccaatacaggtgctgggggcaccagcagcactgtgggaacaccagttcttagtgtgctactgcagggttatgtttattgcacatttttcatttaaatacctttagaattgtctctgcttatttttcagtcaaagcattaatcaccattattaatatgttagcccgtctgttctcgctaaggtggtgttacctttctctgaagaaggtcatgctgtagctagtggtgtcagtgggttggacgcaggcattgccagaactgtcaattggtgttaagccacagtagccatttcctattaatcacgtaaagaaatgaaaatcaaatctgactggactgttgctccattttctcaaaacaggaaggtttctatagaaaacgtcctttcccgttactgaaggttgcctggtttacaaggtcctgtggttttagtacagatgtgtttccttggactagtttgcttgtatctttcagagtttatgctgcagcttccccactcccttcacagatgggtgagcccatattggcccagcactaaactcttaggtaaagtcttcactccatgcacaaaagaagggcatagtttgagtgtcattcttaaggccaagtcagctctctacatacttaaaatatctacaagcttttacctgaaatgtgcaaacaaaaggntattcaaataactg

SEQ ID NO: 267342 - DNA, 1247 bp, Homo Sapiens
  misc_feature (1211)..(1211): n is a, c, g, or t
  misc_feature (1215)..(1215): n is a, c, g, or t
ggcacgagacccaacagccgacacgggaagctcttctctcccagtaaagaagcagagctgactttccgccagcatctgaactccatcagtgtgagtgtgtggggccgggccgcccgcgtgcgagcgtccccgtggtctggagagtgcaccttcaggtgccggacgctgctcccttacagatgcagtcggatttcttcctgccaaagccccggaagctgcggaaccggcacctgcggaagccactggtggtccaggtcagggtcttctcaagtctgaacgtgtggcctcgtggctgggccaaccaggacacagggcttcttccctctctcacattttcatggtgtaaaatgtgggaaattcctgccccttccttccctcttgtgagtagggtaaaaatacaagtaataacagtgaacttaatggtacccagaagtaaaggtaatctttcaataacatggaaatccacttgcaaaaaagacaattatagggattcaagtccaaagaatgtcccagattgggatgtatttatggaatctcaacacctatttataaacatttagtctgtgggagcagttgccagggcatgtgggtcagccagagcccaggcctctcatgagctccccaggagtccccgaggatgccgtatgcaagcctgggggacagccagggactcagaggcacctcagaagaagagcttggcattctgacgcataaaaatacagaaagtgaggtgggaagtctgaggtaattatgggcctcagaaatgtatgggatgtgtgttattttgggatttcatgcacaggtttccttttgttagactcttagaaatctttttctcccttgagatttagtatatttacaaatggagacattgcatgaacggtcttaggaagaaagtgcctgctaaatcttaggtgttctttgttcaaactaagatcagggttgaaaactatggcccagggaccacttccagcctgactgttgttttgtttaatttaaaacaactttatagatagagaattcacatatcataatgtttgcccatttgaactttatgactcagtggtcacaaggtgtacgacgaccatcaccatggtctaatcccagaacgttaccacccagaaaggaaaccctgctcctatgaactcacgttgccttctcccgccagcccttggcaaccacggatccgctttctgtctctatggatttgnctgntctgggcatttcctataaatgggatcatacaa

SEQ ID NO: 267343 - DNA, 856 bp, Homo Sapiens
  misc_feature (754)..(762): n is a, c, g, or t
  misc_feature (822)..(822): n is a, c, g, or t
accacagcaaagtaaagcaaatccaggcttagaattagacctgtttgtggggagcagaaaggattgggatggggaggcatagtggagcaacacatctgagacaggaagtacggcccctgttctgttggcagtggacctcttcagtcagtagccaaggtcacagccctgagccgatgatgctccatgctgctgcctggatggaaagcattcgaggggaccttttggccaccagcattatgctgacagtcccagctcagacagaaggccttcttgtggcctcttttctgaggtaggaaggaaggttccgggtcaggaagtacatggtttgttgtaggtctgatgtgaacagtttgttgtcactaaccagccctggctagcaagaattccagaagagggatttggcagggacccatgtggtattgcaacctgtcaatacatcttgacaagtttgtaaatcagtcttcctggcagccagcttcacatagtatctaacacagacaggatttgctcaccaaaaacagagatgagtttgtttttggaggcctctgctgttacttctggccatttacctcttgcataatgtaaggtagccttttctcatctttgccctccaatgcccatctggttctcagacaatccccaaaccccacaaaaatggctgtttagaagaggaaggataaacagttggcccttggtatctgcaggttccacattcatggagtcaacaaaccataaatcaaaaacattttggggnnnnnnnnncagtgaaaattaacaatacaattagtctgggaacggtggttcacacctataatcccagtnctttgggaggctgaggtaggcagattttttagcc

SEQ ID NO: 267344 - DNA, 760 bp, Homo Sapiens
  misc_feature (42)..(42): n is a, c, g, or t
  misc_feature (301)..(301): n is a, c, g, or t
  misc_feature (418)..(418): n is a, c, g, or t
cactagacagtgccaagtgccggtgaggacgtggggaaccgnagccctgtgcactgttggtgcaagtgtgaaacgacacggctgctatggagacagcacggaggttcctcagagaattaaacataggtatgacccagcacaggatccagcagtgccacctctgggcgcgcatccaaaagacacgaactcagtacgtggaggagacgtcagcacacgatcaccgccgccagcattcacagcggcctacggcagacgcccaagagtccatcataggtgaacggacaagaaaaacgtggtgtantacacacaaacagaacgtgattccgcccacaaaaacgaacacaggatgaatcccactgaaaatgacgtatctaaagtggtcaaaaatccacagacagagaaagcagaacggtggtcnaccagggccctgggggaggggaggtggggacacctagtttaacgggcccagaggctgagttttgcaagacggagaatttctggagttccgctgcacgacaatgtggaggtgctcaatactgctgaactgtacacttaacatggctatgatggtcagttccatgcatgctttttttacaattcaaaactttagaaaattatttaaaacataacaataccaagcctgggtcctgcctctcaccgctcctaatctttttgttttatgcttctcgatgatccttttgtttttttggctttcctcactcattctcatatgattctaatatatagctgtgaggaggaa

SEQ ID NO: 267345 - DNA, 410 bp, Homo Sapiens
  misc_feature (391)..(391): n is a, c, g, or t
ttcagtttctcaaacttgtgctgatatctgatacctttttaaatttcgccaaattaatgatcaaaaaatggtattttgtcggttcaacttacatgtccttaatgattaaaagctatgtatctgtttattatttacccattttaaaattagtcttatattgttaatttgatcttgatattgtaaaaatattgtctctttagagtggtttgaatatgatcttgataaaacaatgaattgaactagatgactttgaattttatgatatcatggtttccttatgattaaatgattatgtgacaacttcttctccaggggtaaatttccaacgttatatttctggctttattggatcctttaacagttaaggggaaggaaagtcggaggctgggcnttggcccgcggaaaagggg

SEQ ID NO: 267346 - DNA, 739 bp, Homo Sapiens
  misc_feature (660)..(660): n is a, c, g, or t
ggaaacctgggtgatatagaaatgctatgcaggagttccacaggtcttctcatctctttgcatttgggggtgagatatttcttcattgtataggacagggttcagcaagctctgactcctacaagccaaatcttgtccacaacctgttcttgtgtctgtttttaaatagttgaaaaaaatcaacagaattgtattttgtgacatgagaaaattatatgaaatccaaattttagtgtccataaataaaatgttattgaagcacagtcatgcttaaattttaacgtagtatttgtagttgttttcccattacaaacaaaattgagtagttgcagcagagaccctatagcctgctaagacttaaagtactatctcctttacagaaaaagtttgttgacccaaggtgtaggctactgaaagcattgtgttttcgcccactcagttcccactccctagatgtcactagcatcttccactacagtgacagaaaaaaatgcccagctaggtttgcaaatggccccttggggtgtgggagtgagtagggagggtggtgagatgtacctctcccatttgagaaccaacacataatatgtggtatctcctttgttagtctttataggagtccataaggaatttctcttaggtctctgtattaagaaatgntatgtttctcctggtgtgaatctcataactgattgtgtttccttttgttgagacttttggaaaaagagccagatggttg

SEQ ID NO: 267347 - DNA, 759 bp, Homo Sapiens
tcggcactagcaatgatccagaaatgtcttctatggagaaggagtaagaattcaccatcaataacagctatgtggttacttgtagtgttgtatggctgggctctgaaagaaaacacactgaggactgggtaaaccctgtttagatgttcagctttcctgtgctccattcctgaaattagaaacctgaagctatatttgccagcttcacaccatttcattcacgatcaccccttaaatttctaaaggacaacctgtggacatggcattctatttttccaatccaaaaatgggaagaaaatgaatattaggaccagatgtaagaacatttgggcaagaggaatgcaattctggctttctgaatgacatcatctctattttaattagtggaagttgggaacttccatttaatactttggtggatggagagaaaatgtgcttgttttgcaacatccaggaggaattcgagcctgtatgagactgtaggaatgatctatttagaggattgccatcctgtgagaagcagaaattggacatgtagtgagttcttaaccacgttccagactgtaaaaagcttcacacgcagtgtctgattttaatcctcagaataagtttatgaggtacatttcacagatgaggaaagagaggcatggagagacgatctgaccagcccactgttttacagctgtaaaaatggcccagagcgggaatttggaccttggcagtatagctccagggccaatggtttttaaatcagaaaga

SEQ ID NO: 267348 - DNA, 712 bp, Homo Sapiens
  misc_feature (17)..(17): n is a, c, g, or t
  misc_feature (42)..(42): n is a, c, g, or t
  misc_feature (50)..(50): n is a, c, g, or t
  misc_feature (60)..(60): n is a, c, g, or t
  misc_feature (77)..(77): n is a, c, g, or t
  misc_feature (131)..(131): n is a, c, g, or t
  misc_feature (491)..(491): n is a, c, g, or t
  misc_feature (523)..(523): n is a, c, g, or t
  misc_feature (533)..(533): n is a, c, g, or t
  misc_feature (545)..(545): n is a, c, g, or t
  misc_feature (581)..(581): n is a, c, g, or t
  misc_feature (587)..(587): n is a, c, g, or t
  misc_feature (675)..(675): n is a, c, g, or t
acccagtattagccacngtaccataattgtatgcggccaganctcttatnagaactggcnatgcaggtttgtttacnccggccatcacccacaaactcatgactaatgtaattgtgcccacattacaatgncgcctaggtaacaggaatttttcagctccattataatcctatgggaccaccatcatatatacagtccatcattgaccgagatgtcattaagaggtacatcaacagaaataatgtatattatgtacaaaaataaatgaattaaaattaaatgaatacttgataaatgacaagttataaaagtcaatttctgattctaaaaatacatgttaatattttttctacagagcatggaaaatacattagatgttatagaacatttggcaaataatgttaaagaaaagttatcagagaagcaggcttattcatttcaactaagtaaagaaacggaggagcagaagccaaaattagaaagagtgaccnaacaggtatcgatatcttttaaaaactgaccnttcatatttncatttttgaagncccaaatcctccttcatctattaaaaatattaaatnctgggnaaacacgtttataggaataattgactattatttaccaacagtgtgcaaaactcacaaagggaaatccgtcttttgaaagggcacaaanggtggaaacatgggagggccagggcattcaaacttcg

SEQ ID NO: 267349 - DNA, 852 bp, Homo Sapiens
  misc_feature (548)..(548): n is a, c, g, or t
  misc_feature (798)..(798): n is a, c, g, or t
tttcggcacagcaactggaacgaaaaggagctaaacaaatgacaaattctactaaactacaaggaaggcaatcagcatcagttgtgcaactttggttaaaatgtcccagccaaaaaacattctctatcatttcatcattttaatcaggtagcttctcattcctatttgctctggggtttctctgctaaaatgtccacatgttgattaaatagcaaactgagacaagccctacattttacagcctggccgccaaaaccaacgcccccacgttcatgtaggatgaatgtgggagatcgacttcaggtcatcaacttaggccaaggctggagccagagaaatgtacctggccaggcaatgcccttaggtggcatcaggtgagtcatctggccaaagtcatactctagaaagggaagattgtgcatataattgaaaatgagagggagaaagtggcaacaaaacacccacagcacaaggtatcctgagggaaggaaagttccggccttgtattttgtccctagcatttagccaccactgtggtaagatattgnctcccgaatgggaaatttgtgtccatctgtggcacatctttgcgacaaatcttaccagacttctataaaggttgccaattaaggaagaaattctaaatatttccaggaggaaaactagcttaaatgtattaaaggtactttccaaacccaaaaagtcatttaaaaagtattttttgaaacctaaaagttctataggtagattaaagagaagtcaactcagactctgaaacagccttatagggaaagctgntttacgtaatgcatttgattaaaaaatataaataatttttttaattaagcggcc

SEQ ID NO: 267350 - DNA, 1000 bp, Homo Sapiens
  misc_feature (812)..(924): n is a, c, g, or t
tgatgaacttctgagttcctattttaagagggatacaccaggatagttattagagtatgcttagtgaagggcaaccaagatggcagagaatgtgaaaaccattatatgggaaacatgtactgtttagcctgataatgagaagacttaaaggagttatgacaatcatttccaaatgtttcaagagctgtcatgtattaacattaaactctgtggctccagaaagcagagcttggtccagtggtgcaaatgcaaagagtcagatcttggggtcaataaaaacaataatgttccagcagccagagcagtcaaataattatataatcacctcagatataattattatagatacccatcaccagtgatgtttaaagaggaatgagataaccactaggttagagtacttgtagaaagaatgcttgtatcaggtaaaatatattgccattctgaaattccatattccacaattttatggagtgacaccttaggactggatgtggccaaaatcttctacatggcatagtccctagttataggggcatacaactaattgtttaagcttagcattgttcatactggcttaaatactattaagccttagtctagccctgtccttggtgtataattcctacaactggaactgtttgtgcatcttacttaaatttatcagttaatattaggtattatgagttccccttggccttaacccctactcttatcaaagaaacatgtttagaaaatgaagcttatcttccacaggactttaggcataaaatgtgattaagatttattttggctgggcgtggtggctcatnnnnnnnnnnnnnnnnnnnnnnnnnnnnnnnnnnnnnnnnnnnnnnnnnnnnnnnnnnnnnnnnnnnnnnnnnnnnnnnnnnnnnnnnnnnnnnnnnnnnnnnnnnnnnnnnnaaattatttgggtttggtaggatatcagtgatggaagatgaaaggaatgaaatgaagtgagaagggaagtttagag

SEQ ID NO: 267351 - DNA, 679 bp, Homo Sapiens
tatatagaacctagtttgaaaaggaagggatattttaagtcttttaagataatgttaactatttttctttctttagctctatttctgtgtgtagctgttttactacaccagaattcagcaagttatagtttcttaagagttagttgctttgtggaaattgaagccctatcagtaaccttttcctcctcgtgtatcttcaaatctattaccgagccttaaactttgaatggatcttgtatccctagcttattcaagggttaagaaaatacgttttctgtaggaaaaggaagacatgttctgtggctcatccagagtattatttggagctgcatgtctatagttttaatcacatactattgggaggtcttcctgggagatgctggaggcccaggagtcaaggggctctgtgtgccgttctccaaacacagctctctagaaagaaggttccagcatgactcaggagaggttggtgcaaactgggaccctctgggcacctctcagggacacagactgtccagctggttacggaagcacatctcccacctgatttattcctaaataggagcgaggagggggacaatctttcccttcacccccacatcttcctttcctcttccctacctccctgtattaatactgagaaaccacacctgaacaatgaaatgactaggaactacgg

SEQ ID NO: 267352 - DNA, 638 bp, Homo Sapiens
cagaactgtttcagttgtatacaaatctaggtcagagaatatagtctgcagctaagttgtatctcagatgttttcccaaaaggattatttctagcgcccacattaagtgtattggcattactgctgtcatcttcccatcagtatgagtgaaaatgtctcctgaaaaagtagaaaaacccgaggagaaagtaagtgagcatatgagacctacagaagcctacgaagagttggaagtgatggtgcgtactgaaggaaggaggcccatcagatattaacttgacatgtcccaatctcttcaacatagcagagttgctcctgaagagcttcaccatgtgactcaagattttgaaaaactagagaaattccttttgcagtggactcatagcccattctcagggtaggagaccaatgattatctggctggtacaggagaggataggggacacctttggagatctggaggcagcagcaacgaaggagcaacgtgattcagtgaaggagctaagtttcaaagcaagtgcaaaatggtctgaaacatccaacaacagtgtgagatagcagaagttgaaggtgacaggtagggcaccatcccctcacagtgaagtgtggctaccttcctccagtgacctgcagaaaac

SEQ ID NO: 267353 - DNA, 556 bp, Homo Sapiens
tgaggcaagtattatgaactcccatttcacaggtgtagaaaccaaggctcagagaaccaaatcgcttacccaagtagggggaaagccccaggtctgatttcaaagtccttgccttttcctttatggcaaattgtttctttaagaaatatgaagagtcaggagcagaagaaaatcatgtaagatgtcatggaaggagtggaattggatctgagtctgaatgtacccttcaacccaacttcaaagcagcaaatgccttgatgcaatctgtttgacagtcaattctgcttccaggaattaagcctaaataattaagaaaatgtccctttagaaagtttgtatccatttgcactcacaccatatattatataaattcattgttctcatgccaataccagacattatcattccttttcaatatctgccagtccattagatggaatatagtatcaccatgtagctataatttgtgtttctttagtgggtagatatgaacacctattcatatctttgctgcctaactttgttttagaattctctgtaccttttcctttgctga

SEQ ID NO: 267354 - DNA, 1045 bp, Homo Sapiens
  misc_feature (371)..(371): n is a, c, g, or t
  misc_feature (534)..(563): n is a, c, g, or t
tgaggttggagtaaaagtttaataattgaaagaagaaagctctccgcagcaaagaggaggctgaaagagggttgccacttttacagttgaatccaaaagcttttataagaaaaaactcctttcatctctgtagctgtttgtgtaacttcccttaactgtgtagtagctgtctgtgtaactctccttacctgtgcagctgcaggtatgtcttaggtaagcacaaagtacagcttctcttgtttatgaaactgtgggtatgttttaggtaagcccctctccctgtgcaagttcccatggagcccatcatgtacatgtctgaaaaggggaggaaactttttcctgggggagcccgctggattatcccaaagaanccaaaggcttctttgttagggccttgctcccttatctctggcagctaaagctaaatttttccccaggctgctctatctgtgcctgtagctttgattttttcaggctatttctctgtttgaaggagttttaccaaggacccctcctaactgtctgcctaaccannnnnnnnnnnnnnnnnnnnnnnnnnnnnntctgtcttgtggaagacagctaagacagagctactaagacagacctactgccaaacactccctgggactgtggcttctaggaagctacaggcctaagggtctgagaagattcggcacagcctatgaccagtggctgagccaagctgcccccaaatgcatgactgaatctgtgatagtcctgatatcacccatgatgtatgagccctcaagattatcctcagtaaatccttggcctcagaactggggactctggaagaactggcaaaagaacacacagaactattaaatatggagagatgagtgcagagagaaaaaaatgggctattcaagataagcctacaaatttcaaaaattcataaggaaaatcacatgaggaaagccagcctacaaagtcagcatgaaatcactgcagttaaaattaaaataatagagcaactctaaaaaagactctaaaataactcagtaggatcttcaagaaggta

SEQ ID NO: 267355 - DNA, 663 bp, Homo Sapiens
agctgtccactggagcagctcattgccagagaggctatttctatggctccttttgctgctgaggacactcactgtggctctgtgggatgagagaggcatgggggtgagcacttgaaacactgccttggggccttgggttaggggagcctttgtctttagtgcaggacacacatatgcttacacctacctttatcaccattcgttcatgaatcatgcctagctccatccttgccctgggacctactaggccttccatccaactgggaaatggggagaagcaaagctggcctcatgctcttcagggtcagttcctatctggagttgaccaggcctaccccagttgccattcctgaaaaatctcagctgccaggctgcctttagggtccctgcagacccaggagagttgagagggtgggggacacagagagaatagagaggatgtgggaactgccagagggccggagcgcaggagttcaagtggaggaatgctggctttgagccctctacactgctggttgtatgaccttggacaagtcacttcacctctctgtgcctcagcatcctcatctataaatggggatctctgaaaccttcctaccctacctacctcacagggctgttgtgaggacccagggagtttggatgtggaagtaaaagtgctgc

SEQ ID NO: 267356 - DNA, 691 bp, Homo Sapiens
ggtcgtatagtgaatttaagtggtcatgcttggattttaacctaggcagattacttcagagtcagcgtctgccttactatcctgtttcctgagcaggaatttccccttgtgtcaggcaacactaggtgttaggagtggaggtgtgcagatgttgccttacattctgttttcctgatgtggtgtgcttcctaagagtacaaacctgagcatatgtccaggcttgcaaagtctcaggcaaagctgggactaaggcttgtgtttcctgccttgggtaggattttcttctatgcatgttgggtgcttctcacttaacctaatagtatgccttgtctgttttccccccttcccctttttgtttaaattgattcacagaacacaaaaatttactaggtatggaacatttgaaaaaatggaatagagaaaatggtacatcacatgtaataaagataaatattgttttgtgaaatgtctttttcaataataaatatgtgttgtgtgctatataaaactatttcttattgtggatattgaagtttgaagcctgttgttcatctatagatgcactggatgggattggaagtcttcagatttcagtagggttttccacaagcttatgaagacattgttctgtttaggctgtaaactgtttttatttcttgatgaaaaatgttcttctatttatatgatccca

SEQ ID NO: 267357 - DNA, 737 bp, Homo Sapiens
  misc_feature (372)..(372): n is a, c, g, or t
  misc_feature (463)..(471): n is a, c, g, or t
  misc_feature (682)..(682): n is a, c, g, or t
tgcagctccctcctctctggtactcacctgccaattccagctgtcttagccttgccaaactcccagtctgtcttctcagcttagcatggctgctgcattccacttctgcttgggttcctcccctaccctatacccctgtccataaattgttaccaagtaggaagattggagagcttaccttttctcacagctcatggtcctatacctgttgttctaatgcctgaaatagttggttcatatgctttaattttctagttgtttatagccagagggcaagtgccataccatttggttggatggggaagtagaaacttgccctttaatgagtgtaccatgtattttttaacacaatgtggccctcacacatgtgcntccctctatctaggatgtgctgttaccatttcatctagtggacttctaagtaatccttcaaggctcagaataaatgtcatctttccaagannnnnnnnnctacttcctttccaattaattgctcaattgctaagttatcaagtcatttaatatataatttcacatatatattaatgcatatgtatttgttatttaaagatctttcatttttctcttccccactagagcttgaaggaccagacatacttatttgtaattatctttctatctctaggatggagcatagggcctaacatatttgatggtttgntgaatttgaataatgagaaagtaaagatccaaactgggcctcagagcaggacaga

SEQ ID NO: 267358 - DNA, 485 bp, Homo Sapiens
  misc_feature (12)..(12): n is a, c, g, or t
  misc_feature (430)..(430): n is a, c, g, or t
acaaaaaatgtncattacaaaaactacttttacagaaaacatttagaactttaaaatttcaactttctagtggtcattggaaagttgtgagatgattatcttttgaccaacattattcagagccatataactgatgtttagaagctaagagtaactgagtttccctagctgcctgcaccttggctgtatcatagcttcccgcctcaaaccaaacactgttttttctatctaaagtaggcatttccatttctgtcctgctctgaggcccagtttggatctttactttctcattattcaaattcaacaaaccatcaaatatgttagggccctatgctccatcctaggaggataggaaaggataattacaaataaggtatgtctgggtccttcaaggctctagtgggggaaggaggaaaaatggaaaggatcntttaaaataacaaattacatatggctttaatattatatggtggaattattttatt

SEQ ID NO: 267359 - DNA, 714 bp, Homo Sapiens
ctgttctgtggtggatgatggaataaacaggtttcgaggcctggctcagcagccgctgcaggtgctggtggtgctggagctctgtgtgttcctgagccgctgtctgctcggtgttttcaggcggagctctgggccccatgtagggcactcgtctcggtaccgtctccattctcgtccgtgcagtgggaagtgaaatgtcagcactgtatgatcatcgtgggtgggaaggccccgctcccctacttggagctgcatttcacagtggtcttctgtaggtagatgtactgcgatcccaggggtatgcttgagctgaatcattaaaagtcagagatatttgtcaacgtattttagctcctttcctactgtccttcacctagcgagatgatctgttaggggtataaggtagctgttcgagaggggttctcagctccctgacacctgttgtactctgttgatctccaacaatgtccctttgcagtactttaggaagaatcatcaaagtaactcaggaggtgattgactaccggaggtggatcaaagagaagtggggcagcaaagcccacccgtcgccaggcatgggtgagagattaattcatttgtgttcatcctaaccactggctggcatgttcatgcagaagtgtctctattcctttggggtaaattggtcaaattaagaaatagctagtttttctgatgagcattaattaagcggcc

SEQ ID NO: 267360 - DNA, 742 bp, Homo Sapiens
tggcctactctagaggcaagttagggctctttgctggtaggaaacttgaacagctttgaacttgaactttgaagtgtggaggctgagggtgatggaggagcggggggaagcgccccaaaagccctgcatgctgtccatacccatcactggggtttgttaaatggaaagatttgaggccggcctctcccacatttctccatggctttgcccttaatgttgctctcactgtggagactgttgtctcctgggatccaggtcttggggtttggtcgggggaggaagctgcggggccttgggaccctgggggagatgtgtgtgcgctgggggtgagttcccagatagagcttccctcccagtggaccctgcttagcaagttggaatgttcccacaagttccaaccctaaggatttcactccagggacagagtcaagtagattccttttgtaaatcattggccagaaaagagcacaaccactgctctttttcactattttacagctatttttgccgtcccctgaatgtacatcaatttccatgcagcaattggatgtctcacctattggcttttcatagatgcaaactttcctttagggctttgtaaagaagttttgggaagttcttcaatagcagcagtttggggacatcacgtgtagccctgtcgatatttcctgaatggatttcattcctttctcagtcttgaccattcccttacccaacccccaccccaatcctgtgccgaaat

SEQ ID NO: 267361 - DNA, 729 bp, Homo Sapiens
ctgaaacagaatggggggagaggactggaggtacaagtggggtctccactttccacagacatagcttggtttaactctcatcttttcagtgtggcaccctgccttcgatcatgcctgccaggctcctcctggtccacaagcctttttccctgtccagataataagcttagttgccttcctcagtaggaaaggagaggttttcctacaagtatggagtaggaaagaggaactaggaatcttaacacttcttaaccaactctgcaacccttccttcttattgggaaagcctcacttctgggaaattcctgaaccgaattaccctcctcccaatttccagagtcttaaggattttctcatgtaaaccaggttggttcttccctttccccactgttgtttgataattgagcctttttgtgtctgccaagtcagttacttcctatccattcattttccagtttcagaaattgtgttcctttggactgtagttcttcccatcagtatcaactcagatctgggcaagagggggcctagctctgagctgctcccatcatatagaggcaaagatctcttgaagcaatgggtatgcccacctagagtctgaaccatcccttttgggatcacattctgtttataaaagattcccaaattccctttccaagcagtcttcaggacatctaggagcctgcaaggatttcttcctggggcagtcaagcagactgcattgcccat

SEQ ID NO: 267362 - DNA, 472 bp, Homo Sapiens
  misc_feature (20)..(20): n is a, c, g, or t
  misc_feature (36)..(36): n is a, c, g, or t
  misc_feature (73)..(73): n is a, c, g, or t
  misc_feature (114)..(114): n is a, c, g, or t
  misc_feature (133)..(133): n is a, c, g, or t
agtttcaagaaaattgttgnccctttggactgtagntccttccccataagtatcaacctcagatctgggcaanagggggccctagctcctgaggctgctccccatccatatagnggcaaagatctcttgaaancaatgggtatgccccaccctagagtctgaaccccatccccttttggggatcacattcctgtttataaaaagattcccccaaattcccctttcccaagcagtccttcaggacatcctaggagcctgcaaggatttccttcccggggcagtcaagcagactgcattgccccatgtgtacactctaagcctgagggatggccaagaaatgactctctgcaaggagtgggaatgagctgcagcgtgctggggttgggatgctcatgtgtgtgcaccaccacctcttcccaaagcaagtcacagctttgacaacagtaaaataaattttcaacttgcactgtca

SEQ ID NO: 267363 - DNA, 776 bp, Homo Sapiens
  misc_feature (676)..(701): n is a, c, g, or t
  misc_feature (743)..(743): n is a, c, g, or t
aaaaatgctagattgaaaataaaccaaggctggttagacaaagctggttacagagttatgatagcagggctgtcatactagttttgaaaatgtatagtgcactgagatcaaaaagatgtccttgaataatattggtaacaggctaacctttcttcatctgtggtatcaggaaattacagggagttacagggaactgaacactctgccatatttaataaacattaaatataaatttggtagtatatttattattctttcccaaatctttacaaaattgttgtgagtaggattttcctttagtaaggaaagatttctccaattaaagttttagtaacaccttgctaattgggtaaggcttattggtaagactaattcgtgaaaaattaaattctagagtgtgttgaccaaaatgtagtttttaattttgaaattgtgataaaataagtccataccttctggaactaccattctttttgaattgttgaagactctggaccaaattccctggaaaatctctttgatagtaaatacattgaatagtaagcagaatagaaccagaaactgctataaagttaaccatagagcattgagtatatagtttatttgcttcatggaaataaatgaatactacagttggttgacaatttttacacaaggtttagtcagccattttgtnnnnnnnnnnnnnnnnnnnnnnnnnntcaggaggcagaagagaatcatgatagaatagcagaactggnaagggatggtagcaacctcttcacttcaattat

SEQ ID NO: 267364 - DNA, 914 bp, Homo Sapiens
  misc_feature (561)..(561): n is a, c, g, or t
  misc_feature (840)..(840): n is a, c, g, or t
taatattttatacatggatgaatcagccagtgcagattcaatcaggatatgtgattttgggtttgcaaaacaacttcgaggagaaaatggacttctcttaactccatgctacactgcaaactttgttgcacctgaggttcttatgcaacagggatatgatgctgcttgtgatatctgggagtttaggagtccttttttacacaatgttggctggctacactccatttgctaatggccccaatgatactcctgaagagatactgctgcgtataggcaatggaaaattctgctttgagtggtggaaactgggacaatatttcagacggagcaaaggatttgctttcccatatgcttcatatggacccacatcagcggtatactgctgaacaaatattaaagcactcatggataactcacagagaccagttgccaaataatcagccaaagagaaatgatgtgtcacatgttgttaagggagcaatggttgcaacatactctgccctgactcacaagacctttcaaccagtcctagagcctgtagctgcctcaagcttagcccangcgacggagccatgaaaaagcgaacatccaacctggccctgtaagatttgtggcgtcccctaggcccaaactggatgaagatgaaattaaatgtgtggcttttttccctattcttatcaaaggcatcgttgtctgctaaattacttgaatattaagtaatattaaatccccatttttaggggaagtgagatttaaaaaaccattcacaggtccacaatattcatactatgtgtttgcagtagtgttcaagtgtttatttaagcatataattggtgtccnccaggtcctcacaacttctctgcacacaagcttctaaaattcctttcaaataaagttactttaatatttaaatg

SEQ ID NO: 267365 - DNA, 706 bp, Homo Sapiens
  misc_feature (86)..(97): n is a, c, g, or t
atacatctttttgctttctggccatgtctttgatgccgtgaaatattcctgctggcggatcataaacagcacaaaaatagggaccnnnnnnnnnnnntctccatttcagcatttcccattagcctagtgcacttgggtcctgtttaatccataaggaaaaggttcccagtcatctgggtgttcgtacaagaattatctgtcgctctacaattcaggggctttgtgcccgcttccccagcagcctgtgtacgtcccattcttcatgttccctggtgatttaagacctcctttgagaccctgtgcttgatcactgtccttttcttcctcgtcaggaaagagagcagtcaagcagggatcctcatccctgccaacgactcccttccctacaactacattaaagttaattcccggaggctccccagcagtgtgtggccttagttaagggtctgacaacgtccctattatcagaacctttcttcaggggggtttgcaactcgaagacttttaatttgcaacaggcggaaatttttgcatagggctgccaagcataaaggaaatatttcagagaccattcaaactgaaatcagtttcattgtttattctgtgttgagggatatcagaaatgaaatgctgtaagtgggtttctgatgcctttatgctccccttaactagaaaggatggttttgaaaaataatctctgtgccga

SEQ ID NO: 267366 - DNA, 747 bp, Homo Sapiens
  misc_feature (180)..(190): n is a, c, g, or t
  misc_feature (390)..(443): n is a, c, g, or t
  misc_feature (615)..(615): n is a, c, g, or t
ggcacgagaactggatgcaaaattataaaattctggaatcaattaaaaaaagaggggggaagcagaacagaatgtaaaagtggcattcatttccctggttacaaagttagttattttccagattcatcaataacttgagtatcaaaaatggcttatccaattacattttagaaacgtttnnnnnnnnnnntcacaattttttttattaatagagacagggttttgccatgttgcccaggctgatcctgaacacctgagctcaagcaacccacccacctcagcctcccaaagtgctggcattacaggcgtgagccaccatatccagcctaaattttttgagtttgaaatactattctgtcattcaaatcattaaagtgaaaagaacaaagnnnnnnnnnnnnnnnnnnnnnnnnnnnnnnnnnnnnnnnnnnnnnnnnnnnnnngccagggcaagatgattgaaacaagaccaaacatgtcagcaattacaataatttaaatagtttaagctctattttaaaaatcaaatatcttacatcaaattaaaaaatacacattacttatgagatacacttcataagagaaagctaaagcaaaagtataaataggcaaaancaaatataaagacaaccgtagtgataatattaaacaacattcaatacatttaagatattaagcaatagagcagagagttagttaatactaattagtagcctctgttcacaactaaaacatgagtcataagct

SEQ ID NO: 267367 - DNA, 379 bp, Homo Sapiens
  misc_feature (32)..(32): n is a, c, g, or t
gactgggtgttgagcaaaaggggccttcaagnatgttcaaggcacttggattttctcctgtctctcatcggcttttcttaacgggcctcagtgggtgcatgtgattatccacgtttcaacctatgaaacatgaacagaggagactgacttatcagtgattcttccgcgggttcggacagggcctcgattctgttttaaactccagtagtccctagaaattgtagctccctctagttgtggcaataggtgtgggtccttgtgcttgcttttggcaagtttctgagctacacagggcctccattaccgtcactggtgaaatgcggctcacctcccagatttgttgtaaagattaaatgaactggtcagcacaaaataatat

SEQ ID NO: 267368 - DNA, 523 bp, Homo Sapiens
tggcaatcacttaggaacgtggtaaggcttttaactatcaataatgctaccctttctttaagaatgtgattttatgtagacattaagactcaggcagatctagcttaaaatctacgtttagccactaactagctacatatgcctgggcagcttgtccacctctctaagcttcagtttctacgtccattgcacagggcactgacaccttgcgggatactgcgagtattaggaacagactgcaccaagtgccccgtagtgcatgcttggcctgtagcaatgcttaacacggggaagaacccttgttcttccttcccttcagaactgcttgccaccaaagtaattgcagcttctgaaaaaacaattcctacttcacgagcaggacacagcattagtaacagtgctggccggcatcacacgtggagctctaccgttctccatgtgctttgtcacagcatgtttcaaagctgtttttcacaaattagaatgttgtttagaagtctggattagaagtattagaaagagt

SEQ ID NO: 267369 - DNA, 280 bp, Homo Sapiens
gcggccgcaagattaaatcaactaataaagatagtaacatttacagatgaaataatatgaagtttgagatttgcttcataataagccattgtggggagagggagcatggagacagatagaagtataggcaaaacaagattactcacatgttgacaattgctgaaactggattcatgccatttattattctctactttaatatatgtttgaaaatgtccataataaaaaatttaagacaattttaaaagatgcttagtgttggccgggcatggtggctcag

SEQ ID NO: 267370 - DNA, 662 bp, Homo Sapiens
aattcaagatcattatcaaaaatcaaatgcaagtgagttggaatatctaagcgtctaagcatgtaaaaaacttaagattacagcaggttacttactatatgcattgaactactgaattcaaatttcccagtttttcattttaagatttaattattttctttactaataataacctatatgctatgatttgtaacttgcattttacaaagcaagttaaatgtggaacttgtgcgtttgtttaccttaggattaggctttactggcatcacagcatttttcagtaattactagatttcttagcatcttggatttcattgaaaaatgctcgttcagaagtaatgtatgaaaggacttgcagatacaatataaaaagtgagaaatcagggattgtgaaggtttttattcccaaaaaccttgctagttaaaataagacttgctgtaacatagcgtgtatagtttagagttagagattttatccattaggatttattaaaggaaataatgcctattgtaaatttaagataggttatgtgagagtataattaaaatatttttttgtgaaatgagttatttttatatagtctgtgatctgtctgaaaacatacaatcttgtttaaagtaaccaaaagcaaaaaccttaaggtacaatcgttagggtttgg

SEQ ID NO: 267371 - DNA, 783 bp, Homo Sapiens
  misc_feature (121)..(177): n is a, c, g, or t
  misc_feature (251)..(283): n is a, c, g, or t
cctgggcaacacagcaaaactccctctacaaaaaaatacagaaatcagccatgcatggtgacatgtgcccataataccagctactcaggaggctgtggtggaagggatcacctgagcccannnnnnnnnnnnnnnnnnnnnnnnnnnnnnnnnnnnnnnnnnnnnnnnnnnnnnnnngaatgagactgtctcaaaaaaagggagggggggttattacattatcaaattatacccagatgagactttatagnnnnnnnnnnnnnnnnnnnnnnnnnnnnnnnnntgcatgcaagggtctctaagttcaaattctactttcaacagagaaactacaaatcagatttcaaaacctttgtattttattcaaaattggaggcttacagaggatctatggcaaccaaaggcactggccctctatcaagactggcaaagtgaatgttagtttttaagttaaataaaaatgttaagagtttgtctcgcatcactggaaaagtaaacagcaactactggtccggactgccagagttacaggcctctttttctggtcactaggtttgggttaggaataaactggtttctattgcctagatgaaattcttgttacacaattctatgctctctaagcaacttcctggattacgttaataatgggacataacgcaggtggctagccgcctgaaaagtacatcatcacttagtaaatagtaaatagggagttcaaaatcatccatattcaaaatgttgcagtcctgaataaatgaaatgcaaagtctcatgtatcta

SEQ ID NO: 267372 - DNA, 918 bp, Homo Sapiens
  misc_feature (145)..(520): n is a, c, g, or t
  misc_feature (754)..(814): n is a, c, g, or t
aaagataatattccttccgagattggagccaaatctcctcatagaaacaggagaaagagacaataagggcttcccgtaaacattctttatcctaacagttttgcaaattgattggggagagaaggtgtaaatacttaaatcaatnnnnnnnnnnnnnnnnnnnnnnnnnnnnnnnnnnnnnnnnnnnnnnnnnnnnnnnnnnnnnnnnnnnnnnnnnnnnnnnnnnnnnnnnnnnnnnnnnnnnnnnnnnnnnnnnnnnnnnnnnnnnnnnnnnnnnnnnnnnnnnnnnnnnnnnnnnnnnnnnnnnnnnnnnnnnnnnnnnnnnnnnnnnnnnnnnnnnnnnnnnnnnnnnnnnnnnnnnnnnnnnnnnnnnnnnnnnnnnnnnnnnnnnnnnnnnnnnnnnnnnnnnnnnnnnnnnnnnnnnnnnnnnnnnnnnnnnnnnnnnnnnnnnnnnnnnnnnnnnnnnnnnnnnnnnnnnnnnnnnnnnnnnnnnnnnnnnnnnnnnnnnnnnnnnnnnnnnacagcaattaagaaacacttatagggcaaaatattctgagaataagactattggtaataatgtgaaggattcttagaaaacatggaatttgagatgatcttggagagatgaattaaattcatcaaaaatcacccggtgattatgaagcaccacggtgtccagcattgagtcctgagctgtataaacaagcagtcacaatttctaccctcaagaagctcacagtctgagtcttcnnnnnnnnnnnnnnnnnnnnnnnnnnnnnnnnnnnnnnnnnnnnnnnnnnnnnnnnnnnnnaatcctgatttaattggtctgagtgagtcctggccatcagtatcttttaaagcctcaggtgtaggaaaagagttcttgaagagacaaaacaaaagataatcata

SEQ ID NO: 267373 - DNA, 565 bp, Homo Sapiens
  misc_feature (109)..(142): n is a, c, g, or t
cattatgcatgcccattgttggcaaaggtaatgtatattcttaatatttgtcaagagaagtttatctaagggctcaatattttttaaatagaggaaatttcattctagnnnnnnnnnnnnnnnnnnnnnnnnnnnnnnnnnnccgtatcattgcctaataaataacaaaagttatttgccttgtcatagatgtaaagtgtatgtcagatatgttttttaatttagctttatatccaagtctcttctatatcttccaaagaaggaagtgaacctgtaccagtctgtggatgaaagaaaagggtttttaccagtaggataaaactcctagaagggtaaatgttgtcctttatttgggtcccagggtggacaacttttgattccatagatgttagtacttgctttgttacttcccaaaattgtaatggctccctgtgatgagatgtcctgaatttgttctaccttggtgtttcctatgcttacaaaaccaacaaatcaataataccattattctagaactatgctcacccagttatcatgaactacccctaacaactagccaccacat

SEQ ID NO: 267374 - DNA, 760 bp, Homo Sapiens
  misc_feature (454)..(535): n is a, c, g, or t
  misc_feature (564)..(594): n is a, c, g, or t
  misc_feature (611)..(624): n is a, c, g, or t
cagagtcagagtgggctgggatgggtcagcggaggctcttgcgagccttgagctttgagctgagattttcaggaagccatctctcccttccccttgcttcccccactgcacagctgaagagctttgatcagttcacctgcaacctgctgtatgtgagctggaggaaggacctcactgagcaccttcaccgcctctacttccggggccgtgtgtactacaccctcaacgtgctgcgggatgacatcgataacccgtaggcgccccaactcagtcctttctacactctgtgtggtcctttccatctggcctagccctggagactgctggtggcagacaccaaggagatcatctgcagtcgttttcaaatgctgctgcccagagtcatgggggagggtgccctgcagaggactcctggagaagctgcagggctgtgaataggcagctaaaaagaagnnnnnnnnnnnnnnnnnnnnnnnnnnnnnnnnnnnnnnnnnnnnnnnnnnnnnnnnnnnnnnnnnnnnnnnnnnnnnnnnnntagtgcaccgtgagtacacttgggaatannnnnnnnnnnnnnnnnnnnnnnnnnnnnnngaaacccccatctcttnnnnnnnnnnnnnntgttaggagcagctttcttttgtccttttcatactttatatcttagtcttccagtaagaagactaaggggtttctttagagggttctaaagaaaatgtccttgctagaaaaaccagctcttagattttcatcagta

SEQ ID NO: 267375 - DNA, 752 bp, Homo Sapiens
tgtatataaaagtagtctttctaactgtctgtatttctaagttaatatataagtttatctagataaaaaatacttaagaaacataaaccaaaatattttatgaaattgtttttatattagctaagtataaatttattgctgtataacaaattaccacttggtggtaaacagtgaacatttatcttaacagtttctgaggttcaagaatttaggagccaatttacctgagtgattctatcttagattctcttataaggctatatttaagattttggttatagttgcagtgatccgaaggcttcactggagcaggaggacaagcttctaagatgactcacttacatgccactgcaggagtcctcagtgtttcactggcttttagcagagtgcttcattccattgccacatagacctgtttttggtgttacttaagtgccctcacaacgtggcagcttcctttttccagaacaagggtaaagagataaagactgagccacaatgtcatttataatctagcctcaaaagttacacacagtgttttctgtttgttgagcaaataacttctattcagtatgaaaggtgctttacagggcatgaataccagagatggggatcgttggggccatcttggagactagctaccacgttaagaataaataatacttcttaaattaagcatttttatttcatattacaccatgtcagaatgcatttaggctttactcagtagccctgcagaccgggaaaatttc

SEQ ID NO: 267376 - DNA, 830 bp, Homo Sapiens
  misc_feature (228)..(248): n is a, c, g, or t
ccagaattcggcacgagcggcacgagctggatggattgtgcttggagaggtccacaggcccagtgagctctgagaatttgaactggtttatttacacaccctgtccctgcccttctattaggagcacttcctgatgacagggtgaaattgtcccatcccgttccccagggcttaacctttcctcttagaattctccctattctacatgcttttcttcaactcaagttnnnnnnnnnnnnnnnnnnnnncctgaaatgtcccaggcatgatgagacactgggtgggggaggggaggacggtgcccagagatgagtaattgccctaaaggagttggtggcgtggcaaggagggcattcccaggaagggctgtcacggatgcagagagggtgagagattaattggacctgagaaggaccctggaatgcttcttggaggaagtgatgtctgagtgaaagataggaactgacaggtgggagatggggtaggaaagggccacccaggccaggaacagcaaaagcacggggcaccctttgggagcccagcccctccccagagctcccctccctgtttcccacacatgctcccggctgttaagggagggtgtgtgtgaggaagatcggggctgaaaaaaaggttgggtgcccaggacggaagccctggaataccttgaataccatgctgggaagctgggccttgattttataggcaaggaaggaggctggagagggaaggaagcaatcagaaggtgtagagcaatggagtcacaggagcagatgtgttttaatcaattcatccaataaatattttagggactccagacactgtgcatc

SEQ ID NO: 267377 - DNA, 748 bp, Homo Sapiens
  misc_feature (137)..(147): n is a, c, g, or t
  misc_feature (258)..(269): n is a, c, g, or t
atggcaaaaaacagtcccaaaattatatgtatgtaaactttaaaggtgaaaattaaatttaataccctgctttttaaaattctaagcacttcaaaactaaaaatactggatttttatgcttacaagataatgggacnnnnnnnnnnngattgttaaactagtatggcactttcagcagagaagtaagctgcccagaacagtcttggacatatagtaaatactatataggtgttagttgctggggtagttctttctttnnnnnnnnnnnngaagttatgtttttcaaatattactaagtttaggcctacaagacattccaaaataatggaaaaattcaatcctgcctctttggaaacattttggaaataagccccaaacactggaagccagtcaattctttttttgcaattctttctgaaatctttctttcttaagtcatatgcctctggattgttttggtttggccactcgtcctgtgttgagctaactctggggtcaaaagaagttagccggttgctgagagtctttgagagaaagaaggcgaaacttaataaaaggaataaaaaacatatattccataacggagactgaaaaagatgtatagatcaagagtggctatggcttcctgaaaaaagtacagcaggagttagctcacagatgataaagcaagtctttccttgtggagagaaaacagcacaaaacagtgagctcattagtatcacaacgggcagctttgaaaagattcatt

SEQ ID NO: 267378 - DNA, 790 bp, Homo Sapiens
atcagtcattacagtaacccgaaaccattgggttcagcgaaaatggaaagatttagctgaatgtagtcagtccaattaagttggatgcaactgagtgatttagttgcttgggtaacccagtgcttgcttgctttcttcattctctgggtggaaactaagatcaagacacatgtttggggataagttaaatgtctgagctattttgctcggtttatcctaagagaactttattatgggatgaggaggtgacccaagatgagaagtggagggggacagcgatgttttctaaacatcgtccagtgttgactggcttccttactttgcacagtgaacacaactaaccacattaattcagctttgtgaagtccctgctctctgtgggtctatgagtcagcagcaacattggcctaacctccgtcccagcctcctggctcaccacatgtgtacagtgctgtttgcagttgtactcattatccatccatctctctgccatccccaagcatcgctgggtgtaaaacgcaaactctccaccgacactgccatgcgtggtcatgtcttgatgccttcaggggctcagtagctatcaaagaggcctggagggcctgggcaggcttgacgatgcctgaccgagttcaagacccacaccctgtagcaataccaagtgctattacataatcaatggacgatttatacttttattttttatgattatttgtttctatattgctgttagaaaaagtgaaataaaaatacttcaaaagaagatatccatataaaaataaaaggagag

SEQ ID NO: 267379 - DNA, 753 bp, Homo Sapiens
ctttataagctgaatgaaagaagtcgacacagcggacactgtcataagtggaacaaaggatgaagctaatcatggaggcaagctccctggagagacagggacaaaatcaagaatgagctggagaaattaatcctggagaaagggagggacctgacttccttgaaggcaggcagccaggaagtaaagaggaaggaaaaatcaagatacatttttggcaagggggcaggaagtggatggagtctcctcctgggatacccagtttgctcagtgaaataagagatgacatcatctgttgagaaggaaaggcctaaaggataaggatgaagtagggggtagggggagagaggtagagatttggactaatcaccgtgggaaacaaatgaagagcacagcaagtgtatgtttagaggtctgaggacccgcccaaggctcctctgaggttgcggaccatgaacttgacatgaagaccctctgtggcatggtggggttatctgctagttctccagaaatcaagatacttcttttatcagagaaccagggtatctgatagactctgctatctcagtctgcatgcaacagaataatcttctgttctatattcttcaaacatctccagttcccactaacaacggtaatttttaaatgtcaaaaattctgaatatcagcatcagaaagttaaaatatgcagttgccaaagaaaaagaaatccacatacagctggccctctgagtcggaacccacagattcaaccta

SEQ ID NO: 267380 - DNA, 716 bp, Homo Sapiens
  misc_feature (53)..(53): n is a, c, g, or t
  misc_feature (62)..(62): n is a, c, g, or t
  misc_feature (632)..(632): n is a, c, g, or t
cccaccctcaatgtcggctggtatcatccaattggctgccagcacggcaaaancaaagcagncagaagaaggtaggataactttgcttgctgggttttctggcttccttctttttccccatgttggatgcttcctcctgcccttggacttcagaatccaagttcttcagcatttggacacttggacttaaacgccagtggtttgccagggggctcttgggcctttggccacagactgaaggcagcactgtcggctcttctggttttgagactttcaaacttgtactgcgccactactggcttctttcttcctcagcgtgcagacggcctactgtgagacttcaacttgtgatcaggtgagccaattctccctaataaacttccttccacttatacatatatcccattagttctgtccctctggagaatgccaatacaaactccatatgtgagtacttggggtgaactccttcccctcttgggaatgttacattacactttctcagaccccatgtgagtaactgaccttaactagtggacttcaaaatacatataaacataacagtttgacattctgaacacttagtctgtgacaggctacactctgtcagttacttctccaaaagcagagtntcagctctacaggccttggagctttgaagtcttgtcatgacaacattaacgtccaacttcttgtgtcctaggaacttcaagtgt

SEQ ID NO: 267381 - DNA, 681 bp, Homo Sapiens
  misc_feature (594)..(605): n is a, c, g, or t
agaaaggctaattagattacatcatcgagagaggccaggaagctcctgcaggaagagctgcatctgtattagcagacctagtcccactctggagaacagctctcctctcaaggcccggaaacgccttccctctggctgccaccacacctgaaattccccaagtagcccctactgggaggagccatggaaggggctgggaacagactccttgacctgtacagttgctccctggaggagccggtccctcgccttctgggagcttcagcccagaggtggggcaggaacccccagcacggcagctcctgagaccccaccaggtcctcctgcctctgcattccctcacggggaccaccagacatgaacccagatttggcacacacgcactcatttgtttattcactgagccgctgctccaggagccagcccccaagccaggtggacacagtacaactgcaaacacaagagcaggggccctgtctcctggagctcccggactgccctgacccccaaaggccagctcctcccttgcaccagcagtctctctgtcccctgtgagcccctacctctccgggtctcagctttcagtcttagggnnnnnnnnnnnntctgtgttcatgggctcagcttcctgcctttagccattcagagggttggggatgaaagacctttcacaccccaaaa

SEQ ID NO: 267382 - DNA, 770 bp, Homo Sapiens
  misc_feature (101)..(138): n is a, c, g, or t
atcagccctatctcaggaacctggacccagctgcacctggcccctgatgcctatttcctcctttctgacacaccatcataccatccatctagaaatgggannnnnnnnnnnnnnnnnnnnnnnnnnnnnnnnnnnnnnggggacttgaaatgcagctagtccaaattcagatgtgctgcaaagtgtaaaatacataccagattttgatgacttcatataaaaaagaatgtaaaatatctcaatatttttatgattatatttaaataatatactacatatactgagttaaaaaaatactaaaattaatttacccttaatactgaccatgaaaacatggggaactgcacagctgacttaaaaatacttaatatgccttaaaacttaattccatgaaaaattgatgtatcaactaaataaagtcatgatcaaaagtgaaatcaggtggtacagaaaagagaaaataggtatagggcaacagtataaggtttgcggcaagttcccataacactgtatctagtaccacagccaacctgacgaatataaaggccaggtaaacaggcctttgaataactgaaacagtctacattcatagaaagctgtctgaatgctatattcctctttttccagagccatctaacaattcttttgatttggtatatcatgtctgttggtgatatacctccctaatctccaatattatccaatatttccttttatctgtccttcaatcaacagtaagaaaacattagaaagggttacattgaaaaaag

SEQ ID NO: 267383 - DNA, 457 bp, Homo Sapiens
  misc_feature (28)..(28): n is a, c, g, or t
  misc_feature (292)..(292): n is a, c, g, or t
  misc_feature (347)..(355): n is a, c, g, or t
agttaattgctgctatcatgtttaaatnaataagagtaaaaacaagtataacaagtaactaacatttattgatgaatgaatactatgtgataagtgttggacacagcatttacataaaatatctaacttaatatttacagtgattctaggaggttttcattattatttttgtctctagtttacatatggctaaatgaagctataaagtggctaagtcaccttttgaaattctcgcagtaaatgatgatgctgggatcccgagtcggatctgttgcactcctagaccccaaangtctgttgaggaaattcatatttcttttggcctctactgaaagagtgagtttgannnnnnnnnccctagaaatcatgagaatagttaacattttttataagcaaacttttgggggttaacaaatttgatgttataataaacgttcctgtccaggcacgggtgtca

SEQ ID NO: 267384 - DNA, 477 bp, Homo Sapiens
tctttatccttcaggcagttctacaactctcctctcaggaggcccgctacaaagcatttgggacatgtgtctctcacataggtgccatcttagccttctacacaccttcagtcatctcttcagtcatgcaccgtgtggcccgctgtgctgcgccacacgtccacattctcctcgccaatttctatctgctcttcccacccatggtcaatcccatcatctacgggcgttaagaccaagcagatccgtgacagtcttgggagtattcccgagaaaggatgtgtgaatagagagtgaggaataagtggaaaaagagtggggcacagtgaatgctgtagtgggccagggctgtgctgagagtagatgggtgctagactccacgtttagttcttttcttgtattatggaaagaataaatgatgtcctgaagctcagtgccaacagtctgtttagaatttgtgggtctttgccctctggtagc

SEQ ID NO: 267385 - DNA, 492 bp, Homo Sapiens
  misc_feature (96)..(358): n is a, c, g, or t
  misc_feature (449)..(449): n is a, c, g, or t
gagtggaataaatctgtatgagctgacatggcaaaatctttgtgcagtattgagtttttaaaaagcaggtttcagccgggcacagtggctcatggnnnnnnnnnnnnnnnnnnnnnnnnnnnnnnnnnnnnnnnnnnnnnnnnnnnnnnnnnnnnnnnnnnnnnnnnnnnnnnnnnnnnnnnnnnnnnnnnnnnnnnnnnnnnnnnnnnnnnnnnnnnnnnnnnnnnnnnnnnnnnnnnnnnnnnnnnnnnnnnnnnnnnnnnnnnnnnnnnnnnnnnnnnnnnnnnnnnnnnnnnnnnnnnnnnnnnnnnnnnnnnnnnnnnnnnnnnnnnnnnnnnnnnnnnnnnnnnnnnnnnnnttgtgcgttcatgtagtaccagctatttaggaggctgaggtgggaggatcacttgagcctgagaggcagaagctgtagtgagccaagatgngccactgcactccagcctggtgacaaagcaagaccctttctca

SEQ ID NO: 267386 - DNA, 863 bp, Homo Sapiens
  misc_feature (543)..(805): n is a, c, g, or t
atgtgtgctaactaaaaaatatcatgatgatgtttccttggtaaattttacaaggaaggaataaaatttcagtgagtttgtagattatctgatggttttctgggcttgctcaggtactgtctaggccagagtatcacctctccagccagtcctcataagctcttatctttgtcagtaataataacagacataaatcctaaatgccaggagacctgtaaaatgtaaaatacagaaaacctctaatagtctagaacttctctcctagatacctaccctagaaagatattcacacatatgaaaaggaaattgtatgtatacaagaatctttttgtatcattggaatatggatagtggaaaaatctacgacaacattaaggccctaaaaaagaatgggttaaataaaattggtagttcctgagctgtggactccctgcaaccatacatgaagagtggaataaatctgtatgagctgacatggcaaaatctttgtgcagtattgagtttttaaaaagcaggtttcagccgggcacagtggctcatggnnnnnnnnnnnnnnnnnnnnnnnnnnnnnnnnnnnnnnnnnnnnnnnnnnnnnnnnnnnnnnnnnnnnnnnnnnnnnnnnnnnnnnnnnnnnnnnnnnnnnnnnnnnnnnnnnnnnnnnnnnnnnnnnnnnnnnnnnnnnnnnnnnnnnnnnnnnnnnnnnnnnnnnnnnnnnnnnnnnnnnnnnnnnnnnnnnnnnnnnnnnnnnnnnnnnnnnnnnnnnnnnnnnnnnnnnnnnnnnnnnnnnnnnnnnnnnnnnnnnnnnttgtgcgttcatgtagtaccagctatttaggaggctgaggtgggaggatcacttgaac

SEQ ID NO: 267387 - DNA, 551 bp, Homo Sapiens
  misc_feature (30)..(30): n is a, c, g, or t
  misc_feature (39)..(39): n is a, c, g, or t
  misc_feature (46)..(46): n is a, c, g, or t
  misc_feature (65)..(65): n is a, c, g, or t
  misc_feature (72)..(72): n is a, c, g, or t
  misc_feature (89)..(89): n is a, c, g, or t
tgcctgggccctcccccaagggctggggantgccagccnggcctgnacccccacggccactgggnagtaaantttaattccaagttaangggaaggcccagtggaaatagaataccctttaataaagccttccaaatttgggagaatgaatttacaaaataaatgtatgttatacaaaattgtccccacgagcacaaaatttggcctcagaagaacactgaagtatgcccacggttttatagatgaagagcaccttggaacaaaaaggtgtaagttttctagtagacattttaaaattgtgtggaaattcaaactagagatgttacacagatctgtgatcatggtgaaattagtttctacatacaaggataaacaagttactcactggtaacataaaaaaacaagtagctattctggtgtcactgtgtgtagctatgattcaattattagactaaaagccggtgagatttgtgtccagtttaataggacacaacttaagggcaggcaggtagggtgggagaggaagctcctgtctggggggatcaggggaa

SEQ ID NO: 267388 - DNA, 683 bp, Homo Sapiens
ggtctgtaagaatctgccctctctgcctagtgaatatgagtgaatagccaagctaacaaccaaataaccaatttactcctcaatgacaaactggttcataaaagtagtttcagatatctgctccgttaaattttttcttaggtcatctacctgcttcagtggaaagtaatcctgtgaaggatgaaataatcttttaccatatattgtaaaaactaaatacatcttttgtagcacatttgggatagagcagaaaaacgagatactggactgacggggacatggagtcaaaagaagatatttttaaatgaaaaaatgggagggccatattacttgctgatggaaaatgaatggagtaaagaggaaaaaaacagaggctgcctgagagcaagggggataatttcaggagaaaagcttctgcgtgggcaagtggcgatgaaatccagcacatggtggaggggctggctccattctaatagttatttaatcacagcatttgtacagcacttcccctttgcttctttatttagcatatatcattaaaagagaaacctccttccgcccaccacagcacagcagctctggagcgccacactgcccgccccatcaggatcaccaattataaaacacagtacattctcaactttctttctcaattactataccacacagagacctcaaaatag

SEQ ID NO: 267389 - DNA, 322 bp, Homo Sapiens
aaacaattaaactcatacaaatgcaactacctaaattaagaacaacatttaatacagctaacatgtaacaggtctgtaagaatctgccctctctgcctagtgaatatgagtgaatagccaagctaacaaccaaataaccaatttactcctcaatgacaaactggttcataaaagtagtttcagatatctgctccgttaaattttttcttagggtcatctacctgcttcagtgggaaagtaatcctgtggaaggatggaaataatcttttacaatatatgggtaaaagattatttcatccttccagtggaagtaatccctgtg

SEQ ID NO: 267390 - DNA, 751 bp, Homo Sapiens
cagataggtggtctgcaaatatttttccctcatttaatctaatgttcacattgctactgttggcccttaaaagaaagttttcatttattcatctgacaaatagtttcctagaccccactggatgctgagcacttgtctaggagctggaaatagataagacagatatagcagggccctggcccatggaggctcccactctggggtcaaggtgtggagcagaaaaagaaacagatgttttcaacaccatgcagtcaatagcaaaaagaggcagagatgggctgtgtgagaacacaggagtgaggaaaattggccaaagtctgaaggacgagtcctgcacctgtgaaaacgggccaagggaatgagggccattcccaaacagaagccaagagccccatgccaaatgtgccctgagtaatccaaagttccatggaaagcaaagatttggaagcccacagggcccctgtgtggtggatgctttgggggattccctcaaagttgggttggaatcttggaaggcactcactggttgtacaaatgcataaatgattatgtttaaccagtacaaatacataaatggttacgcggactagatatttaacctttctcagactcagtttctcatgggcaaaatgagctcagtaatacctacttcccagagactacaggaggattagaaataatgtacatacagcatctagaacagtactagggatggaattatgtgcttgacaaacactaactttggaaaatc

SEQ ID NO: 267391 - DNA, 857 bp, Homo Sapiens
  misc_feature (227)..(227): n is a, c, g, or t
catcctgaaaagttccctgagctaccggctgccccctgcttcccgcctgctccccggcccaccccaactctggcacccaagcgtgcctggccctcagacacagagatcattgtcaaccaggcctgtgggggggacatgcctgccttggaaggggcaccccattaccccgccactgccacggcgggccccgtaaggaaaggcttcggagctggggctttccccgcgtnggccccagaggatgaggtcattgtgaatcagtacgtgattcggcctggcccctcggcctcggcggcttcttcggcggcggcaggcgagccccttggagtgccccacctgtgggcactcctacaatgtcacccagcggaggccccgcgtgctgtcctgcctgcactctgtgtgtgagcagtgcctgcagattctctacgagtcctgccccaagtacaagttcatctcctgccccacctgccgccgtgagactgtgctcttcaccgactacggcctggccgcgctggctgtcaacacgtccatcctgagccgcctgccgcctgaggcgctgacggccccatccgggggtcagtggggggctgagcccgagggcagctgctaccagaccttccggcagtactgtggggccgcgtgcacctgccacgtgcggaacccactgtccgcctgctccatcatgtagtagcgcctgcctgcccgccactgcccgctgagcctcgctcgctgcttcttcagggacccggccctgccctgccgcccgctgacccttccttccccaccatggcttccggccccaccccgagtggcattgtcgctgcagccaactttgccattaaaactctttgccaaagtta

SEQ ID NO: 267392 - DNA, 698 bp, Homo Sapiens
gaaaaaccagtgaatgaggttacacagcaggaaaagaaccggtttcctcccagactatgtcttacacgctgagttatgccacaagcgttatcatcaaaactatttaaggctggagtcttagacctctaaaaatagacaggaagggctgccctgagcagtgacacctttgtgtttttatgtctccgccagcgccgtaacagagcctgtttctttctcgttgagtattacttaaattcaggcttaaatgtgctatgaagggcatttttcatagtatcccatttgccttgtaagttatataaagtgcatgattataattttttccttagaaatgcaatatttagtttcatccagctcttatgaataataacctcatagattcctgatcttaatttaaataggtgctttaattttacagctttcaaaagtagttactgtaaattttactcctgttaatgctggattggtttaaaggatttataagggctgtgtttgctctttacaaggcaagatgccatacagtgttcaataatagaaggtcttgatacaaccgacattttaaatattctttatacatgaggactgcgtctttttcactgaccctatgatttcactgtgagtagggtgaactggactgcatattagtttatttgttgccataatcacatttttgaaaaataaatttaagagttttttcttaa

SEQ ID NO: 267393 - DNA, 655 bp, Homo Sapiens
gaagtatagtagaaattatagtagtttggattaatagatttaaggaggtatggtcaataatctcaaatgcctctcaagtgtgtttttgtattataagattttctaaataaaagtttctaaataaaacctaataatatttattttttaagagatagagtcttctattttgggagtggcgggtccggcagagagggatcttgctgtgttgctcatgctggagtgcagtggctattcacacatgtaatgatagtatactgcaactatggaactctaggcaatgtttccagctcagcctcccacatagctgggactacaggtacatgtcaccatacctggtcataattattatttttaatgggaagcaatcgggagtcttcacttcttaatctgtctctgacattgttagctaatgtcaagtgacttcttccccaggtcatgttacctgtcagtactcaatcatcatgtacacagtaagaaattgttttatcttttcactctgaaatgcagggatagaaggaaggcatcaaaaaattaacaatggattatttcatcacaatgttaagtgcaaggtgtcggtacagcaagataatcctagatatttatttgaccttggaatgccgttaggcatatatctacttaaaaattgatgtggctg

SEQ ID NO: 267394 - DNA, 712 bp, Homo Sapiens
  misc_feature (41)..(41): n is a, c, g, or t
gtacatttccagagacttaaaacacctatgagtaaataaancaccatcatttcagattttttccccatttgtcactaaaacaaacagttaactttaagtttcttggcagataggatttttttagaagacatattcaaggaatgcttgcttcttaaaataactgtgatttttttatgataaaaatacttaaatataaataatttctacaaatttgtatttatttgtatcattaaatttagacttcaccgacttacaacttgtatgagttgtattacttgactttacaagtttatctttaaactacaaaaaaaatacaaataatataaacaagaatgttacggaatatttatctgcttcagaaaatgagctattttaaccattttaaagtacttaattaggtacgaacatctggcatcagaggtagaagcaagatattaaggctgacgttttagtgaatcggaaatcaatcctcctatcattagaagctctttcttaatgttttggtgtttacatgacacttaggaaagcaatcaaaattgtgtgcaatttttgcccaaagattattatttaagttcagattcatttcttttgggttcagtgtttcaagagaacaaattaaatattttttaactgaccccatctgatttcaaataaatcagtcaatgaatagagcttttcttcccacattaatcagaaatactgccaacatttt

SEQ ID NO: 267395 - DNA, 445 bp, Homo Sapiens
  misc_feature (20)..(20): n is a, c, g, or t
  misc_feature (41)..(41): n is a, c, g, or t
  misc_feature (84)..(84): n is a, c, g, or t
  misc_feature (103)..(103): n is a, c, g, or t
  misc_feature (140)..(140): n is a, c, g, or t
cctgcccccaacaccaagtnaaaggggaataataataaganatccttggagggactgttgtggataaatgaagaaaatcagtgnaaagtgccttggagatgtncctagtgcagagtgggcacttgctgaatgttaattanttgtataacttgctggtgtgggaagcctgactcttctccggctggaatcccacaggcctgcacaacagtaaatggccccgctgctaacccccaagatctatagtgaatacacagggaggatggtgagttatatccttctgaaagtggctcaactgtgccacagaactgatgtttatgatttctttggaataaacgtcgaaattaactctcctagtcttgaaattcgagaaagttatatttgtcttatctgagttcctttctcaggaaaccaaccatcaggcatctccaatagtatcaaaaagcca

SEQ ID NO: 267396 - DNA, 401 bp, Homo Sapiens
  misc_feature (14)..(14): n is a, c, g, or t
  misc_feature (26)..(26): n is a, c, g, or t
  misc_feature (37)..(37): n is a, c, g, or t
  misc_feature (50)..(50): n is a, c, g, or t
caaaattctgagcnaagcacccaggnaaaatccactntgatcaggttggntgtaacctacaacatgctacagaagggcccagacgaaaaccggggagccttaggccctgggggtgatcagcccaggaacaccccagtccctagcagacccggctccctagaactttccagcccaataaagcttatggtcgccccccgcaaaaaaggataacctaaataagttatttcagtggttattctttactaagaaatgcatatattctctcaaaaatgtgatacttgggttagtcaggtattttccatatagaaaccacactctccgttcctcaaagtgttgtccttgcacttttaactttttaaacttattaacaaatttttatattaaaatatttaattgtggct

SEQ ID NO: 267397 - DNA, 805 bp, Homo Sapiens
  misc_feature (555)..(555): n is a, c, g, or t
  misc_feature (563)..(563): n is a, c, g, or t
  misc_feature (721)..(721): n is a, c, g, or t
caggaactggggggaagaggctgcagggctccgggcctttaggatgtttagattccattgtatcttagcctcgttttaacctaccttgtatcattctgtctcatcaatcataatttaaatatttgttttctctacatctctttgatcttttctgtaaattgtggtctttgacagaattttatgtgaaaagaatgctgacagtggcattcgaattttttaaaaaattctctctgattaacacatttctcttttgtggctgaaccactcatcataggaggattgttcactggtcctttgctttcaacagctcttaagatcatttgtggattgtgtaactgggagaattgtgtttgggagggtttcggcttcctggccacaaggcatcttctctcccatcttgcagtaagttgacccttctttgcgctggacgatctgcaggcctggtggtctgagaggtaccttgctctcttaagttataagtgcctctttctgcgtggtgtcacgagaaagtgttcagaagaaccaatgtaatttcccaagaaaaagaaatcagcnaacctggntgtattttgcctgatgctttaggtaaactaatccaaatcaggtgagttgtctgttgtttacagttgaatgtcaaacagagaaagctgatacatagatccaataactctgttatcccacattgtacatagactccaactttctgtctaagtcgttaagnttcgagggaaagcaaagatgagaaggtagttcatacttaggctttcctggtttggtttggggtttttttgcgtaccattcagca

SEQ ID NO: 267398 - DNA, 778 bp, Homo Sapiens
  misc_feature (65)..(65): n is a, c, g, or t
  misc_feature (594)..(604): n is a, c, g, or t
ggctcccaatccagagctgttggggtggagaagcagctactctggtcacacgtgggaggcggggnggagggggtcttgggcctaaaatagcggtgaagagattgtgatagctcgtgtcagaggggcatgcagagctactggagggcttctcctttctgcagcttctctgtggttttctctgcagctttccttccctgtgctaagcagatccctctccacaactcttacctcaacccgcagacttgaagaccttgatgtcatctcatccatttaccctggtagtgaaaaatcacagattttgagtttgggagaaacccttttccaataaccgaaatgtgtaattggattggtcctttttgcatttcctttcctcttagatggttttatggtcttggtctatctcacttaatggtgaggaagctttcaaggtcagtggtttttacaaaagtagacatcgtatttatagaccccatgtggatgttactaaattggaggcttctctccaaggtgggaatcgttttgggagcggggggcggtggttaactttgtttctggccacagttagtccggcttttatttcataatttgtgtgannnnnnnnnnnactctcacatctcatttgattttagcaacaatcctatagctaaggtttatagatgactcattatgacagtcactggccttggccttttatatgggttatctaatataatcttcacccattctcaagaggtggctactgttttttcctgcccctgaaccctttaacaacaacaac

SEQ ID NO: 267399 - DNA, 449 bp, Homo Sapiens
agaaactgttctacagagtttgttagcatgtttatgtgtacgtgccatgtaacaggaagaatacgaaagagtaaaactgagggataagaaaaaaataggagagagagaaagtgagtcatggctaccggctaggccttggtttggttgtttctgtatccctaagtatctcgttctagcactgtggttattcacacttccttccaaatacacgacatctttcaaatactttgccctgtttgcctaaaggtgcttaagttgggtttctgatatttgccactagaaaattcctaacaaacacttttaaactcatcacactgaaattacttatgtaatttcaattatgaaattatgtattatgctgtaattataattactgttctattatcttattgtgataggcagaattttaagatggcccccaagagaccccagggtggcactgtacttat

SEQ ID NO: 267400 - DNA, 403 bp, Homo Sapiens
aaatagaaaccggtaaattaataattaacagccataaataccataaattcccataattgaaaattaacataagtaaatttccagtgtgaatgaagttttaaaagtgtttgttaggaattttcctagtggcaaatatcagaaaccccaacttaagcacctttaggcaaacagggcaaagtatttgaaagatgtcgtgtatttggaagaagtgtgaataaccacagtgctagaacgagatacttagggatacagaaacaaccaaaccaaggcctagccggtagccatgactcactttctctctctcctatttttttcttatccctcagttttactctttcgtattcttcctgttacatggcacgtacacataaacatgctaacaaactctgtagaacagtttctt

SEQ ID NO: 267401 - DNA, 791 bp, Homo Sapiens
  misc_feature (357)..(357): n is a, c, g, or t
  misc_feature (703)..(703): n is a, c, g, or t
ctccttcctctccgctcccttcccaaccaagaaggacacgcagaactttgctggagagatcaatgtttctagaacaccctgaaacaaaagtcctgatatgtgcaaataatacacacccacaaaagaaaataacctctttgcgctgacaccctgcctctccgaagaggacgttttctccctacttggaatttccatcagcacctgggttggtaccaaactcaggacgtggtggacacgctctctgactctgtatttcaggaagctgccaatcaatagagatttaaagcttctgacttccgcatatccgaataccaggtaggaaacatctgctttgggagtaaggagaaggccccagtnacctgctttttcttccggaaccgtgagagggagccatggggaggagaccagaatttcagccttcctatctccctttaccacaaggacgccttgaggacccaagtcaaattgagatctttcaaccacgggctcggaaacccgctttctgtgtccacttcaaccaaacacgtctaacaggcaggaatttagaggtggccaaggtaacgagaactagtggttttcaccctgtttggtgaccttcatagggcttatttatgcacttcaagtgcatgacctaatacatggttggtttggcttctcttctcgtaatagcagcctgtaaaaagcttttgagaattccccgtgntttctcattttggggtcaagaaaataaaatcgatatctaagtaaccttaaaaaaatggcctgcacaatctaaaaatttggaatggttt

SEQ ID NO: 267402 - DNA, 855 bp, Homo Sapiens
  misc_feature (93)..(263): n is a, c, g, or t
tgataggtttcacaatgttgcctaggctgcagggcaatggtgcaatcatggctcaacaactcactgcagccttgacttcccaggctcaagcannnnnnnnnnnnnnnnnnnnnnnnnnnnnnnnnnnnnnnnnnnnnnnnnnnnnnnnnnnnnnnnnnnnnnnnnnnnnnnnnnnnnnnnnnnnnnnnnnnnnnnnnnnnnnnnnnnnnnnnnnnnnnnnnnnnnnnnnnnnnnnnnnnnnnnnnnnnnnnnnnnnnnnnnnnatgccataatttctagtaacttccaaaaagcctcaataaaataaaatgggaataaataacaatgaaaacaatttttaacagccatagatcccaaaagtgatatactagaaagtaaattttctacccctcctcttacccctgataaaaataacttttcctagttatcaggaatcattaatatatgtaccctattcaaacaatgagggaggtatggacaaatgttccaagacttttgggttccacagaccaataacttttcaaaaacaattttaagaatggacaattaggggaaaaaattctgaacaactactctttattatctttaatttctcacaccaccctctcctctaatataatctcagaataaaggacagttctttaattgggaaaaacttatagtattgtctttatttttcagtttttgccatggattgatagtttttgtggactgaatcaaacctaaggatcaatgggattagatggatcctcaagtctttttctgtattgtgattgtatggtcttcaactcatttttaggacctggagtccagatgtgaccagtgtcatgtcataaatcattaactttatttgct

SEQ ID NO: 267403 - DNA, 787 bp, Homo Sapiens
  misc_feature (751)..(751): n is a, c, g, or t
aaattttataatttcttatttgcacctgggattttttctttgaatatttatgtcaaattacaaaccagtttaaagctgcctatttggcaaaatgatctgctgcagaattttcattttctgtctctagaatgcagaaaaatgtcttaaagttccttaatttgcttaatttaatgtggtttccagaagatgtgaaaacctcctttatttttaaaatacctgattccacattggtcaatagtttcctctttaatttacctctctcctctcactttatctataataagcagggagaaatgaagacacaccatcaacacgtttgcttagatatgtcctcaactaaatttctagtgtcacttactaattctaatttcatccaatataacataattaagataaattctataacaagctacacatactttccagttctaataccatgtttgtgatggaaacaaagcaggagtgccctctgcaaggtgatcatctgagggtccaagatgaaggggcacacaggtattttatctgccccacacaatcctttctaaccaggatgatggctctggatgaaagatgaaagtgtagcaatgcacagactctgaggagaacacaaggaaactgaaagacaacggcagagagttagacaaggacagtggagcaatctgaagcttctgccatcaccatttttaagaccaaggtcttgaaaacgccttcattgacctcagcttcttttatcatggggcctttgcagggntcctagctgagaaaagggaaaataacaacctgcatg

SEQ ID NO: 267404 - DNA, 773 bp, Homo Sapiens
aaaggaagcaaaagggaaggggagggaaggtgccaggctctttaaacaaccagcttttaggaacagagcaagaattcactcactcccaagggatggcactaatctattcatgagggatctgccctcatgaccccaacattaggcctcacctcccaacaccaccataccagggatcaaattttaacatgagctttggtggggacaaaccaaccatagcaggtaatttccatttggggctatcagttcagcctcagaagttttttaattagtagttgagaaaggtggtgggaagaggagtcatacttctgtttatgacatcagtggacacatacagtctctacaatgagtgaatatctaaagaaactgataagaaatcagagaaaacattttaatcaaagtcagtgaattaatgtaaaaggcctagactctatacctaagcattttatggcagtagttcccaaaaccagaaagaattacctgtggaacttaaaaaatacacagatgtcatatttaatagttgcttagctttcttgacaaatatattcaaagatacactcccacatacagactaatgattcattgataagaactcaaaggagaccgtttaaggttactaatatatataaagtacttttgattgtaagcaatagcagccatgcatgactactttaagccaaacaggaatctattggaaggaaactggaagaaatcacagatttaaaggagatggaaacagccaagacaaagtcaaagataactctgggacagtcagc

SEQ ID NO: 267405 - DNA, 457 bp, Homo Sapiens
ttcggcacagcatctcaagaaaggaagcaaaagggaaggggagggaaggtgccaggctctttaaacaaccagcttttaggaacagagcaagaattcactcactcccaagggatggcactaatctattcatgagggatctgccctcatgaccccaacattaggcctcacctcccaacaccaccataccagggatcaaattttaacatgagctttggtggggacaaaccaaccatagcaggtaatttccatttggggctatcagttcagcctcagaagttttttaattagtagttgagaaaggtggtgggaagaggagtcatacttctgtttatggacatcagtgggacacattacagtctctaacaatggagtggaatattctaaaggaaactggattaaggaaattcaggaggaaaacatttttaattcaaagttcagttgatttaatgttaaaagg

SEQ ID NO: 267406 - DNA, 482 bp, Homo Sapiens
  misc_feature (447)..(447): n is a, c, g, or t
  misc_feature (460)..(460): n is a, c, g, or t
ttcttatgctctgatttgctcttatactaatcatgcaagacaacgtataggcaaattatttagaaaacaaatactttgcttataactgtgctagcagttgacaatttttatggtgatggccttcctcaaaattgcttttgctctgagaatgattccatgatacccaggggagggtctccaaaactgtttgctttatttgatccttactaagtctggctgacctggaaggtgggtgggcatttctctctcctaggactggtgggagttaagttatattaaaactttagggtgaaggtatatggagcccaaggctgctgactgtcccagagttatctttggactttgtcttgggctgtttccatctcctttaaatctgtgatttcttccagtttccctccaataggattccctgtttggcttaaagtaggcatgcatggccgctattcntacaatcaaaagnactttatatatattagtaccct

SEQ ID NO: 267407 - DNA, 763 bp, Homo Sapiens
gcagcagaagcagaaaccacaaaacggcaaagctccctgctccttcaatagacagaagcacgaaacctcccctaagatcgttcattagctccgtttgatagagaacccttcacactaggaaagaaaccaccattttctgacaagccctcgattccagcgggaaggtcactcggggagcatttacccaagattcaaaagcctcctttaccaccgaccacggaaagacatgaaaggagcagccccctgccagggaagaagccaccctgtgccaaagcatggatggggaccagacagaagagagaatgatgaagatgatgtgcatcaaagacctttgccccagccagcactacttcctatgagctccaacactttcccttcaagatctactaagccaagtcccatgaaccctctcccatcctctcacatgcctggagcattctcagaaagtaacagcagttttccacagagtgcctccctgccaccatacttctctcaaggccctagcaacagaccacctatcagagccgaaggcagaaacttccccttgccacttccaaacaaacctcggcccccatcccccgcggaggaagagaattaattaaatgaagagtggtacgtttcttatattacccgaccagaggcagaagctgctcttagaaagataaaccagggatggcacatttctggtcagagacagctcttaaaaaaacaacaaccaatccatatgtcctcatgggtgtttgtacaaagataaagttttaca

SEQ ID NO: 267408 - DNA, 1123 bp, Homo Sapiens
  misc_feature (162)..(208): n is a, c, g, or t
  misc_feature (639)..(639): n is a, c, g, or t
  misc_feature (659)..(659): n is a, c, g, or t
  misc_feature (668)..(668): n is a, c, g, or t
  misc_feature (955)..(980): n is a, c, g, or t
tgactttttatctgtagaagcagaagagatcattttatccatgggcaaccccattatacctgaaaagacatttaactactggctcggcctaaagtgtaaactgtaaaccagattggatatttaatcaaggggctcagaaaaaaatgacaggagtacacgtgnnnnnnnnnnnnnnnnnnnnnnnnnnnnnnnnnnnnnnnnnnnnnnnaagaatgtcaactatatatacaaataaagaagtgtaaacacattgttagtttggggattaatatttgttatgagttagtatttgtcttatgttaataaagaaatatttatttgagatacctgctgaaatattgatgggtgaaattgatatgctgtcctgaatttgtcttaatatattatagcaaataaaatataaaatatgtttgaggagtatggtgcaaaagaatagctaaattaatgatcattgttgaagctaaagtgattaatagatgatggtttcttataccattccttttacttttgtgtgtttgaaaatacccataatcaaaagttttaaaaattgcaatgtaaattatttagacagttttcatattttaccatgaagtgaatacagaaaaattgagtgatttcattacactcttgccataatgntcatcccttattttctttgnactatcggnaaagactagtgaattggttcgaggcatagctaagaaaagaagatgagacacctattggggagttaaaaattacttaacaaatttgttttgccctgtttgccgtcaccacaaacatgaactgaagtgcgaggagtggcaaatggtagggaaatttatatcctacagaaaatcacaagctaataaagagtcccctaatggattctcttagattccccagtaggtagattatgaaatggttgaatttcacatcaaacccattggaagggtggcagatactctctgagttnnnnnnnnnnnnnnnnnnnnnnnnnnctttcagcctggtgcagtggtgtccacttgtactcctatagtcccagctactcaggaggctgaagtggaaagattgcttgaccccaggagctcaaattcagcctgggcaacctaccaagacccccatctttaaatttaaaaag

SEQ ID NO: 267409 - DNA, 735 bp, Homo Sapiens
  misc_feature (146)..(157): n is a, c, g, or t
  misc_feature (424)..(424): n is a, c, g, or t
ttcctatacactgagaagtatctttgtaaacattattcctcaaaaaatactaaggaaagcaattccaactatgctggcaacatttgtaagaaactgtaagtagaacttttagccatttactgaataatctgtggtatttatcagcnnnnnnnnnnnngataactttaaagatagataaaatcatctgcatccatagtgctccctccaaagttgcacaactagaaacaaagttttctaccaggaaaaagttatagtactgacttttgtaagtaattgttcagttggccaatgaataagaataaagctctttgaaagttaaggaagttagaccaaaatgtcatcaatgcctatgcctgtatcaagttcagggcagcgagaaaaaagcccacacaccctgcagagacaactcggactatatcctctncaggttccagcttcacagaagatgtcagaatgtacgtcctcatcctattgtaggctccttgtctccccaccgcaatcccagtagccttcaaccctggataagccgacctccttttggctctggaataggctgaaagacacagaagttcaaggaataacccacagttgtacattctttcagagaagggcataaagtaggaaaacagccacttgttgaacaagctgtcttgttctgcatactttcaacattaaaactggatgaaatatgaacataaaattatgaggaatgagaacaaaatggtgttatatatg

SEQ ID NO: 267410 - DNA, 1110 bp, Homo Sapiens
  misc_feature (861)..(861): n is a, c, g, or t
gaataaacaaccacaaggtcaggaaactgggttagtcaaaagaaaccactttcctcatttgaaccagccccctaaaatccaacagcgtgttttactgcaaaccaaaaaagaaatgccaagttttaaaaagaaagtacccctctcttggaatacagaaacgttacctaaacagtaatttgagcctttctttaagaatgaagagtgaggaaataaagatcattcctccatattgaatgtctgattttagacattcaattgtttcttaggagattaaaatcatctaaggctctctccttccctcaggaagatcagagtaaaactttcctttttccttcaactcttttctttattcagtatacctatgttgagtcattactctgtatggaaacccgggactagtctaatagtgtaaggatgaatgacaccattgtacaacagaggcaataagccacataatcaaggaaggaacagaatgctttgtgaatgctgaggaatgtgcaattaattttgtctgagggggactctacagagcaactaacacatgtctgaagacaaaagaaattctttgggccacgctttttcttctccttgcaatgtaatttaagtagtgaaatcatgggattcgtacaacagcaaggcaaaggaaggtggaatcgttttcttttttagtgcattttcataccaccaaaatgtctgacttctgcacaatggtagagatatttttacccacgcttttttcaactggacttttccaggccagtgcccggaaagtatgagtgaaattattggagtaatttctcttcccatgccatatgtgtctctgtggatgcagtgggttaaaatgcccagctgattaggcanacgggaaagggaagtgctgctcagaccggaaggggaggggccgcatcctcgaatctctctcagtgtaaagcaatagaaggttcaaggtcataatacaattcctgcctcaaagttcgcatcaggggtcagaaaagcttcacatgggatatgttctgtaaaagagaacagtgtttcctctcatttcccacccaactaagggacctgagctcaagtaggaaattttataattgttttaaccgtcctactcaa

SEQ ID NO: 267411 - DNA, 730 bp, Homo Sapiens
  misc_feature (420)..(420): n is a, c, g, or t
ctttctgactgagaagttgagcagagacagatgcccaaccccagcttccaccagcttcctgctgaaaatcaagagcaaggcagcccaccaagtggccccggcagatttctggccattccccactacacatgggttgccactgactgcttcatttggaccccagggtgagcaactccctcacgcttgtcttgaaacacacatgtaataagcgtttagtgttagtaatagtgtgttactaaaatgaagattcaagctgacagcaggggaggtggattccaaaaatcacagttaattaccaaagccgctaagccaagttattcaaatgtcttattaccaaggtatagccataaaaacttactgctccaggcgtataataccttcaaactcttcaagttttaaagaccacattatacatagganttctgccaactggaggctatctaccaacttgtgagttgtttcatcatgaaggaggcaaatggtaggtcacaagactctgggtctcattgagaagtataaaaacttaccaagcagtgaagggtattggagagagaaaaacaggattttaaaatgaagattccaaaccactgcctaccaatctggcacggcaagtcgggcaaatacacactcaacgacagtcactggggtcagagtaaaaagaaatggatttaaattaaagatggaaagacttaaatcagacttaaagaaaagcctcttgatgtaaattgct

SEQ ID NO: 267412 - DNA, 971 bp, Homo Sapiens
tacgactcactatagggaatttggccctcgaggccaagaattcggcacgagtgaatgtgtctttagtccagcacttctaatactgcttttaacattcattacatacatacaagtatctgtggagcactactgtgtgtgccaggcacagtggtaagggctttacataactttttaggataattctcaccaggatctgtcaacagccaccatcaccccccttctacaggcaggaagtagggtccctgagagacccagcagtttgcttagagtgataggatctgtagaggagggatttcaacccagggtgctttactgttgagccttctcccttctcccagctaaactgccttaaccacctccagctctgtggattatccgcctatctaactccatctgcagcccccaccctcagctgcagcctcttgggagtagaatacccccaaggttgtcctctgggtcccccttggcctcaccccatagagggagctggggatgatctgttaactaatgtcaaatcgatgcttgagctttcttatgaaattgcatggcagtaaaacctttggctccaaagactgtagccaatactacatgcataaaaatagtctagccgtcaggaaaatccacagttgagtgttagtggctagcacatgatttcctttgacactcagggcttttgtggttgaaaacaggggcttttgagtgccagcggagcctttttcttaaagactaaacctaaataacatcagtgctattcaacacaaggcttgaaacttctgacatcacttgttcacccctggtctgggcagctctgtgttaggtcaaaatcacaaccaagcagctgacacagcttctgcacatccaggggtgcatttgggagccactggttgcctctttctgttccctcttgcccagggacaagccacagctcccagacttttgaagtaacttaaagaatggaaatgtgtgcctaa

SEQ ID NO: 267413 - DNA, 723 bp, Homo Sapiens
  misc_feature (326)..(357): n is a, c, g, or t
  misc_feature (396)..(677): n is a, c, g, or t
actagagatgcttacttcctggttccttcagctctgattttgaagaactttcttccatagggatgtagtctacctgaggtgacatctgtgatagtaaagagactggagaattatctcataattatttagtacctgtgtcttgaaaggtcagaatagttgaggcaggaaactttaatccatatttttcttcagagttaggcacaaagggtcagtaatactgctttagtttatttgatgatttaaggatacttgatacttttaaattatttaatttaaaatgattataactggtcattttaatctgggggcaggagtccatagaattnnnnnnnnnnnnnnnnnnnnnnnnnnnnnnnngaaggaattattcataacctttatcacaggggtccctcnnnnnnnnnnnnnnnnnnnnnnnnnnnnnnnnnnnnnnnnnnnnnnnnnnnnnnnnnnnnnnnnnnnnnnnnnnnnnnnnnnnnnnnnnnnnnnnnnnnnnnnnnnnnnnnnnnnnnnnnnnnnnnnnnnnnnnnnnnnnnnnnnnnnnnnnnnnnnnnnnnnnnnnnnnnnnnnnnnnnnnnnnnnnnnnnnnnnnnnnnnnnnnnnnnnnnnnnnnnnnnnnnnnnnnnnnnnnnnnnnnnnnnnnnnnnnnnnnnnnnnnnnnnnnnnnnnnnnnnnnnctttatcagatcttcagaggggacaggggaatcaaattcgtataag

SEQ ID NO: 267414 - DNA, 780 bp, Homo Sapiens
aattaaagcagaagttggaagctcatatgtaagtaaaactgatatttcttttcaaatatgagaagggaggggttgtaaaagcctctaaagttaatctccttttcggattttgtctagaaaagcaaatatcctgatgctaattgatacacctgctgcaaaagtgaaaagcatgctaaagattcagcctccctactacccccgttccaaactcctacatctttccattgttaatatcatttgaaaagtttaaaaaaacagattaactatcacaactagattatatgggaatgttaaacctattaaaatattttactttcttaggaagcaagggtggcaagggaaataatttaacctttttggcacctgccgtgtgcctgactgtttacatcctcatgacaacccctggcagtcatgcagattagtattcccatttcacagatgaggaaccaagggtcagaaagcaacttgcccaaggtccacaaatgttatatggcagagaccagtctccatgctttttctaccacttagggaaaaactcacagaggtccatgaaagaattacagaagaaacaagaactcattggaagatctttcagccagatataaatcaaaatgtacaaaagatcaatgaacttgaagctgctcttcagaagaaagatgaagatatgaaagcaatggaggaaagatataaaatgtacttggagaaagccagaaatgtaataaaaactttggatcccaagttaaatccagcatcagctgaaataatgctactaagaaaagc

SEQ ID NO: 267415 - DNA, 790 bp, Homo Sapiens
  misc_feature (466)..(466): n is a, c, g, or t
  misc_feature (468)..(468): n is a, c, g, or t
  misc_feature (472)..(473): n is a, c, g, or t
  misc_feature (476)..(478): n is a, c, g, or t
  misc_feature (481)..(482): n is a, c, g, or t
aatcaaaatgtacaaaagatcaatgaacttgaagctgcctcttcagaagaaagatgaagatatgaaagcaatggaggaaagatataaaatgtacttggagaaagccagaaatgtaataaaaactttggatcccaagttaaatcccagcatcagctgaaataatgctactaagaaagcagttggcagagaaagagagaagaattgagattctggagagtgaatgcaaagtagcaaaattccgtgattatgaagaaaaactcattgtttctgcgtggtataataagagtctagcattccagaaactggggatggaatctagacttgtgagcggcggtggtgcctgcagtgacactggtgcgtgcactcctgcgcggtctttcttagcgcagcaacggcacatcaccaacaccagaagaaatctctctgttaaagtccctgctacaacatctgattaaactgcaaaaananacannacnnnacnnttaaaccacataaaatagaagtgtccttaaaatattttgtacctttcaactaactaccagattgaaaaagagtttatgatgcgggatatcaggtattttaaaatcaacatgcatcaaattaattttgccagttgactttaaaaacaaattatagaattagccatctctctgagggagcacatttgaataattggagatgcagttatacacacatttcaaacaaacatttgtcttttgagagtattataatttcaaattggccttgtatattttagttaaatgttttcagttgtattagtaacttaatt

SEQ ID NO: 267416 - DNA, 517 bp, Homo Sapiens
ggatctacttttgagaatactgtcattggttgataaaatacagcagaaacttgtgaagaagctatgttccatattcacctggcatgtttggagatgattgccatcaactttgtgactgtgaaggagaaaccttctgccacccaaaaactgaaaaatgcctctgcccccgtgggagaactggagccagatgtgatgctggttagtctcctgtattgggcgttcagcatggatgttgcctttttctgacctcaagacaactatccaactttccctgtgtccttcacgatgcaaccactaaagctctactgaagtctctaattctgagaaggcaccttaaaaatttgaatctaataacttgcttggatcatatggctcctaagtggagcagaactcaggtttgcctcattccagaggccacgttcttgactacagcatgcatgcaattataaaacactaccatcgaggatgaaaatctatacccgtaaattttggaaagtaataaaattttgatgaatcc

SEQ ID NO: 267417 - DNA, 410 bp, Homo Sapiens
  misc_feature (322)..(322): n is a, c, g, or t
  misc_feature (329)..(329): n is a, c, g, or t
  misc_feature (338)..(338): n is a, c, g, or t
  misc_feature (354)..(354): n is a, c, g, or t
  misc_feature (359)..(359): n is a, c, g, or t
  misc_feature (373)..(373): n is a, c, g, or t
  misc_feature (383)..(383): n is a, c, g, or t
atgaatcctagttatgtcgtaaaggttaacaaagtttagcaatacattaagttaaaaaggtttacaaagaattacaaagaaatgtttggagatttccatgttagcaaggcttgctgcctttctgtgaacatgcagcatattagctatgagttcataaaatgcgtagtcagccttttcctatatttacattgcttttccctttttatttccaagtttcaacgttcctggaacaattcttcaggcaactgggagggtaatagtgccaaggagggggtgcagtccccagaggctcagcctgcggttgacagtggaagttcttacnaggcttncccgcgggnggggctttccattctnagggnaccacttttggggncaggggccangaggtttggggaccccccttttacttt

SEQ ID NO: 267418 - DNA, 605 bp, Homo Sapiens
agaagtttcggaaggaagagtcttggcctgaagagcagttctaataaaatttgccctagctgatgggagtcctttagccaaagctgcctattggaatagttctgtcttccggaaatggatctgacttagtatcactgctgtgctcagtcactggctggaagcaatgtggcctcaaagaaaagctgcgaatattgggctgaatttagaacctagcagctagctagggccaaggtcatttacattccccatgctgggagaactgaaaggcacattttcgtagctgtctcaatcagagattttccactgctttgggtcgctggctcccagtccaagggatggatccttggattgggtgagccaaggtcatgtgcctgtgttctgactgcaagggggacctgcttcccaccaagattcctaagccccctctcccaaataaaggggttcatatgctggacagcaacccccacaaaggacaaatgtccactatactgtgtgacctccttaagagcaaagatctttgtcttgctgattgcaattataaatatttacaaataaatgtttattgaagtaactgaatgccccacaatgctatatctgactaagta

SEQ ID NO: 267419 - DNA, 595 bp, Homo Sapiens
aatgaatgcttctccatgaccagtgtactcccctgagagcaaccctctctgcctgtcttccacttacagtgactgagtgggagccaattggggaagctgctttctttgagttggcatctttcagtgacctggcggtacctggtccaataaaaagatgtgattttctgaaatccagtatatacctgtatgttttgaggctgtcttcccaaggtgacttgagaatacgtctacacacacagaatattgggatattgttttctaactgcctattgcattgtgttaaattacaaactaattccccagatgatgggataagttatttttttctctgccaagtcacaatattaataatgcagctaaatttagctctgctgtaaaagagtttaattttcaaagccaattagacaatttgatggctgacttgctgcatttgtctctaactactcagttgataccatgttgccaccctaacagattcttgctgatagtcaaaggagagatgagttgtgggaagtataaagcttttcaattaatttatgatcctattaggtgtaaagcctataattacctgcggttgttgcctctgccaaaaaaa

SEQ ID NO: 267420 - DNA, 490 bp, Homo Sapiens
  misc_feature (40)..(40): n is a, c, g, or t
  misc_feature (50)..(50): n is a, c, g, or t
  misc_feature (59)..(59): n is a, c, g, or t
  misc_feature (64)..(64): n is a, c, g, or t
  misc_feature (69)..(69): n is a, c, g, or t
  misc_feature (161)..(161): n is a, c, g, or t
ttagggtggccaacagggtatccaacggagtggttagagnacaaatgccngcaagtccngcccnccaantgtcctaatgggccttgaaaaattaaaactcctttaacagccagagcctaaatttagcctgccattaattaatattgtgaacttggccagangaaaaaaataacttatccccatcatctggggaattagtttgtaatttaacacaatgcaataggcagttagaaaacaatatccccaatattctgtgtgtgtagacgtattctcaagtcaccttgggaagacagcctcaaaacatacaggtatatactggatttcagaaaatcacatctttttattggaccaggtaccgccaggtcactgaaagatgccaactcaaagaaagcagcttccccaattggctcccactcagtcactgtaagtggaagacaggcagagagggttgctctcaggggagtacactggtcatggagaagcattcatt

SEQ ID NO: 267421 - DNA, 640 bp, Homo Sapiens
ctcttccatgttccagacatgacttcctatcaaaccaagatgcgctacaatcacaggagagcttcctttcccttgggcctgcagttttgctgggcccggaagacaagtcaagtttatctcaagcagtcccgctgacacagggttaaatgtttccatgttaccatgtgactaattcaaactcattctaattcctgctgttgctgcttttgatcggttacaaattttcaaggctgtgttaacagcacctcgtggaatcctttttagactcaacttggcttgagttattagtgaaggtttcatcaataacttctaattcaaacatgctaactaaatgactcaaactagcttttctggcctaacgtggatacaatatctcattagtggaaagccctgaaaaatttcaattcagtaagaggggataatcccaatttgtactctcttaagaaaattgcttctcaaaagtcacggtggaataatgaccctggaatgaagaaaacagaaagaaagttgaagaggctcagaaggaaatactaattgaactgtgaaggcttttaattcaaagctattgtttggcattcatttctgtaaatgtattaactaatatgctgatacctgactcataaacagacaagtacttgtc

SEQ ID NO: 267422 - DNA, 1044 bp, Homo Sapiens
  misc_feature (37)..(37): n is a, c, g, or t
cttggttctgaaatgccctggagactcttctacaagnatgcagaagtagcttccaggaagccaggctggacatgtctgaggagcgtctggaaactgaggctgtttgacagtcatggtgttgctgtgggatctccctgtgatagggccctgcgagttgtcataggagaagtacagggcatttgtgcacatcacacagctccctctcagagtggaagggactgtaacgccatgtggtctgatcgccctctctgcccgaatcccttccaagtagtctctgccatgatggttttttagtgacaaggaattcactaccttgtaaggaggttacccattcattctttgcattgtactggctgatgtagagcattctttatattgagtcaaaatctgtttcctgtggcttctgtctcttggtcccaggtttacgttttgggaccacacagaacatgtttaagcccttcagaaaattgaagacctctgccccaggctccaggtgccatgccctcttattctcctcttgtgatgtggtgattgagctggacaggcaggcaacttgaactttatccacactgtcttgcttacagacagaaagggcctttgatttagagggggcagggccagggcagtgggggctgccaggtgctccctaggatggtggaactgacaccagacgcagggagagagggaaacgtggctcacacatctgccagccagccagcccacgagcccaccacactgcacctgcatcgtagctggttccattttcaccacaaatcttatccacaggaaatgggctttcttaggagaagggaggaaatgcatttaatcagcacggaaggaaggtaattggtggttggcaaatttgtagctccgggcgtctagcgcaggtctgatgcccttcactcagcctgacgcccttcacagaagtgttgattgaataaacgatggtggtcctgatgctggagtgctaagtagatatttaaaaaaccacatttttgaagaattgctaatgtggggaatgtcccccttgtagtgctgagtgaa

SEQ ID NO: 267423 - DNA, 566 bp, Homo Sapiens
aaaagttcgtagtagcatagacacaacagtgataagagaatcttactaggagctgtgttgttaataggcaatttaggctgctctctagtggaaatgctgtgaggctgtggcctgcactggctcatttggagttgacagtgatggggagcttggtaagggattgatgcttacaatggccgtaccttcatactgggattctttggaaaataaaaagccctgttgcttcatatcacattgttcatagtaatctcactctctgggagagtcattttcttgaagcaccaggaagtagctatcacaaatccagaagaggatttgaattcaacccccactccccaatttcttctccactctctttcacactttagccggccacactggccttttgtttcagtttcagtctccctgatgtaaactgccttcttgattgcttttttacttttaaccacctctgctgtgatttgtattgttgaaataacttctacccactccaatagaatgctaaatgttagattaataagaggaatgcctgtttctggctcaaagaattagtggttagtgcaaaa

SEQ ID NO: 267424 - DNA, 729 bp, Homo Sapiens
  misc_feature (328)..(328): n is a, c, g, or t
  misc_feature (363)..(363): n is a, c, g, or t
  misc_feature (708)..(708): n is a, c, g, or t
ttcggcacaggttgtataaaacaatatgtatatagttgcatcgtttggcctataacgtataaaatataatatatttgccgataacaggttgaagaagctgagtggaagcaaaactgtcttgtactaaagaactgactccagatggtaagacaaatccacaggaacaaatggagagaacgtgaaataggaaataagtttaatataaaaaaactataaacatatacttactcttctctcagcttcttttaaagatgtaaaattatattaagtaattataataatgtgtgttgggtttgtaatgtataggaataacatatataacaataantaccacaaagcgggggatggggtttatataggaantaggggttgttacatgggaattaagtttagtgtttatctgaagcctattctgtttagttaagatgtgtatggtaagccctagagaaaccactgaggaaataacttttaaaaaatcaaaaatattattaaatgtaaatatcacattatgaaataatgcaaaagaaggaatggagaagcaaaaagcttgaggcatatcaaaaacaataaaatggcagtcataagtcttcctatatcaaaataacaatgtgcatggattaagcaatactataaaaggcagagatgtcagaaacaagtctgattcaacttcatgccatctatttgagacacactttaggaagatagganagaggttaaaggtaaaagggt

SEQ ID NO: 267425 - DNA, 592 bp, Homo Sapiens
  misc_feature (70)..(79): n is a, c, g, or t
tgaactttgttttcatagcaaatgattcttgtgcttccccctaccttcagtttctatgctaagcacattnnnnnnnnnncctgcctaaaaattttttttagtgggtgggaatatactgcttgggcttcagtgttgcttttgcattagatgcagattgatcagtactttgaaaatggatagcttgtttaaaatgagcctggagtgtgcgtgtatgttggctggaggggagagggggaaagttgctgacccagctataccttgagtgttaggagatgtgcaagcatgcagaatttattgtgatacacccagaacatagctttggaattaagagaccagattcacataccagctgcaccagttaattgcattgtgacttcggatgggttactctccatgttttggtccttaatttttctgtctataaaatgggaatatgagctacctaccctacaaggttgctgtgagcattaagtgagaacattataggaacattcctggcacaccaacctttggttcatcccattgtaatggtgggcaccagcaaaatacattctgtggtaactgccgttctctggccggttggcacacttct

SEQ ID NO: 267426 - DNA, 915 bp, Homo Sapiens
  misc_feature (772)..(772): n is a, c, g, or t
agccaggcagcacatcacagcgggaggagctgtcccaggtggcccagctcagcaatggcaatgggggtccccagagtcattctgctctgcctctttggggctgcgctctgcctgacagggtcccaagccctgcagtgctacagctttgagcacacctactttggcccctttgacctcagggccatgaagctgcccagcatctcctgtcctcatgagtgctttgaggctatcctgtctctggacaccgggtatcgcgcgccggtgaccctggtgcggaagggctgctggaccgggcctcctgcgggccaagacgcaatcgaacccggacgcgctgccgcaagactactcggtggtgcgcggctgcacaactgacaaatgcaacgcccacctcatgactcatgacgccctccccaacctgagccaagcacccgacccgccgacgctcagcggcgccgagtgctacgcctgtatcggggtccaccaggatgactgcgctatcggcaggtcccgacgagtccagtgtcaccaggaccagaccgcctgcttccagggcagtggcagaatgacagttggcaatttctcagtccctgtgtacatcagaacctgccaccggccctcctgcaccaccgagggcaccaccagcccctggacagccatcgacctccagggctcctgctgtgaggggtacctctgcaacaggaaatccatgacccagcccttcaccagtgcttcagccaccacccctccccgagcactacaggtcctggccctnctcctcccagtcctcctgctggtggggctctcagcatagaccgcccctccaggatgctggggacagggctcacacacctcattcttgctgcttcagcccctatcacatagctcactggaaaatgatgttaaagtaagaattgc

SEQ ID NO: 267427 - DNA, 582 bp, Homo Sapiens
  misc_feature (41)..(41): n is a, c, g, or t
gcacggagagccctgaccccaccagtaggctcgcccccagnaagggcccaagtggccgtctaccgtcaccttccagactcccgcccctaacacccagtggctacagtgcgcctgtcggggcacctggagcgctcacctggttgaattcaaagtcccagaaggccccgctggcgtgaagccggccccttacattttgcgaagtgcattatagtccttgtttttctctccctcgtgggggcaacgacccctcccctggcagtaggggtggggtaggtgactctcgctagatccctccaaagcagaccggtggcgatgtcagcggatgtcacgagctcgttagctgcgttcggggaaggttggggcgtcagggagctctcggatcacagcagcccccgccctctcctaggcctggcccggcagagcccccagagtggaccccccagcgactggggtcttctccccactcctccctccttctggtctgatgcggcagcgcgggggctgcggggcctgtttgggacgaacagagctctcccttggtaagacttattttgttaataaatggaatacttggctatattc

SEQ ID NO: 267428 - DNA, 811 bp, Homo Sapiens
  misc_feature (85)..(85): n is a, c, g, or t
  misc_feature (103)..(103): n is a, c, g, or t
aaaaggtgttcccggaaaagttggagtgacttctcccttgtcttgggggcctcttccctcaatgcacttcccatttccctgggcncagccaaatgcaaccacncagtaagaaagctaataatttgtttggttttacatagtgagttgtcagtgatgttgtctaaagggactcctgaaaccacgagtaaaccagaaacttggggtgcatagaatgcatccctcccttcaagatcttatgcactaaagaaagcagtgtaatgggacaaatccatttcccaaaacatgtccatggagattcaatggtcatagaatggtacacacacctttgatgttatgatagtggtcaagttaattgaaaacagccacgcaatgccaaccccgtgctaacacgtgtgattcctcccttaaattccatttacaggtcatccacagataggaaattcctcccaataaggtcaacacgacaaggacatcctgcagtgatctttcctacaatgctcctgccaacttggcactcatctataactttagaagaggaggcagaacatcagtgatgactgcaaacatatgcttgatttttttaagcaacgggaaaatgaaaaatgaacgggaggagggaacactgctgccttctgaggacagaagtcgtgtttcaagtagtcaggagtgatggggaggtgggacgagaatgaagacttaggggaatctgaacaaaacaaggtggtgtatggggaatgagggcagtcagtaaagccaaatagtaccaggtggaaaaatagcctaaaagaagtacaagtctaatcatccaaaa

SEQ ID NO: 267429 - DNA, 155 bp, Homo Sapiens
  misc_feature (16)..(16): n is a, c, g, or t
gctgcttttaatgtantaatattttaaaatccataatcctcaatttaagatgttattcaaatactatttgacccaccaatctcattactggatatatacccaaaggaatagaaatcattctattataaaaacacatggctgggcacagtggctca

SEQ ID NO: 267430 - DNA, 776 bp, Homo Sapiens
attcggcacagggaagaacgcctggcccaggaaatggaaactgcccttgcgcacttggagtctctcgcagtggatgtagaggtggccaatccaccagcaagcaaggagagcattgacgctcttcccgagatcctggtcactgaagatcatggcgcagttggtcaggagatgtgctgccccatctgctgtagcgaatatgtgaagggggaggtggcaactgagctgccgtgccaccactatttccacaagccgtgtgtgtccatctggcttcagaagtcaggcacctgccccgtgtgccgctgcatgttccctcccccactctaaagaccaaggccgtttactcctggtctgattattttccccatctgaaatccacaatactgcaggagccctcttgaaattaacaatggaaataaaaccaatcagtcagttagcctaaacctattgattcctcgtgattatttcccaatgtgaaaacagttgtgtatgattgcattaaaaatcatatcatcttttagaggttagaaaagggaaaactaaactttctaaatgctacttgagattgcagtaagaagatacgttttctaacctgaaagttaaatcgcatttgttttcttcagtagaatgggaatgtgttgctgttacttgtaatgtcaagtttatctgttaaatatgtccaaaaggcaaaatcatttttgttgcatgttatgggtcgatgttcctgtaattgcagtgccgtaaaagcttattaaagttgttcttttggttttaaaaaa

SEQ ID NO: 267431 - DNA, 733 bp, Homo Sapiens
aagtctgtcctaggcaaagtttcttcattcacagccaactacagcagtaaaatttaaaatgttttcagaaccactcaaaggcattattcatacactaatttgtaacttctattcaagtaccccaaactcatatatatatagtaagatataaaaccttcggtggattagtatagcacttagcacagaataggctttgaaaaaatatttgctgaatgaataagtggattttttaagtgggattaatcactactagtgtctagtgaataggagtactttctcttaatgaaaaccttagtacctacctgatgtttactacccatttttaaggaatatcaaaacagtgtcccacaaaaatgaacaggacaatgcactgagcttggggttactacattattctcaaatgagtagggaggttttttcttcctaaaacccatatcgtattgaacatctactattaaagcactatgtattcctgatagtgtaggggaaaaaggagcacaggctaaggcagaatatatggaataaaatatgccaaaagtatgaaatagtagacaagtacaaataacatatgctcagattaaataagagcaaaaattagttaagactgtcataacctttatgacagtcatagggcaatgtgacattatttaccaaaatgtataatatactttaagccccaggaattccatctcttacttacagatatattaaaaatgagtcaagctgtgccgaa

SEQ ID NO: 267432 - DNA, 538 bp, Homo Sapiens
  misc_feature (386)..(386): n is a, c, g, or t
aaagccaggcttcatccagaaaaaagaatatgtatcatccttgcttcatctatagaaatataatataaataaatttagcaagtgatatttcctcaaacttgtttcctctttcctcctattatctctactccgatttccttctactgtgctttttctattttcttaaatatttatgaatctcattgtttctttctctcaactgtatgttttaaagtttcatctagttttaaagatctcaccattgttactcccatttcatttttcttatttgctctatttaccagtgatgggatatttagctaggctatctccaaatccccactactacaaactatgcagctacaaagattatatcctcaaagatctgtttaaaaattcctctgagngctgggtcagagggattaaacacttctgatttaattattgactggtttacagaatgacaatattagtttacactcacatcgtaagtacacagatatctacaccatacccaatacttggcatcagaaaacttttaaatatttgtcattttgat

SEQ ID NO: 267433 - DNA, 759 bp, Homo Sapiens
  misc_feature (451)..(451): n is a, c, g, or t
cagttctacagagtggagccagctgtcaacatgtgcttgcaagccatctgcagagatactcactcgcttttcacaggagcgcacttgggagccagccaaagagtgggtgaggcatttggagcattcggggttttgttggcaagatgggagggatgcatcccctgtgggcttataggtgggttcctgatggagtccatgaagtaactgggtaggatctatgggcagttccaagtatggggctgctgtttgaggtccccatctctctttcctgcttttaccctctccccaaccactccaccttgctgatcacctcaatattctgggtgagatgaaaataaagtggatctcttgggcaggggcctgtatgtcttgagaaactggacacttacttattatactctccttttcctctgtggaagaaataatgggctcttgtttactggagctgtgnccacttttgggggttggtgatgcaggtaaagtgaaactgtttataccctttccaatgaatctattcttagatttctttactcctctggtgtgctgaagttttactgtcaactcctgaactcccacaaggtactcttgcccatggatggttgtcaaaattgatacttatgtgggaaacacctacagaaaattcctattctgccattttggtgctataacccaaaattacatctttatataataccatcaacacaagtttataattgagattatattttaaatcaaataggaaaagacaaatgttacaaa

SEQ ID NO: 267434 - DNA, 217 bp, Homo Sapiens
gttcaaaatttgggttcttgaaaaaaacaagatgaacacatagattgtcttagaaaacaaagctcttacattattagttaaatacattttttttcactgggatcatgtttgaaaactaaagttgtgggataacttgtatcttttgaggagcttaacattcctaggccagggaaataacaagcaaagaaataatttgattttatattttaaagttcat

SEQ ID NO: 267435 - DNA, 771 bp, Homo Sapiens
  misc_feature (526)..(650): n is a, c, g, or t
  misc_feature (732)..(732): n is a, c, g, or t
ataataacagtaccaacaaacattagaactagtttttttatgtttagtaggtttatcagttacctaataaatacattaaaatagcatactatgtatcagttaggaattgtaataaaaatcaagacatgtactctccacaaatttatttaaatttaatgaattatgagtcggggggcaagataaaatagctgtgaaatgtaattagaagaatatacaaacaacaaacaataacgtttcaaacctagaacgatgcaaggaaacatgcactatttgatattatgaagtcctgtgaagtccaaagatgagttacagaaagtgacttcaggggcccatggcacatgctttctgtgtgtatgtgcatgtgtgttaagtggtttcttccttgcccctttttgtattttccaccgcaccgggccaagacattcatttgtagccatagaactcagtgtatccagatgggaaggtgtggtaggcagaattctggcccccatgactgccccttcccctcacaccccccgggttgctnnnnnnnnnnnnnnnnnnnnnnnnnnnnnnnnnnnnnnnnnnnnnnnnnnnnnnnnnnnnnnnnnnnnnnnnnnnnnnnnnnnnnnnnnnnnnnnnnnnnnnnnnnnnnnnnnnnnnnnnnnnnntcaagagcagagctggagagatgccgcgcaggaggcctgggtgccgtttcggagcaggatggaaggcagtgaatcccgcctncagcatggagctcgggagaggccctgactgcagatggag

SEQ ID NO: 267436 - DNA, 569 bp, Homo Sapiens
acaacatcgaaagaaaacacttgtctgggtcagatctcatcaattagacaatttccaacagagaacacatctctagataactacatgtctgtcatataagggatatgtggacttccggctatgtgcttacagtaaattatctcaagaaaactaggcagcaggtagaaaaagagcaatgcaatcccacttttttaatgctcttgcctatagtctttgatggactgaacttcatttgatgaccatttctattcttgcctgcaatttgggaatgttaaatcctatctcataggagtgtgtatgggtagcatgaactaaggtagataaaggcttcacgtggtgtttggcatggcgtaggtgtagattggacctcagttttctgcccatgtttgctcttcacgtacctgtctggtatctgtatgtgctaagctctgagccttacaaaccatagggagagatatgcaaacttgccctcaatgagcatgttgtctagcgaggaagatgaaatgcatagacagacaactagaggtggggtttgagggagcccaagaaataagcactgacaacacttt

SEQ ID NO: 267437 - DNA, 816 bp, Homo Sapiens
  misc_feature (45)..(112): n is a, c, g, or t
tgagccatcacacccagccctctcaagcttcttgagaaaaggaannnnnnnnnnnnnnnnnnnnnnnnnnnnnnnnnnnnnnnnnnnnnnnnnnnnnnnnnnnnnnnnnnnnggcagataaaggaacaagtaaaagtatgtaaagtaacacaagccaaggaaattttccccattttgttattaataatattttttaatgctcaatgtgtttgggctttccttttttaacagccttattaatcttagggttaccaatatatattaaaattacataaaagaaaagggaaaaatacaaatatttaggcttacttgtcttatttaaatgcaaacataagcatgtttcttctcctgaaaactaatagtggactattctttcaaactaaaggtactcttatctatccatagacatttcagtgccaaatacactttgatatgtaacaaaaaggaaaccctgaaagaattataggtaagcatattttaggaataatatcaatattgaatgtaccacaggaacttctgcccctcctataggaacactggctttgtataaagtgattgatcattctctttagttttacaaacctgaattttgatgtacattattgggctttcttaaggtagatacagtcatggaacactaaaaactaagaaagagttcaggcttgtgaagaaaagaaggctaaatttggaagctacataatgaagaatattctcctaaccctgtcttgacttaaattaagaagtgatctccaacttttttggtttctaaatttgtggcaaaattccaaaacctgaagattaaggtattaaattgct

SEQ ID NO: 267438 - DNA, 721 bp, Homo Sapiens
  misc_feature (555)..(555): n is a, c, g, or t
ttttggtaaagtaaagcaggtatcttcatcggtaacacacaggtaaaaatagaaaccaccatacaaacttaaggattaaacacaatgcctagcacacagggatgtgctgactaaatggcagtaatgactggctgatgtcaaggaaaattactatgtctttctttcaaataacccatttgatttatcgtcaggaatgaatatggagctgcctggatagggtcttactcattgctaaaattcttatggattcttagattcacttccttcttgaaaataatcagtttttctttacaggtgcctaaaacaaaaatcaatttgtttaccagttttgtgtaccttccttccattcttgaagccagagatactgatttaggtctaacatatctttgcaaactctcataagtaaaactcatgaagaacggaaagggtaataaaattcatctttaaaaagtaattaagcttcctgttcccttcctgaaaccattaggcagagcaagatagaacattcacacaggggtggcctggtgtggagtgtcagaccctaaaaaaaatgancaagcccacccaggtggggatgtgggtggccaagaatggagaatcaatgtatgacaagataaggaggagatcacctagggtgacatcctggcacagggtgttagagcttactatggtaaggagggtatttgcacacaagagaactggcagcagtaatgagagattg

SEQ ID NO: 267439 - DNA, 690 bp, Homo Sapiens
tatattttatatacttggttccattttgatagatatttgggttgcttccttgaagaatgttgtgcgtacaccgtttgacacaggtgcaagcttatctgcagggggaagccgatttgcaggactcattcctatagggagaggggccaggccaagggacttaagtgtttgtgaatttgtaggaactgccagattacccacacttaggcagtttacaccccttccctccagcactggctgcagagagccctgtcctccagggccctaatgctaattctttcatgattgcactaattatatgcacaaaaggaatgcaacagaacaaaacaaaccacctggttttgtaggtgtggaagtgcacattgcagtaaggagtcaatgaaatcggttactgtgggtccttttagagaccaacctcgcagttagccagcaacaggctgcagcttagctagatgaaaagttagtttgagaaactgaagtcattgccgctaaggctggcaaggtgtggctggggccaagttgggggaatgtcgtagtagccggccctgtgcgcctgagcccacaattactgcgtcgctgctggggtctggcaaagctcaccttgatgcagttttgttcaaagcagtgcaatttccaagcctcaaaacagatccttttcaatacaatgtgattgtaaaaattctattaataaag

SEQ ID NO: 267440 - DNA, 1004 bp, Homo Sapiens
  misc_feature (863)..(863): n is a, c, g, or t
  misc_feature (886)..(886): n is a, c, g, or t
  misc_feature (920)..(920): n is a, c, g, or t
  misc_feature (926)..(926): n is a, c, g, or t
  misc_feature (933)..(933): n is a, c, g, or t
  misc_feature (938)..(938): n is a, c, g, or t
  misc_feature (947)..(947): n is a, c, g, or t
  misc_feature (952)..(952): n is a, c, g, or t
  misc_feature (966)..(966): n is a, c, g, or t
  misc_feature (977)..(977): n is a, c, g, or t
  misc_feature (988)..(988): n is a, c, g, or t
gctacagactctgggatcaaactagaacctgttccaggattgccaggagctcttcctcctcctcctgcagcagaagaagaagcctctgccaactacttcaacttgcccccaagtggtcctccagctgtggtgaacattgctctgccaccgccccctggcattgctccacccccacccccaggttttgggccacacatgttccacccaatgggaccaccccctcctttcatgcgggctccaggaccaatccactatccttctcaggaccctcagaggatgggagctcatgctggaaaacacagcagcccctagcaccttgtcaccactctggggctctgtggaagaaagggcacttaaaactcccagtaaatcttggaataaatatatttttccttcccttgtagtttccatggtaagctgaatgtgctcagatgtgagcagtcagagactgacagccatgctttcctatacttgttcaaaggatcgatggaccgtaaataagctgccattaacacatctggttactgctgtaacatgactaataaaaccgaacgcctgttccccttacccgtgtgggggacacgcagatgagtgaagtggaatgtccagcagagttaccctcccaattatatgttcattttgtatattttttggtcgggggaaaaattgacctgcagtaaaaaaacctttgaccatttttatgtccattggatactttcctttttatcatcttaaaaaaagataactagtactaatcattgtagtggcctaagtgtgatttaactcttgaagtcacaccctccgaaagatgagtaggaaaccaggcaccagcacagcccagatcttctctttcctctcctttntcctcatttatttcctaaagggntctggaccctttttacgtctcttacggggcccanaaaaangggcaanagttnaaatttccnttttnatttcccgttcaanggggtgggggnaacacaatttnctggggggctgtggtt

SEQ ID NO: 267441 - DNA, 879 bp, Homo Sapiens
  misc_feature (729)..(729): n is a, c, g, or t
  misc_feature (739)..(739): n is a, c, g, or t
ccaatcatacacatgagaaacgtacattcatacacaagccttttcacacagcactcccctgagacaccctcagagagttcacactgatgggaaatgaccatgggaccaccaagctctaggtcatccatctctgcatccaaatagtagggaaacgtggagataatcaacactcagggaccttcagccttggaacgcccattagtgctatgttataggaacctacaaaaaagaaatggggaacaaatgtagtggatccagggaacgcttttgtccaaggattcaccgtattccaaaccagagatgttcaaattggtgagaaacccaacaaatgcctttcatatatacgagaaccaaatgaagtcagaatttgccattattgcacatcacatttttgggggggaaagtgcttatgaatggtgcaggttgactctgatattcattcccaaatgacagtatggcagagtgttccagaaatgagagtggcatctttatggaatcactgtggatactgactgtctcagtaaacagctgtcttgtctgtgtgtatattgtttgatcagggtacatggcagccagtcacagattggaattacatatgacaaagtatcagtgtactataaacaggtttttagttatccctgcattatttttgcaattaatctttatatgcaatgagattgaaaagctttgtatgggaagactcaaaatgtaaagctgctcccgtagagnctcactgatnctgagatggcttttgctgctctgttctccctctacatttctctgcagaactcgcgttagaaacacagatatttgttttacaaaaagggagatttttcctttgttaaaccatcgtcttataagcaatagcaaattcatgta

SEQ ID NO: 267442 - DNA, 554 bp, Homo Sapiens
  misc_feature (187)..(187): n is a, c, g, or t
  misc_feature (197)..(197): n is a, c, g, or t
tgctaaaaatcagaaaactttaacattcttcaaagcactaaaatggattgagccaattatgccaattacaaatttccatatacatatacgccacatgaatgtataaatattttcatttcagatttactagtccatttgatcaagaaatttgaacatctggagatcaggaaaatgcaaatcaaaaccncgatgagacncaactctatgaacatagtaaaagccactgaattgtatacttttaaatgtgtgaatagtgtgacatgtaaattatagctcaataaaagcttttaagaaaaacaaaacactatttcttttaaagcaaagaactggtgtatgtaacaaagttggttaaacacactttgctgaatactgctcctataaggctttttatatctcacctaaaatttctgaaagtcaaatataacaagaaagaaggaagactggaaaagtagttcaagataaaccttcatgtgaagtattatatgctttactgttttctaaaaagcgtcaaaacatctctacagcttctgccatttggaaattaagaaattctt

SEQ ID NO: 267443 - DNA, 764 bp, Homo Sapiens
tcaccataagcccttccctcaggccccttcttcagcattccttgcttctcagcatagcccgagaacccccgatccctgacactttgcttcttctcagctcccagatggatcctggacaggatgctgcaggtggtgcaggaggggaatcctgccccatttatcatcaacacagtaaaaaggggtcgaagagaccgagagcgccagaggacgccatgggctccacatccacttggattccaggggagtaagcctcttcgacttcaggagtaagcaaggccaaccgtttggttttgagcctgttgcttcttaaggaaaagcgagggaaaaatcctgaggacctcctcccctcgccctttcatccacttcaggggaccgagtgtctccacggaacttcacaagggaggaaaagagtgaactcattattatttgtcttgtcttcgtttcagaggcggtacatctacgaaagccctaatccatagagggaaagactcctcgtccctggcccagaaatgagatgagaaatccagggccccgtacaggaaggcctttcgcaaagtccagactcaattgccttcgcagcccttaaagtttccttaggaaggtctgtgggagaacgaggttggtttaggaattggcccctgccttgtactacgtagttttgtcatccaaagtgttttagaagtgaattgaatcatagttacgccttattttgaaacactgtaattcagagaacgtaaaaccttattaaaatgcctcataatcat

SEQ ID NO: 267444 - DNA, 941 bp, Homo Sapiens
  misc_feature (385)..(385): n is a, c, g, or t
  misc_feature (825)..(835): n is a, c, g, or t
tttgagatgtactgtaattggctagaccttgattacaaaatcagattatagactgtttttatatttcactacaaaaatttgggggcatgtatatcaatcactggatggggtggttgaggcttctaacactgtcattagcttaactgttctgctaaaaaggaaaactaaatacccttccaggaggcctggatttcattgcttttaatttagtcaaaatttagtttaaaatgcacaaaggaaatactgcctggggagtccaggaaagctttcaagaagcaagccatgtgcttaagacagacaggggctcctgtataaagagggaatagaaggtcccctctgaggccccccagccagccacgtggccatccacgtgatgacaaaccancccctctccacatccccagcacaatgtgacatcactccacattttgggacctcagtttcctcatctgtaaagcaagaaggggctggactaatcaagctccttctaattctaaaatactattctattttatgactttagcaggatacttctatcctgcctacaaataaaatacactaaggaaagagctccttcaatgacatcttttttctcaccacctttgatgtgtcttagaagcagaagcagatgcttctatgattgtttctcatggattcccaggtgctttgcatgttacctagtggagctacaaatggcgacgcccactacacacatactccccagcttattggggctactttgaaaagggatttgaaaaacacaaggtttttgaacacatttaaatcataccattaaaatagtgtacatgagttttcttacccttnnnnnnnnnnngccttatattcccacagtacgtacttgtaaatggcttaaggtcctcacacagatgccagttaactttataatataaggaaatgaacagtagattatagagtgtcct

SEQ ID NO: 267445 - DNA, 593 bp, Homo Sapiens
  misc_feature (11)..(11): n is a, c, g, or t
ggaaaaataancacgtcaaaaatcatagaaatgaaataaaatgagcacatcaagggtaaatacattcaagcacatgtgaatttgtaaagcacatacacataattcctttcttcctgtttcacctctaaataccctactccccaatccctaaagcagacagtggaaagcagtgattgaaatctcatacatggatatggaaacttcacatttaactgtgaaatgagccagacaacccatgattttgtaggtaagaaaaaaaagagcctcaggggttatgcacatggccccaaatcatgcaacccagtcaagatcacaaccccagatgcccagcccctagccctttgttcattttaggactaatgattaaataatcccatatatgaaagacaaattaaaaagacagccttgccaagggtatttgaacaagggagtaggagagaggagcggaaggatgcagatagagtaacagccctccaaagacgactccaaaagctttcacggccacaggggcactgcgagggtgatgaaattcagcatcttggccgggtgtggcagctcatgcctgtaatctcaacactttggggggattactt

SEQ ID NO: 267446 - DNA, 796 bp, Homo Sapiens
  misc_feature (323)..(385): n is a, c, g, or t
  misc_feature (729)..(729): n is a, c, g, or t
  misc_feature (756)..(756): n is a, c, g, or t
  misc_feature (762)..(762): n is a, c, g, or t
  misc_feature (766)..(766): n is a, c, g, or t
  misc_feature (771)..(771): n is a, c, g, or t
attgcagctgccatggtatataacgagttcattctgccttcggagcgagatggatttctcagacggattcgggagattatccagcgagtggagaccctgttgaagagagacactggccccatggaggctgctgaagacaccctaagcccccaggaggagccagcaccattacctgccctgcccgtccccctcccagacccatccaatgaagagctccagagcagcacctccctggagcacaggagctggacagccttctccacctcctcatcttctcctgggaactcctttgtctcctgggaaacccattttcccctggaacnnnnnnnnnnnnnnnnnnnnnnnnnnnnnnnnnnnnnnnnnnnnnnnnnnnnnnnnnnnnnnnattctcccccatttcttcccaggtctcctcaaatccctctccacaccccaccagctctccacttccattctcctccagcacacccgagtttccggtcccactctctcagtgtccctggagttctctccccacgacttctccacctacgttctctcccacttgttctcaggtcactcttagttcccctttctttcctccgtgcccctccacttcttccttcccctccaccacagcagcccctctcctttctctggctagtgccttctcactggctgtgatgactgtggcccagtccctgctgtccccctcacctgggctcctttcccagtctcctccagcccctnctagtcccctccctagcctgccccttncccctnccgntgctnctggtggccaggaaagcccttcacc

SEQ ID NO: 267447 - DNA, 609 bp, Homo Sapiens
  misc_feature (293)..(306): n is a, c, g, or t
  misc_feature (310)..(364): n is a, c, g, or t
  misc_feature (417)..(544): n is a, c, g, or t
ttcaaagagcaaagatttgacaatgcatagaattaacattggtttgtgggccaccttctgggccagcaccaaagactgaaaaaatattttgccccctaaaagttgttattgagtcttgtcaaatcacattgctctgtcagaaggtaagacaaatcagtgtggactgagagcaaggtcagcaccgtgaacagccattgcggttcctttaacccactggggaattcatggcagtgaaggaaggcaacacaccatgaggcaaatggctcaaacccaaagaccagaggttcaggggnnnnnnnnnnnnnntttnnnnnnnnnnnnnnnnnnnnnnnnnnnnnnnnnnnnnnnnnnnnnnnnnnnnnnngggctcatgctgtcctacctcagacttccaagtagctgggttttctttgggcnnnnnnnnnnnnnnnnnnnnnnnnnnnnnnnnnnnnnnnnnnnnnnnnnnnnnnnnnnnnnnnnnnnnnnnnnnnnnnnnnnnnnnnnnnnnnnnnnnnnnnnnnnnnnnnnnnnnnnnnnnnnnnnnagaacagtatgaagtgttaacgccaaaatttgttttagctatcatatataaatcataagcatatt

SEQ ID NO: 267448 - DNA, 766 bp, Homo Sapiens
tgccaccggcggcacaccatggcttcaccaaccggctgctggctggtgtgcagcagagccaaaatgtgtcggcatggcaggtggtaccattgttgaaaggaacagctgcagctacagccatctttgctaacctggtgagagtcctctagcagctgaacgtccactgaagagccagccatgtccaccaggtgggtggagttctgtaccacctcccactcattgtggcacagcttgtaggctagttcagagccactctggtgcaaggtgtccagcatgccaacctgcgagggcggcacttgtgactgctgctgtacctgtacctgctgtgcgtcggccttggtctcttctgcagggaagctggtaaggctctctcccacagattcccaaaacccttcttggaacttcagtggcaatgcttgccggccgagctctctttaatttgggaggaggtgtgggcaagttcttcaagcctttggtattaaagaagtctatgtaatccacaaagcagaggatgcagtccagcagcgactgctgttctcgaaagaggcttgacaccttgctggtgacaatgtctaggctgtccatgtaggtgttacacgcaagcaggcccttcctaacatgcatgtaccacagcagttcacaggtgaaccagtgggcctgcaggaagttgaagagatcctcatccagtacggcctgggacatctggcagagatttttcaggctggcttcagaagtgacaaacacggctctcccgcagggcttcctt

SEQ ID NO: 267449 - DNA, 488 bp, Homo Sapiens
  misc_feature (42)..(42): n is a, c, g, or t
  misc_feature (122)..(122): n is a, c, g, or t
  misc_feature (152)..(152): n is a, c, g, or t
acccatattacatcttggttagaaatagttgtttggaactcntctctgtaagttcaaaggaactatagccctttcgagagtcaataacagtaccttttacttacaaaactaacatttagttnccgcagataaactgcaaagcattgtgactnctggtgaggaaggtaattaatctaattgagctgaacacataacggttttcgagtggataaaactgcaccttgggacacttgagcccagcagcaatgcctgccctatttcaggaatgcgcagaggttgataggaaggcagctgcactgagttcaccttttagtttgacaaaaggatttccttcgtcacaccctaaggctcctttagaaagaagcaacttataaaattatatcctgttaaataccctaatatcaaagtgggaaacggaccgatttaagacttaatcagcttaattgtaagattttgccggtcagcaacataccaagcttgacttgctc

SEQ ID NO: 267450 - DNA, 634 bp, Homo Sapiens
atgagccaccatgcccagcatttctaaataattttgtggaatgtaagacatgtaaatataaagaagaccaaaaattagaagaggtcagagtaattgaaatttcattggaaacctttcctcaatggaatacacagtcattgcaaaaaccaacacctcaacctttactgaaagtgaaagttagcaaaaactagtgaatcaattccatcctgctattaaaaaggccagattcattgtcaaagggataaattctgggtcttacattctttttccaccatctgctcttttttaaataactttttcctaaatatggtagatcatggctccccttaactttcaaccgacaaagcagccatacctacctctttctaagatgaaattgtgacactgatctcacaggtgcctatgccatgtaaacagcaggaatgtcaccttgggtaggcccagggtatggaacgtaatagagagccctgtgtataggacagggtcactccttagctgatacttctaaggacccatcacaggcaagtggaatttctctatcctgacttcattcccaggtcaatgctgacatatagagttctaaatctagataatttgtaattagtgaagttgaaaatataccataatttcaagt

SEQ ID NO: 267451 - DNA, 896 bp, Homo Sapiens
  misc_feature (118)..(189): n is a, c, g, or t
taggaagcaagctaacaagcagcaggctacggctgcctacaagtgtacataggtatctgcctgtccccctaactgggcatcagctccaggccagcagggctttcccctctctttcagnnnnnnnnnnnnnnnnnnnnnnnnnnnnnnnnnnnnnnnnnnnnnnnnnnnnnnnnnnnnnnnnnnnnnnnnaagcctggaaaaccaggctgtgtcgtgaagataataggcagccactgaggtcttactgcatgagaacaaggaaagctcagctcagtgtagattgccggacctaaattttgtggaatcgcctttcatacctaagaggcgagcaccgttgccagctttgcacttggagccccctctgtcatttattttgttgacttaaaagctgttttgtgaacccagcataatggcacttcttaaacttgtagaaaaagggtgtttcttacctgtttatttcaacacatctcgttgcctcacctggagaggcaactctcctctgtagagtgaaagactataatggtggccatgtagaaactaatattccagaaggagagagctccaagaaggggattccagtgaaccatatgtacactgtgtttgagagacattagttccccacggagaagggatggatagtctgtgcttcgggggtctaaggaaggcttcctgcaggtgctggtacctccttaggtctggggtggttccttctaagtttccttaccctgcctgcatcacctctgcctcttatgacctctgtgcaaagactgggaagggtcacccccaatggctgtgaacgaacctgtttgtgattctaaacagggcacgggaccatcctacaataaaaattacccagcctaaaatgccagtagtgccagtagtccctgtttagaaaa

SEQ ID NO: 267452 - DNA, 417 bp, Homo Sapiens
attactgaaaaagtaattggccctctagattcctgtaatatgaaaccaattaaattatccgcatatatttgcagggtagtttacacaatgcccatccggccttatcctcactgaaagcaaagctttatgagtaaactcctaaaaatttaagcaaattatgatgataactgttgccttaaaagctaaatagtttgtgttaaatatggtgctcaataagcaagagttactttaataaatctctagatttgcttcattaagataatcaagtagcagatgggttaggccttctcttgtttttcatccttttgccctttccagaatcttacctacataatgtcccaattcctgagcaattctgaactaagaaactcatccacattcttgaattcatttttcacaagctaacttggtcttttt

SEQ ID NO: 267453 - DNA, 1024 bp, Homo Sapiens
  misc_feature (583)..(591): n is a, c, g, or t
ttttttggtagatgacacagaaacttctcagtttattcccctgtgtcatctaaaatactataatttgccacagaaatttgctctgatgcagtcccctgaaatcattctaccaccctcaattgtggcaggaaatatgtttaaaatgttgtctcagtataatgcaaaagccagagttaagagtgatatggaaaagtgatccgatgaggtggagaggcaagaatagtagcatgaatctcagttgtgtatattttgacaagaaataggaaggggcaaaaccaaggagaaggtggcagggatggagaaaagagggtggctttccaagagataggcttcgtcttggttctgcctgcatagttgcagcacttgaggggttggagagggaccacagggggtcacagagctatgtctccagcatcaaaattagagggcccaaagacataattcagaagtttgggatgcaaacttttttgaagttctctcatgagatctgccatcaagatcctgactgttgtcatattgagtttgttttcatagcaagatttattgttatcaagttctatcgtaccttgtaaagctttttttnnnnnnnnncttcagagtgattttgagctatagtatggcaaaatttataccctgctacctttctggagcccatacaatatactacgacagaaaatataaggtggcacgttgtatataatacaagtgataatggagaaactgaataattggaagtactctaaaactacacccagacacgggggtgggggatagcagtataaaatgttcatcaaccaaagtcaaagtataaaaggagaagcaggactttggagcaggagtgtaagatctcagggactcatgggtggggtgagggtggatatgggagaataactttacaaaatattgagggtaataattacaaagtttggcctacccagaaagactagatagggatgctgaaaaaggtgaaagcgctcacctttttccagccaagactgactatacgtaggtggcttcattctga

SEQ ID NO: 267454 - DNA, 711 bp, Homo Sapiens
  misc_feature (241)..(307): n is a, c, g, or t
  misc_feature (562)..(572): n is a, c, g, or t
ctctgcacttcatctcagcccagcacttctgttggggctgagatggaagtctcggaaggtgctctgaggaggtgtgactctccctggctgacaggggaaggcttagcagagctttgtcttagaggagtagatgaaaaggaaagtacagagagggcattcaggccaagtcagcaacacagacaaagtcaggtaatgtgggttaagtgcatgggtgatgagtaaaggggatgtggctagatgnnnnnnnnnnnnnnnnnnnnnnnnnnnnnnnnnnnnnnnnnnnnnnnnnnnnnnnnnnnnnnnnnnnagtgacagcaacagcaaagggcccgtcatgagtggctaagaccagatgtaggtagacttggaggggctgctaaggaatttcataggcaatggggaaccatgaactatcactaggcaggggaggagccttcgggaactaatcctgaactttatcattgcaatgcgtatctcagcaagaatgggcaggattgcatagttaggagtactgccttactttttaaagaagtggtgaaaatatttaatattttcatatacnnnnnnnnnnngaagataaaaggattaggtccagcatttcaccctacagaggatttaaatttttcatcaggaatgagatttgagtgtaagaagatgaaacgatattatactgataagaccacagggtattgaagttcatggtgctagctc

SEQ ID NO: 267455 - DNA, 693 bp, Homo Sapiens
ctccatttccttcactcatgattacgaccagctgccccatcgccctcatttagactttatctgcatttgctgttgggttctctcttcatcttgtccgctgtgcctgccgaaaccactggtctttggtaagaaaactcctttaccttctccacctgcttcctagaacagcccctctgccttcctgtggatggagagctagcctgcccctgatgatactcctgtccttctggctttctcaggaagcagcggcacccacatagggaggctgcggaaggggcacaatctgtgtgctttccactggtcccgagagagagtggcctgggcccttctcgttagttcctctacccgagtccttctacctctttcctgtcccttttgctttattgcctggcctcgtggacttcatcacatgcttttagcatttgagaaccctggccaggatggaaatgtccctattaaatgttccttatacataaaatgatctgaggaaaatccaaaattatttcctaacatcttacgtactgggtataaaagaggttcgctcttcagatatacagagcacacacttactgtattgaaaatatgattacattcagcctaggcaaaccatcattttaggcttacatgacataaatgtatttttgttaaatcttaagacatttctgtccacaggcatggtgatataagaaagag

SEQ ID NO: 267456 - DNA, 746 bp, Homo Sapiens
  misc_feature (112)..(129): n is a, c, g, or t
gatgaatgctagagaaactgatctagagtggctcctcttggttagaacgagctgaagcatactgtatatatttacttctttaaaaaatttcatataaaggaatagaatactnnnnnnnnnnnnnnnnnnggtcacaatattccataattccatcactcctaccaattaactgaagtaaaaaaaccctctcaagtctctccctttgcttgtcaagccctgctgcagagaggtaagctctgttcagaatttactttgtgtcctggattttttcctatgctcatagagacaggattagctggccatcttgctttctgtgctatcttttctagacatgtaaaataatacatttgaaatacttgttttaatggtattttataataaagcagcttttaataacttttctcttttccagccgtctttgtggcaattttacattggtaagatttagtttcagttcgaaatatttaaaaacatttgaattaaaaattgccatcactctttgcatacagtaaaacaataacttctggctatatttgtagaacatctttatgtacgccattttatacatatattttgcttttttacaaacctcatatgtgaaacagcatttacaaaatagatgcattgggggaatagtaacttatgaattaaaatattttggctttaccaaataattcaccacgtttttaaaaatatctagcttttctagtgtattttgcatgtgtagttcatttaaaaccctcctt

SEQ ID NO: 267457 - DNA, 706 bp, Homo Sapiens
cacatgagcttcaataccctgttctatactctttttcttttttgcttacctaactataccccaacaataaatataatgaagtaggataaaaagaggctgaaaaatcctctaacaaaaaaatcccaattgctttgatgaagtagtttatttatcattgtaaccacaatacaaatggtagctagctgttcctacctcagtatcctaagaatggcctctccctccctcaaaaagtctacatgttctcacctagtatcggtagcattacagatagttaggtgtctgtaacagaatctgttgttgccgggccagggaagccaagtaacccaaggccagaggtagtggctatttaggtcaccatcaaatctatgatggcctcattatgtgtcccactgaatgtcaaagaaatagaatacttcatgttttaaagattttaaagtacttaagtaatgtacatacagtgtataagtttaaaagtttctagactaagattcctggtttgaccaatttctaaccaagaaatcactagggttttcttaatgtattacagaatatggttaaattcagaataaaatattttagcctacatacatctatagctctaaaaagtaaaaaataggaaaattggctgctaagtactctaatattatcaataatgaagactttccgagcaaggaaataaaaaacacaatcataacagtgaagtaga

SEQ ID NO: 267458 - DNA, 1027 bp, Homo Sapiens
  misc_feature (305)..(363): n is a, c, g, or t
gcccagtaattcggcacgagcaacttaagatgttgaggtgactgttggatatttgaatccagagtttgggaaagaggtctgtaatatcccttggtatgtgttaaaatccttaggccagtacatacagttcacttatttaatcagattgttaagataatagttttctccttatcctatatgtagagccaatacaatttatttttcaccttaggagttagaaaagaggaacaaattcaaccccaaataagtaggaaataagaaattcatgaaataggaaacaaacaatggagaaattttaaaagtgnnnnnnnnnnnnnnnnnnnnnnnnnnnnnnnnnnnnnnnnnnnnnnnnnnnnnnnnnnntgtattagcctgttctcacactgttgtaaagaactacctgagactgggtaatttatgaagaaaagagatttaattgactcacaggcccacaggcttaacaggaagcatgactgggagtcctcagtaaacttacagtcatggcagaaggtgaagggcaagcaagcacctttttcacatgatggcaggagagagagtgacaatgaggggggaaatgccacacatgtttaaaccatcagatctcatgagaactcactatcacaagaacagcaagggggaaattggcccctgtgatccaatggtcccccaccaaacccctcccccaattcaacatgagatttggggcaagggatgcaaatcccaaactatatcacccaagaaaaaaagtgaaaacataaattatccacatcacaaatgaaaagagggcatcagtttagaccctacatatattaaaagtaaagtgggtatggaaaacttcattgacaagccgcaacttgatgaaattgacaaatactttaaaagacacagtttaccaaaactgacacaagaagaaatagaaaatcttaaggaactccatatctactacagagattgaatttgtaataaaaaattttctaacaaaaaaactctaggcccatagtagcagtaaattttatcaaccattcaa

SEQ ID NO: 267459 - DNA, 388 bp, Homo Sapiens
aacttaagatgttgaggtgactgttggatatttgaatccagagtttgggaaagaggtctgtaatatcccttggtatgtgttaaaatccttaggccagtacatacagttcatttatttaatcagattgttaagataatagttttctccttatcctatatgtagagccaatacaatttatttttcaccttagggagttaggaaaagagggaacaaattcaaccccaaataagtagggaaataaggaaattcatggaaatagggaaacaaacaatgggaggaaattttaaaagtggaaaagttgggccttttgaaaaggtaaataaattggattaaaccccaaggcaagacttacccaagtgtattaggcctgttcttcacactgttgtta

SEQ ID NO: 267460 - DNA, 927 bp, Homo Sapiens
  misc_feature (242)..(252): n is a, c, g, or t
agggacaaagtacctcctgttggtaaacatctcaccaccaacccactgtggtggctaaaatcccacctttagtcccagcaacatatgagcatgtcaccaggaggtcttcacaggcctgtctgccacctgagtgtagacatcttttggccctggagcccagagaggctgaatgtggagagggtggagagaggtctgtagtcctcagagaagacttgcagctttttcagagccaccaacccatnnnnnnnnnnntccccaaacagaaaaatcctaactgtggtgaccaggtacctcctgagacatgaagcctccacttacctggaccctggaggcctctccgggcacagctgccaatgttgatcttagataagaccaccagcaagtaaacatccactgtgcaaagctgtgttatctttggggaactgaaatgtcccctgggagttggaaactcccctagccacataccacagagttgaggaaggaagagctgatggacggaagaaccatggcgggaggagtcatccggaagctacctcgctgccctgtcagttacggaacagaggagagatgccggctggaggacacagcaaatttgaaccaagaggagcttggaggaagcccgagcgacctggaggggactggctgaccttcctcattcttttcaagtgtgaataataaccaagcccagtttggcaactccttgagggtgaggacgaagccccattctcctttttggaacttggtggggctcaggaagcaggttctctccagtcggtggctttcctttctgttgcgggtctcttgagggcctgccttcatgaaggcacatgagtgactcatcatttgtgaattaattgctatatgtgaagggcatctgagaacaaattatcttcatagacttttcattataattttatttgtactgat

SEQ ID NO: 267461 - DNA, 831 bp, Homo Sapiens
gaatataggcaatctattttcctccctgcccctctctccatatccctcctccctgacttcttttttgttcttgtttaaggaatcaatccacgtggacagggagaaggaaaagggagaacaggcaccaaaatgctactggataggaaaaagaagataggtgaatatggggacatggagagggcacggacgtgggcgggcagtggaatggcccatttatacttagggtcaagaactgggccaggcctggagcatctgcaatgggtgtggaggcagcagagacaggaagtctgattttcaaagacatctaagaagcaggacaagttccagctcctgtcccaccctgggcagaagacagggtggctccatctctggagagggtggaatcagggtctctgacagaggagcccagatccccctgggacaatcaggttactgattaggctacagcccctcgctcactgggctccaggatgcaggccagcccaagcctccccttcctgcagggaccagggagagtcttgtgacaatagcccgggaggaccaacccgcagcactaaggtcagaaggccccaacaaggaaaggttcagctcacagaaggcagtgcccatccctacagcgtcccccactcttaaacatgggcaggccatctgaggagagcctcacacagaaacgggaaggcagcctagaggaaagagatccttcagtaaagagaaaagaaaacaaattttttaaaaatccagagaatataccatgaaatgaagaccatgttttagttttttaaaaaagttcacagaacaaaaaagaactcttatacatgaaaaagtatggca

SEQ ID NO: 267462 - DNA, 836 bp, Homo Sapiens
taataagatttaaaaatatttagattaaagccccctttaatgagtacaagaaaaactcttggcttgttagaagaaagtatattctttctagaatttggtgcaggaatatgtgttcatatccaggcaaacgggtgtgtttttatcttcagacaatgaaaccttctcctctggggctttgttgccaggaagattagaactaaatttatttttttcatttctgtcatgaaatcattccagatacctcttttcttctttccaaatggttttcacatgtgtttgaaatatttgtacttcgaattgtcggattttccatgtcctcctttctcctttgtgcccagcctgagtcagcaccatcccgcattcagaacctcccagtgaaagggcagccttcattttgagaaggtggaaggtgttagggtttgggagacagctcatccaatctcccaagtctcatggtggatttgtgactgtgagagtttcccggtttaaaatctgaaaagccagatatgcctgtttccttttcccaggcaccatgcctgtggaggggacagtcagacccagaggtcctttacgtgtggatggagttcacaggcgaatagaggagaggaccaggggacgtggcttgtcccttttgtccaacaaagcattatatttttaagaatggcagacctgtttgctgaagtgttcataagataacaataggcttgaatctccaattcaaatgaatgtcaaagcacatatctttaatatgctgaatgaatatttatttttgtatccattaaaacagtatattgatctcttttattctttattaaaataaaatgctcttttttaaa

SEQ ID NO: 267463 - DNA, 418 bp, Homo Sapiens
  misc_feature (336)..(344): n is a, c, g, or t
cttagatatgctatcctacttagttctcatcatgatcctatgaagcaggtgatgatatctctattttcctactgggaaatcttttgtgccaaaagatgttgtttgtgggcaagagaaagagcattcaaatgcattctgtttaatcagagtaaggatttgttcctctacacagtactctgtcctaggaatttggaaccctaattccaacacttccaaccatgatgctggacaactgatttaatatccttggcactcatatgtagaaggaaagggttggaatgctgaaaagtcccttatagctctaaaagttagggattgagataatagattggggcnnnnnnnnncaaggtcaatctctgatttcaatgttaaaaatagtagagtgccatagagatcagtaatgatacctttacaattt

SEQ ID NO: 267464 - DNA, 672 bp, Homo Sapiens
  misc_feature (68)..(132): n is a, c, g, or t
  misc_feature (158)..(180): n is a, c, g, or t
  misc_feature (402)..(436): n is a, c, g, or t
gagatagggtctgtctctgtcacccaggctggagtgtagtgatatggcatgatctcagctcactgcannnnnnnnnnnnnnnnnnnnnnnnnnnnnnnnnnnnnnnnnnnnnnnnnnnnnnnnnnnnnnnnnatgtgtactaaccggctaatttctgnnnnnnnnnnnnnnnnnnnnnnnggtagagacagggcctcatcatgctgctcaggctaatcaccctaattttaataataaaactatctcctaggcttctttcacctctgtatttcttgtattaaggaaagaatacagtgccagaatgtagccaatggctaggcaactgggcgattctggggtaaaggtattcagggaattaattatcctcttattttaaggtttatgcaggtttgaaagtttttnnnnnnnnnnnnnnnnnnnnnnnnnnnnnnnnnnntatacactacattcatgagaagacactgtcattaagaagcttctggtaatcccaaacagatcctgtttttatacaggtactgatgacaacacaatgattacacaggttagtcacacagagtgacaatgagacaaaggccctgtggcaaagctgtgcttcaactcagtctgctgttttaagtagcaccctaaagacgtagccacccccaaatgtgtgtttctggtcagaaggaaagc

SEQ ID NO: 267465 - DNA, 603 bp, Homo Sapiens
  misc_feature (243)..(243): n is a, c, g, or t
  misc_feature (486)..(486): n is a, c, g, or t
ggccgcttaattaatagactaagattatctgtggtctatttattgaccacacccttataaacaggataggtttttcctattttgagactttacatgtctcagtactttctaaattgaaatcagagcattaaatcaagggaattgatgtggacaaaacagctgccagcatgatagtgtttgtgaattatgtacctctcttagacataaactcttagacataaactcataaaatctgttcagaancactgaacagatttaggatttaccatagccaataaaatttggatttagtgggttagtctcagcatttcatggaatcctgagatgcccaaatctctggaaacttcctatttcctgttttactatctttttccttttatcaaaatgggtgccatgagggtcccagaccaaaactcaccatcctgaaaaacaaaagtctggggagagaactcatgttttattttcagatgatatatttgcctaatncatagaataagttcagatcataattataaataggatttctctgaagcaatcaatctgtatttttaaagcttctccttcagacctccagtatctagtcatcgaagtaacttgggttta

SEQ ID NO: 267466 - DNA, 476 bp, Homo Sapiens
  misc_feature (56)..(233): n is a, c, g, or t
  misc_feature (236)..(271): n is a, c, g, or t
  misc_feature (324)..(363): n is a, c, g, or t
tggaaggccaaggcaggtagattgtctaagctcaggaatttgagaccaacgtggtnnnnnnnnnnnnnnnnnnnnnnnnnnnnnnnnnnnnnnnnnnnnnnnnnnnnnnnnnnnnnnnnnnnnnnnnnnnnnnnnnnnnnnnnnnnnnnnnnnnnnnnnnnnnnnnnnnnnnnnnnnnnnnnnnnnnnnnnnnnnnnnnnnnnnnnnnnnnnnnnnnnnnnnnnnnnnnnnnnccnnnnnnnnnnnnnnnnnnnnnnnnnnnnnnnnnnnnttagatcaatttgctgttatatttttatataaactatgtttatgacataagtnnnnnnnnnnnnnnnnnnnnnnnnnnnnnnnnnnnnnnnnttagattaatttgctgttatatttttatataagctatctttatgaatttgtttatttctcctttgagttttgttagtttttgttttatgcatttagaggttgtgttattaggc

SEQ ID NO: 267467 - DNA, 347 bp, Homo Sapiens
gtgtgagccaccacacccagtctcattagcatttttacttgcccctctcactagacctcctgcgtgttgagagtttgagatctagaaaggtgactgagtagcaaaataagtttgctggatgattatgacgatgatgatggcagtgaatttagctcttaaataacaatgatgaaatggtctgtaaaatgtctggaatgtgtgtgttcctgatttagttttctgcatgtactgtaaattaaaatggaaaatattaagattttcaaatgttaaaaatcaacttgataaaagctggaaaaaaatcatgggtccaatatctcctaaatgatacagtatttggtgattaatgg

SEQ ID NO: 267468 - DNA, 561 bp, Homo Sapiens
  misc_feature (11)..(11): n is a, c, g, or t
  misc_feature (450)..(450): n is a, c, g, or t
  misc_feature (459)..(459): n is a, c, g, or t
aggtctccagnaaacacttaattgataatgagtcaaaaggcattactcttggcatgtgaatattggatgtgactcaagggtgagtcaaatgcctgtggagcctggattcatgttcttttccccgtttgtcagtaatcctttctaatgttccagttccatgatgtgattttagtggaattaaacttgaaccacttagttatgatgttgttactgtgttgggaacgcagcagccaccagaccaccaagagcaactgtaggttgggcttggtggtgctggtttagtgttgtggctgatgaggtgtaacccagggaaatttttatttttgcttttaaaaaaacaactcatctgtggtcatcttgtaagtgaagtattgggactataaagggactcttggagcccgaaaaacatttttgtggacttagcccgaggctaacaggaataaacttgtncccatgttncagatagtttagggcatatctggagttggtggaggaaatgtgatctgttcctaggccccatgtgctaggcaggatgcctgggtatccagagagtgagtgaga

SEQ ID NO: 267469 - DNA, 911 bp, Homo Sapiens
  misc_feature (289)..(289): n is a, c, g, or t
  misc_feature (869)..(869): n is a, c, g, or t
aaattattcactccgtatactgaaacagaaataaacgaggaagaacttacaaagccaagactcttgtgggctctttattttaatatgagagattcctcgggaatcagcagaagctcgtataatggcttgccttccaatgtttatgtctgctctgggcctgactgtggcctgggaaatgagcatgctgtcaagcaagctgaaacacttttccaggagatctttccaactgaagaattctgccctccacctccaaatccagaagacattatctttgatggtgatgataagncagccagaggcccctgggaaccaataatgtagtaatggccaaactagaatcctctgagggaaagcaaaaacctaggaaagcccagagaagcaccttcaaaattagaaaagagcaatctcgaaatgctgttttggacctccttcatggcatcagaattttctcatttaaaggacagtttcccatatgagtaattagaagtggttatatatgatgaatgctatgcagatgttgtctttaactctcagacattcagcattgaatatctttgttaacctatcaatgagtgatttattgattattgaacattttgtttagaatgggctatatgacccagaatcttaaaacagagttagctttattttagtattgggtatatatgtaagggttccatattagcaactcagcttaaaggtaatgtatttgctaatgatcttcagattttatctttgtctacagaacaattagtaatacccaagtaatattttaattacttttgcagctggtacagttgctgcggcctgttcgaatagtgaaacatacacaaatggtaaattatgtggatcttttgcatataatatanatgtatagacatggtggtaggaatagcaactaatacaaatgc

SEQ ID NO: 267470 - DNA, 607 bp, Homo Sapiens
tcaataccctgctgtaaaatgtgtaattctctcagagaggcgcacaagaacccagcaacacaagggagagccttggttcactcctggcgtggcttaaccaaccaccttccaagtccctgtgtatcagcccagtttatttttctctttatctttaaactatcaaataccaccctaattgtatatttaacctatttccatctggatactatattaagcagttgtatgctcaccctatctttttcttcactggcaaatctgaaagaatttgaagataaacctatgtaagcacacttcaaagtacaaaataacaagtatgcttggttaaattcatactctagtcacacaggcacacagaaattctgtggacagaaacacataaggaccataaaaatcaagctttgtattaagtaggtgtaactcttaaatcgtatggttccaattcatgcttagggactgctatctcattacacagcagccaaccgttttgttatcactttctattttttcaatatgtttgcatcacagcacagccttagaatattttctagaacaaaattcatcatagaaaatttctaaaaaccttttgacaacttctcattaaaattgt

SEQ ID NO: 267471 - DNA, 1023 bp, Homo Sapiens
  misc_feature (11)..(11): n is a, c, g, or t
  misc_feature (52)..(89): n is a, c, g, or t
tcgaggccagnaattcggcacgagcggcacgagacgtttcaccattttggcnnnnnnnnnnnnnnnnnnnnnnnnnnnnnnnnnnnnnnatgagccactgtgcccagtcaggatgtctttaatgtaggaatcattcaagatccctcctcagtgcccatgtctcccccacctcagggtgctgtcaaccctcccttggtttccatgatcattgctgaactcagagctttcttctatccccagacccacatgggagtctcccaggcacctctgacttcagcttggccaatgcagaacttggcatctgaacccctgcctcttccctgaaccactcctcctcctgatttccctgctctctctgctcagaacactaccattcaccccatctcccagagacactctccctcctcctctttcaccttcatacaagcaggcccccgtcctatcagtacacccccctgtgatgcctctgaaatatgtaccctcctcccctctcctactgtcattcttatacctgtgatctctgcgtttctcttctacactgctgccagaggcctttttgccaaaagcactgctgattgtcactcttttactttcctggttcccctttgacttcacacacttgacgtttacattttgtcacagttggtcccccttgccttcacatacctgatgtttaaattttgtcacggttagtctccaaacttctcaactttgccagctttctccaatgaaaccatcagtagagacattgctgttcctgcccatcccagtgccagctactccttcctggaagccttcctggatttcacgcatcccatcctctggccagaaatggcctccgaactgtgcagctcctgcagcaccatttgtatcatagcatatctgttatgtgtcgttgctttctgtgtcttggtttctgcctgctgcccacttccctagactggagcctactggggcatggtattttattcatttctgacctccaattccctaagtggagattaaatgttagaaacctgaaaa

SEQ ID NO: 267472 - DNA, 573 bp, Homo Sapiens
  misc_feature (271)..(271): n is a, c, g, or t
  misc_feature (278)..(278): n is a, c, g, or t
tatgtaccctcctcccctctcctactgtcattcttatacctgtgatctctgcgtttctcttctacactgctgccagaggcctttttgccaaaagcactgctgattgtcactcttttactttcctggttcccctttgacttcacacacttgacgtttacattttgtcacagttggtcccccttgccttcacatacctgatgtttaaattttgtcacggttagtctccaaacttctcaactttgccagctttctccaattggggggttaaggnaaaaaanaccccatccaagtagagacattgctgttcctgcccatcccagtgccagctactccttcctggaagccttcctggatttcacgcatcccatcctctggccagaaatggcctccgaactgtgcagctcctgcagcaccatttgtatcatagcatatctgttatgtgtcgttgctttctgtgtcttggtttctgcctgctgcccacttccctagactggagcctactggggcatggtattttattcatttctgacctccaattccctaagtggagattaaatgttagaaacctgaaaa

SEQ ID NO: 267473 - DNA, 490 bp, Homo Sapiens
cctttggtctcttagacggtggagaataatcatcatcttgaaaaagaaaatggtcattactggaagaaccatcttacagttacagtcacctcctggtcaattcccaacattcaaaaggtgagcagggctttaaagctattttgagtatcaatagttatttctgtattgtgagctttagcaggctttttccttgttacatttgaaattttctttgtttgggatgtgttcaagtgaatactgctttttcctctgtctttcttcattattttttagtttgcttcatttgaattgtcattataaatttccccttctcaaataactttcaaattgccaagaactatattgttttaagactttcaagaaaaaacttttaataaagacagccacctaaagttataaaaggggatagagtacagcttagatggaaaagatatttaagcttatacaaaatttaagcatgcataagcaagggaaattgggtaaatagttc

SEQ ID NO: 267474 - DNA, 907 bp, Homo Sapiens
  misc_feature (881)..(881): n is a, c, g, or t
  misc_feature (891)..(891): n is a, c, g, or t
aacaagaaaccctttctgggctggtagaaatcctgtaatgttgcctttagactgattatccactgaaggaactcttgtctgaaatagaaagatcccacagaatgccatggtcctgaggaacattaaaataaatagaaaatgagttcaggcacttagctttacaaattgatcctggttctcctggcagaaaggtagatacaggtgacgccagctgagtggaaggttgctgcctgttctttcatctggcttcataagaaccaacatggaatttgtgggtgagctggtgagaagtttttgtctgcagcttgtattagggcccctgaactcccatgtctgcctctcttgaggcctgggtgtcctaaggctgggaagttgtggatatgggtcgtgtagagacttcaccatgcctccactgttactcaccccaattccttccgcttccctccagcctgtccccatcgatgataacttctgtggactggacatcaaccagcccctgggaggctcaactccagtggagggcctgaccctgtacaccaccagcagggaccgcatgacctctgtggcctcctacgtttacaacggctacagcgtggtttttgtggggacctaagagtggcaagcctgaaaaaggtaagagtcctatgagttcagatgctccaatgcccattcacctcctcagcaaagagtccctcttggaaggtagcctattggtggagatttaactataggcaactttattttcttggggaacaaaggtgaaatggggaggtaagaaaggggtaaattttgtgacttagcttctagctacttcctccagccatcagtcattgggtatgtaaggaatgcaagcgtatttcaatatttcccaaactttaagnaaaaactttnagaaggtacatctgca

SEQ ID NO: 267475 - DNA, 620 bp, Homo Sapiens
aaaaaaggttttggatcaagagcccctgagaatgtgaagagggggctctgtgtcaggctaacatggaacaccagagggaataaatcgccactgctcacattccctgagctggcctcactttatctctggctggtgagcttttgcttggattctataaaatacacgtctttacaataaattccattccatgctttaaaatgtaaaataaaaaattggtgttacaaaaagtttctgttaattctccaaatgcatttctttgttttcattgggtctttaaaagtatttagtctgtcatgctaattgaaatacttacttcatttccttcctatgacaattgttatattagatttcttttgatgtcattttttggcaaactataccttccctggaaaattatccatttaatccaagtttttaaattgtttgcatacagttgagcaaagaatattttatgactcttacctattcaatacttggtaattcttattttgtgtttgtcttctcttgtaatgttagctaaaatgttacatattttactacatattttaaaaattagctttgtttcctcatttttctaattaatttttcttgattcttttagcctgcctttaaaagattcc

SEQ ID NO: 267476 - DNA, 674 bp, Homo Sapiens
  misc_feature (402)..(592): n is a, c, g, or t
  misc_feature (632)..(632): n is a, c, g, or t
aaaggactaatatgcatttctaaaagttatgtattttccccttatgtgtagttttctctttttcaaaagttgcatgcagagtttactttctttatatcatgtattaatcttagtataactggtactatttacctctatagtcttcctaagcataaaataggcattgtagggtttatgttaattattttagaagcctgagatgctatttaatgtatgcaatgatctcgtttttggggtagatgagaataaaatttctgtaaattgaattattattcctcctttttattatgaaataggtgatgtgtttatttctaggaaccattttatttttggtcacaaaacaacactgccaaagaatcgcatttaagaatttagaaaattggccatatgcgggttagtgannnnnnnnnnnnnnnnnnnnnnnnnnnnnnnnnnnnnnnnnnnnnnnnnnnnnnnnnnnnnnnnnnnnnnnnnnnnnnnnnnnnnnnnnnnnnnnnnnnnnnnnnnnnnnnnnnnnnnnnnnnnnnnnnnnnnnnnnnnnnnnnnnnnnnnnnnnnnnnnnnnnnnnnnnnnnnnnnnnnnnnnnnnnnnncctaagcccgggaagtcaaggcttctgtgagccgtgattngccactgcactctaacctgggtgacagagcaagactttctcc

SEQ ID NO: 267477 - DNA, 727 bp, Homo Sapiens
atacatactctagagtacttttccatctttaaaacttgaatgtgtagctcagaatcttgttaaaatgcaaattctgattcagtaagtctggaatatgacccaagagcctgtattattaacaagtttctaggtgacactgatgttgctggcctacagatcttgatttgagaaagaaggcagtgaagaagggaaacctagttttagtcccaggttttccactgacgtgctctgtgacatagcccaacctgcccccctgaatgcgggttggaggaatagagcccttctgtaaggccctcttgtgactctaaatctagactctgtggagggcccatggatgcctacggtggagcacaactgctgtttgcccttctctcacatttcacctccaaaccgtgtgagagccagcgggcagatttcatatactcacacaagcactgatagcctctctctgtccttctttccacccttgttactctcgcacatgtgcatggacgacacgtaggagagtgttacagcattgtaacagcagattattgaaaacacctgcatctgtcataggagactggattaattgtggcacgtttatgcagcagttaactgtcagtggattaaagctacatgtatttacatgaataagtctcccaaacacagtaagttatagaagaatatttatagttggatatcatttgaatacaattaaaatgcaaaactttttaattaagcggcc

SEQ ID NO: 267478 - DNA, 451 bp, Homo Sapiens
ccagtgccttgtgtgaatcatatgaaaatcctgcccgctggcctcctcaacacggttggaggtgaaaatgtgagaaaaagggcaaaacagccagttgtgctcccaccgtaggcatccatggccctccacagagtctagatttagagtcacaagaggccttacagaaggcctctatcctccaacccgcactcaggaggcagcttggcctatgtcacagagcacgtcagtggaaaacctgggactaaaactaggtttcccttcttcactgccttctttctcaaatcaagatctgtaggccagcaacatcagtgtcacctagaaacttgttaataatacaggctcttgggtcatattccagacttactgaatcagaatttgcattttaacaagattctgagctacacattcaagttttaaagatggaaaagtactctagagtatgtatctggag

SEQ ID NO: 267479 - DNA, 735 bp, Homo Sapiens
aatcccaggtcaaataaagggagtggggtgggggtgaagtcagggctccagttctcccttaagccactgctgtaccacaatgagcaggacacaacctctcttccacagggactcagtctgcagaaaccccacaataacgaagtaagaacacagacaggaaaagcctgaaaaataaatacgaagtaactttcttctcctatcctctttgtatgcttaacgtagcagcctacacaggcattcattagatagaaagccaccatgtaattatgaaacagatgcatctttgatattttccaaacctgtggaaaagatttatctgccatgaaggcagctacctaaatagcagcttttaaagagacggttttcttcttactctgtggctcacatggttaagtaaggaaacaaaggctatgttcccctcctaagtgagtacaacagtaaaatggatttcaattcccatattcatgagaccccaatgagtacatatttcagagaaccgggtactgatgtagaacctggaactctgcagtcatgggggcccaggaagtgttagttagccagacagtatcccaggtccaacctgatgataccagatgtgagtctataagcaattcagtgtctctactgccggttcctcaagacccagcatcccttaggaagagcaggtgaatagtgtcacctgcagacctattattaccatgtcttttaccaaaagtacacactggagaacaagat

SEQ ID NO: 267480 - DNA, 903 bp, Homo Sapiens
  misc_feature (246)..(270): n is a, c, g, or t
gtttaaataattgtcccctttaaggggagattaatttaatataagctttttatagttccaagcctcagctgggtcttgatcttattacaacgacgaatattcactttttaaaaaagtattgttgcggttatttttaagctttatacagtttccacacttagattgtgatttctaaaacaaaacgaaatttgcagttggctgtgtctatagattggcctctttttccactcacttttctaaaagcannnnnnnnnnnnnnnnnnnnnnnnnagtgggggtggaaatgaggagaaggaacgaaggaacgtggtggcttgcttgactcttttttccctccctccgtttacttagatttgggtttgggagaccattttacttttaaatcattctaaccctttgcctaaatggactcagcgatgactctttagggcacccgcattgagaggggaccccaacagggttggcccatggggtcactatcagataaagagcagaggccaagacgggctgataacccaccaaaggcccattaaaacctggctgccccaatgcactaggggctcttaagagatttgtggcttccttttgggggggaaatcagggtctcttctgaactccctcctctgccagggaacccacactcaaatatattaaaagactaaatgattaataaataatcttcaggaattggagcaattcagagtctcaagccattacatgaaagtatttattttcttctaaaaaatgaaaaattatacatattgcttttatgagctgtcagaattctttctagcagaaaccataataaccatagagtttcctttttaaaatgacttttggcaattcacttaaaaacaattaatttgttttattgagtgataatctataggctactaaaaatcc

SEQ ID NO: 267481 - DNA, 784 bp, Homo Sapiens
  misc_feature (24)..(24): n is a, c, g, or t
acttccattacttatccaaagtcncaaactagttagtggcagagcctggagcaagaacccacatttcttattcttactctagtgttttttccagcatgcaatgctgttggagcaagggcgggggtaggtttttaaaaggtaaaaccatttcaacctaaacaaaattaacagctagcttccaacagtaacatagaaataaaacaaagattgacagatatgtaattttatggagttgttttttgaaatatacttttaaaaaagcacatttacctgtttatgctaaaactaatgagagtcaaacagaaggaaccaagatcaagaattcggcattgctagatagaaatggtttctacagcttcactcaggaagcaataatgtcaacttgcaaaagcacacacagattcatggtggataagtatgcttgtgatacaggcactgctatgaggaaaatagtggaccaggcatgttagttgtaaatttctttagtcaattacttttttctgtttctcaaactttaaaaagctgctcctgtactttttaaaagaacttgtaaattataatcagactaattaaattccatgaaaacaaaatcccatttgaaaatatgagacaattccattagacaatttccattaaacagaccaatcagtaaatacaacctctgtttttcatacccttgtgaattttgtaaatcttttaagaccagtttctgatttgattaacaatacaaaaaacaacattttgctcatttataattttacataatagttcatcatctcaaatc

SEQ ID NO: 267482 - DNA, 781 bp, Homo Sapiens
ctctgtaaagatttgaaatcttaaattaacagcatcatgccaattaggctgaaattctgttaaaatttttattttagaacttgaggataagcggtaaaaaaattatatttaaaaatagactttatggagatttgtttcaaagaaaaaatcttattcttacatactatattttgtaggcacatgcatctgtgtgctactgggagaacgtagggatcttgttactttaaaaaaattaatgtttgtaggtaaataataaatggattaaaatattatttttctttattggaaaaggtatattttagtgaaaatatacttgggatgtttatttcttcattttgattttatatttttcagttattagcactctatacttaatgtctataaccataccactattttactaggtaagaaattctacataaatgagcatgacttattttcctacacaaaggaatttattttctgaagcaaaagaatgactcattagaaaataattttcatattaatgtcttataactattaaaagaaataggctcatgaaacctaggtaaaccttggttgcatctgtggctattatatgtcatatttataagaacccacctgaaagaccaaccatttatacctgtggttaatcaaatggttgcttttaatacatttcaatcatgtcaaactcatttgtattttggtttgcatttgcctcttaatctctctaagcgtagacaaatcacttcttggcagctcataatcagataaattgacaatcagatgagatagtccaatt

SEQ ID NO: 267483 - DNA, 676 bp, Homo Sapiens
gactgtcactgtcatgggcctcctctcccatcaggagtggcactccatgaattcgagtacaaatgtccttcatgacacagtcacagattaaaactcccaatgaccttgcagtcttctggcagcctgtcgaatccacttgcctgccccaacctggaaagggaggctcagtgggacagaaagctgctcagccccactctaggagcccgagcacatgcagggttactctgggtcctgttcttccagggagtgtgggggtggaatgagaagcggcggacgggggcagagatgagaaaagcccgctgcctctctgcagagccacacatgtgggccggtgccaggatgcaccaaatggtgtattttgctctgcagtcaggccaggatcccaatcccagcttcaaaatgtctgggcacggttatgtgcctgtgccagctcagctcatctcgtctatgaaatcatctacttactagcactgcatgctgccatgaaaaaccaagtcaggtgagaatatggaactccgagcagagggtgacacatggcaagcaggagctcttttcttctgcccttaataagaagctgttgccctaatcatacttttatttatggaaatggaacttacattggtccattttgctaattattagcaattctgaaaagaaatgatagtggttaaaaaaa

SEQ ID NO: 267484 - DNA, 363 bp, Homo Sapiens
  misc_feature (212)..(230): n is a, c, g, or t
ttttggtcgttggtttgtttctacctccaagcatatggtcttcaaaaaaatactccactgtaacttgaattttcccaagaaactggcttgtgctttggcagcatcaccttcatacttgctctggtcactcaccaatcaatagagcaccaaacctacacagcaaacctacattcttgctttgtcaacaagaaaagtgcgtgcatatgtttgcnnnnnnnnnnnnnnnnnnngcttcctattatgatctataattgaagtgagaaatccccttccccttctcaatacttcaaaaaggcctggaaatttggcataaccttgtttgactgtgtgctttgaaagtaagtgatcaaaaaaagaaactct

SEQ ID NO: 267485 - DNA, 725 bp, Homo Sapiens
cagagagagtaaaaaaccttcagtagctcaggaaatagtatgcacatctccctatattgataagttaatactgaatgtaaaaaagaaatgtttgtatgcagtagtaaaactgtatctatcatcttttgtttcccagctttgtaattaaatgctggggagaaaacatgccaatgacgtgtgactagacattaagttcatcaaggtgctctgatggaaggaggcagctgtggaggtaaaaacatacccctggttcagttccttatttggtgcaggccatgcagtgtagatgtataaagagaaagctgatgcttggatattaactgccttgatgctacacacctagaatgtcttttacttacttccaggttcatccgtccctcttttccagggaacacgcctaaaaaaaagggcaactgtgcagagtacaatataaatccccaaataacccaggtttccaattttgtttccattccctagtatcatcatctgtttctttaccccagtgtgaaaaagctgattaatttaatgagaccacaataacaaactgtatttatcaggtcacatccaaatcattccattctagaaataaaatttcttttaaacgaactactttaaatgttttactgattaatgagactactgataaaactttgctttttttgtaatctaaaaatacactgcaacaaactaaaaagaacacggaggatgttggtattccatgtgtt

SEQ ID NO: 267486 - DNA, 373 bp, Homo Sapiens
  misc_feature (85)..(199): n is a, c, g, or t
cattctagcaagttgatgttattggtatctggtgttaaggcagtgccgaatggagggcaggaaacacatttttaaatatttatgnnnnnnnnnnnnnnnnnnnnnnnnnnnnnnnnnnnnnnnnnnnnnnnnnnnnnnnnnnnnnnnnnnnnnnnnnnnnnnnnnnnnnnnnnnnnnnnnnnnnnnnnnnnnnnnnnnngtgtgagccaccagattatatttatttctattcgctgtatttaattcttaaccccatgtttattttacataacttccctatttctcaaaaagaatttaaggcctattctcaaaataatgtaagtttatggtattaaatataaaatagtatagtcaatttaaaagcggcaaaaaa

SEQ ID NO: 267487 - DNA, 377 bp, Homo Sapiens
  misc_feature (46)..(47): n is a, c, g, or t
  misc_feature (49)..(49): n is a, c, g, or t
  misc_feature (84)..(198): n is a, c, g, or t
  misc_feature (364)..(364): n is a, c, g, or t
attctagcaagttgatgttattggtatctggtgttaaggcagtgcnnantggagggcaggaaacacatttttaaatatttatgnnnnnnnnnnnnnnnnnnnnnnnnnnnnnnnnnnnnnnnnnnnnnnnnnnnnnnnnnnnnnnnnnnnnnnnnnnnnnnnnnnnnnnnnnnnnnnnnnnnnnnnnnnnnnnnnnnngtgtgagccaccagattatatttatttctattcgctgtatttaattcttaaccccatgtttattttacataacttccctatttctcaaaaagaatttaagggcctattctcaaaataatgtaagtttatggggatttaaatatgaaaatagtattagttcaatttnaaaagcgggcaaa

SEQ ID NO: 267488 - DNA, 418 bp, Homo Sapiens
acgagccactgcgcctggcctgtatgttttaataaaaagcagcttatagcttctactgaagaactattttgatcattttgttttcagagataacaaagcatttttcaatctggcagtgcaaacattttagatgatattaaaaattctcttcttcctttataaacacagaaccaaatacaataaggaatgaacttcaagatgtttttaagtatgatataagtaagaggacaaagttgctacaacaataaagacaaactatacaaaatttttattatcatttcttttgttctcctaaagttttacccacacctacaaaaaaagtggtctgcatagtcaaaaaggtaatcacaaagtttccaggctaggttattttattaaaagggatttatctcaccttgggaaataaatcaaaactaat

SEQ ID NO: 267489 - DNA, 188 bp, Homo Sapiens
tatatatataaacattcttcagggagggtttccttcagaaaattcaatactcaaggaaaaggagttagggacagtttattttggttattttctttgtttgttttctccaaagctatttcttgaaaaaggaatcctttcaaagtaaataaaggaatcctttcaaagtaaaatagactacattacatttc

SEQ ID NO: 267490 - DNA, 834 bp, Homo Sapiens
  misc_feature (38)..(38): n is a, c, g, or t
  misc_feature (80)..(80): n is a, c, g, or t
  misc_feature (88)..(88): n is a, c, g, or t
ggaaatcagaagcagccctgcagcctgactacaaatcnctgcccaaagggaagcaggaaaaagcaggaagaaaaggaganctgccctnagaattacaaagagcattaagtacagcgtgtagttctctacaattattcaaggaatgcaggaaaagaaagaagactgagtgctgtgcctatgtgtgccatgagtacttcgccgctcactgaaggacaaccattcgtttctagaaaatgagattctgaaatccatggaggcaaaaatgtaccgagagatgcttgctaaatcaaggatatatgcttttctctgccagccataaggtatttttgaggtagagaagtgaaaggatattctgagacaaagaagagaggtactttttctgaagatgcctctgctcatctgccgacctctgctggatcaacagtggcatccagtggccaaaagtctcagcacagacttcctttgtctcccagaaagggtttcctattgctttgggtgcaagtggcaatttagaacaaaaccatttctggtgtctataactaaggttcccaaaagacacagtactttgtaataccaagtgaagaaccaaaggccataaagaagaaatggagaggggcaggttaagattggctgtggtatttatatttcctgtggtattactaaaaagaatgaaagtacaggaggggatgaacctatgtgtgggtggaattcctagattttcattgccttagaatactttttaaaagatagtctataagataaagtattttcattttaaaacaaaagcaattctgaaacaaaaacgtccatatgtacattttattttttaaaaga

SEQ ID NO: 267491 - DNA, 804 bp, Homo Sapiens
  misc_feature (194)..(437): n is a, c, g, or t
atttgcagagcttttgaatttgtaattttatgtcatagaccaatgcgaagtttttggcccttaaatatttttctctgttctaaatgcagagtcttagaagcaagacgtacttttcaattcatatctttctacattatatgaattatatttcacaataaacatatttatttctttagagatggagttccgctctnnnnnnnnnnnnnnnnnnnnnnnnnnnnnnnnnnnnnnnnnnnnnnnnnnnnnnnnnnnnnnnnnnnnnnnnnnnnnnnnnnnnnnnnnnnnnnnnnnnnnnnnnnnnnnnnnnnnnnnnnnnnnnnnnnnnnnnnnnnnnnnnnnnnnnnnnnnnnnnnnnnnnnnnnnnnnnnnnnnnnnnnnnnnnnnnnnnnnnnnnnnnnnnnnnnnnnnnnnnnnnnnnnnnnnnnnnnnnnnnnnnnatgagccaccgcgcccggcccaataaacatatttagaaagtaattgtaggtgctactactgtgccacagttgtaaaacctaacctgaatacaacaataatatgttacctatagtatttaatatcatgatttctgttttcattaattatcattaattatcaataatttcaataattataggtaacaaatattcaacacatcattcaataaaaattcattaaatgcagattcagaaatttttaaaaacaaatatacacaaaatagtgttccatttgtaatttctttccttctatggtgttgtctgaaccttttgtaatttcaaacattctattggaggagggcatatgggggactgaaagataagaaag

SEQ ID NO: 267492 - DNA, 560 bp, Homo Sapiens
cgagcatttatatatttcaggaaaataatgaagcttttctggaagacaaattcaagcactagattaaggctgcatgtgtagttttcctccaatatttgaggttttggggtgctattcatttcccttcctccgctcagagtttgaaccaattgagaatagatgctaggagccagatggggatgaagaaatcagcctttatcctagtaaacctggaaaggaaaatgctgcaggtctcctctctcacaccttggaattcaacttaaccacccagtaacaagcagagaaaccagggaaaggcagaggagagcacctcactccgcttagccccacacagatcccagagagagtctagcttaggatggagtgcagtggcctcacctactggtagtgtggcccaatagaagcctgccagttcccatcccaccaatcagatcagtcactcattccatggagtggagtaatcagaagtgttcaacacttggggaggcagaggcaggaagatcacttgaagtcaggagctcaagatccacctggacaacaaagggagaccctgtctctac

SEQ ID NO: 267493 - DNA, 551 bp, Homo Sapiens
  misc_feature (296)..(296): n is a, c, g, or t
tgaccagcattttctaatcttggtatttcttatacctttggtggtttccatccacattcctctacggcaaaatattccccattttataatgtccacttaaaattcgaatttctctctttatgcgtattctcatctttcagtggaaattaaattatttaatacatttatttctgatttaatgagccaccacatcttgatcttgttgtgagagaatcgttctctgctcaaattacttgtaaaatgttgggttagaaaaactttaatatacgttccttctgacaaacctcccagagccntttaatataacaatgtgaatgtctctgagaagagaatatgctttcccattgtgtaaaattatttaactttttcttgtcacctcttaacatctccaaggatctcttatcgcagaatactattagggagaaatagcattatttggcactataaaattgaattatattgctataatccacaaacttgtatttcttccttcacttgattgtttattcttgagggcagaaagtttatcttgtgtaaaagtgcttactttt

SEQ ID NO: 267494 - DNA, 503 bp, Homo Sapiens
  misc_feature (24)..(24): n is a, c, g, or t
ggcacgagctcctaacaccatggnattcaaagtgctcagggaatttgcctctccttgccccattcctggccagtttcacaatctagctcgacagcagcatgaggcccctgcctctttctgtcattgttcaaaggtgggaagagagcctggaaaagaaccaggcctggaaaagaaccagaaggaggctgggcagaaccagaacaacctgcacttctgccaaggccagggccagcaggacggcaggacttctagggaggggtgtggcctgcagcttcattcccagccagggcaactgcctgacgtttgcacgattttcagctttcatttcctctgattagaacaaagcgaaatgcaggttccaccaggggaggggagacacacaagccttttctgcagggcaggagtttcagaccctatcctgagaatggggtttgaaaggaaggtgagggctgtggcccctggacgggtacaataacacactgtactgatgtcacaactttgca

SEQ ID NO: 267495 - DNA, 748 bp, Homo Sapiens
  misc_feature (321)..(321): n is a, c, g, or t
  misc_feature (528)..(558): n is a, c, g, or t
ctctctctctgcagatgttatttttgctacatttgctattttaacctgtcagttaaaaaataattactatgtcagtatggctggcagctcatataggaaaaatatgctgtctcttaatcaaaggtgattacagttttcccctgtctataaatgtgcttgttgtgtaacgagaatgcattagtctcagcctgatgtacgaaatgaaaggcagtaagaagcagcaccattgttatcactccagggcgtgtctaatgaatcgtgtttccatgttctctcggtcacgccgtagagtgccctcagccagggcttaagcctcctgtnaaaatgctctttaagattattgtaggcaagaacagaaatgctgcatggctgggggtggggagagaatgccaacgagacagctgcatttcaaacagttacagctgcaaggattactcatagtaatagcagtgacagacaactgtttgagctttagtgtaaaaggcaatttggggacttgccctgtcagaattttagtagcaagcttcnnnnnnnnnnnnnnnnnnnnnnnnnnnnnnntttttattcaaattagtttgtgtctgaagagtggaaggaaatattttaaatttttacttctcaattgtgctaatgttgaaatcagtagttgactcatctttattaaaatcattgtcctagaggaagtttataaaatgtttatttgtagcaatgatgaatttaaatgtatatgttctaactgaatcacatg

SEQ ID NO: 267496 - DNA, 805 bp, Homo Sapiens
  misc_feature (128)..(205): n is a, c, g, or t
  misc_feature (640)..(640): n is a, c, g, or t
gataaactgaccaatggtacagaattctaagagcctagaaaaacacgtatatatctgtgaaactttgatttttgacagaactgcctggaaaaggaaaagctggaaaaattgtttatccatgggggggnnnnnnnnnnnnnnnnnnnnnnnnnnnnnnnnnnnnnnnnnnnnnnnnnnnnnnnnnnnnnnnnnnnnnnnnnnnnnnagcaaactctgagaatttgaaaaggaaatataagtgagtatctttctgagcttgaagtagggaagaatttacaaagatagaaaaaaggacaggcataaaagaaaagatcaataagtttggctacattaatattaaagcctttgtccatcagaagacactttaaagagaagaaagacaatctataaactggaagaagatatcctgtaagacattcaactgacaggattagcacctagaatatataaaaatagcccacaaactagtgaggaaacaactgcagaaaagtgggcacaaggcatgagaagcacggtcaccgcacagaagggaggtgtgtgaggccagtggacatatgcagagatgctcggccacagacaaaggcaaatcatgactatgatgagacatgattctatacctactgcgttggcaaaaattatnaaaaacattgataatacaactattgggaaggtgtggagcaacaggatccccagtggttgtacgaccattttggaaaacaagttagtgttctcacttaaagatgatcattctcacttcctatgaccctgcaatttcactcacgaataataagagatcaatacaata

SEQ ID NO: 267497 - DNA, 594 bp, Homo Sapiens
  misc_feature (46)..(46): n is a, c, g, or t
  misc_feature (225)..(225): n is a, c, g, or t
  misc_feature (283)..(283): n is a, c, g, or t
  misc_feature (354)..(354): n is a, c, g, or t
tctgttaatatgactggaatatctgccttgcacggaatgggcatgnacgtggctcactggcatcttgggagggatgaggcccgagtgtgctctgctctctgtccccaagtgaaactttaggcctttcctccatggcccccagccctcctgcactctcttctcatcttcaaaggctctgaagcaccaatgtccttgtgtcctcccttctagatgaggtgctccagnagggtagagcaggctgagcccagtgttaagcccaagcacacataaaaggacatcaccnctcccgtggcctcagccagctccctgggcacaatcttaggcccgtagaggagggccagggtgctgaggtanccgttgctgagccccagcagggagctgagcagtgccgggtacacatcggactggaagaccacagtcttcaggtggacacggggctggtagttacagagcacgaagagggggatgaggcaggtccggaggagcacgaaccctgggagcgccttgctattgggccctggcacctggatccaggcggtgagctgccggccacgtaggtcagcaaagttgtacaggaggaaggtagtgagggtt

SEQ ID NO: 267498 - DNA, 797 bp, Homo Sapiens
tgatcatgcctcactcctgcctcagcccttcccctcccgacctctgctcttcctggtccctcatcccagatcttcacaccaggcccccaccactacctcctgacctgagattatcttgcctattagttcacttgtgtatcatccttcttccccgctaggatgtcagccttcacatgggcagaaacatttgaatcaccagcttccactacacaggctggcacgcagcagtcatcaaatatgtatttctttgaatgaaggaatacaggaattaaagtcaaggtgcaatacttcctaccaaatccagcaccatctcaataatttccattttgtcttctgacagtggaccattgggattcctagtaaatggagtttgcaaatgacttgggaattcactcctttgggtctgcaagacgactagcaaaatttaacaggggaaaccaattttcagcttctggacactctgtgtgtgtacataatttgtagtatatatattttaagtagtctcgctacatactaaacacgctttcctcaaactgattggtagggcttcaaaagggtctttgccttacttaatcataacttgataaaagagaactaagatattaaccgctgctcatctctgcctacctgttgttctcaagcacacagcaggctctgctctacagggaactgctattagctggaataattcactctgccgtgtacggagggaaaggggagggcaggaaggctgggagggagggctcacacctgtcaaaacagcaaccccttataacttcccactgtagcttcagaga

SEQ ID NO: 267499 - DNA, 786 bp, Homo Sapiens
  misc_feature (357)..(357): n is a, c, g, or t
atgattaaagaaaaagtcaaaaaggactttggaaattatcaaatttaaacctgcattttacattattaaataaacttcatatgaggtcgttggtttagattgagcccctgcactaggttcaacagaccaaaccaaaatgcagtcactcctgctgaagttccatgtcaccaagccaaaagtaagttctctacctgaccttctgagaaatcaggagagtgagagataatagccaaatctccacacaagccagttttagctggcatgataaggaaatcccctctgttttaacctttacaaggaaaggagcttgggaaataaccaacttgctttttgtcttttgattctgcttttctcagncccttttctgtctacaaaaccaacctcctctgcttcagttccatctggaacacattccactttgtagaatgagatgtcgcccaattctagaatcacaaataaaagccaattaaggtctttaaatttattgtaattttgtctttgaacaacatatatgaagttttaattacctgcttagttataggtagcaaatttgaaacactcattcctttcccaaggacatgatgaagtgatcagattattttatacccctttgaacagctttctgaggcatgtttgtataggcttcttggttactttagaaacattctaagcagcagagcagtcttacaacctgagtattttctatcttcgcagattcacgtgtctggatttgttgacttagtgggttggcacagggtacatgcagaccccaggtcaaatgagtac

SEQ ID NO: 267500 - DNA, 462 bp, Homo Sapiens
agttagggtcaaagaactggactggctgaaggacgacctctgcacagatcccaaggtccccttcagttggtcacaagaggaaatttctgacctgtacgatcacaccaccatcctgtttgcagccgaagtgttttacgacgacgacttgactgatgctgtgtttaaaacgctctcccgactcgcccacagattgaaaaatgcctgcacagccatactgtcggtggagaagaggctcaacttcacactgagacacttggacgtcacatgtgaagcctacgatcacttccgctcctgcctgcacgcgctggagcagctcacagatggcaagctgcgcttcgtggtgaagcccgtggaggcctccttcccacagctcctggtttacgagcgcctccagcagctgcctctctgccacagtaaaacagaacagcccagagcaacaaagaaaggaggaagccgctcgtc

SEQ ID NO: 267501 - DNA, 598 bp, Homo Sapiens
  misc_feature (418)..(531): n is a, c, g, or t
  misc_feature (555)..(555): n is a, c, g, or t
tggatcaaggatttaaatctaagacctgaaactataaaaattctagaagataacatcagaaaaacccttctacatataagatataataaatccctcttcaaaggtttagcttgttaacttccttattctttgttctcaaactcaactttcttgttctccatgcctccttgcccctaattagtgtaaacaaccttcctatcagttctaatcaataactcacatctgttcccttggttgctaactctgcacccattccacccttcgaaaccacacgtcccaccactgtaactcacatcccccttcccttccttatttgggaaaatatccacaaatagccaatcaggtcaacttagaatgtgcagtctgacccgcctaccccccgcccatgggagattgacaccagatgtaggggccacannnnnnnnnnnnnnnnnnnnnnnnnnnnnnnnnnnnnnnnnnnnnnnnnnnnnnnnnnnnnnnnnnnnnnnnnnnnnnnnnnnnnnnnnnnnnnnnnnnnnnnnnnnnnnnnnnctggtttcactttgcgaaccgagnatttatctccaacatagacattgacttaggcaaggatttcatg

SEQ ID NO: 267502 - DNA, 983 bp, Homo Sapiens
  misc_feature (145)..(162): n is a, c, g, or t
  misc_feature (177)..(293): n is a, c, g, or t
aatctttgtgtcagcttctaataagtagctgccctaattattttgaattgttggaatgataaaactttctctgttacttgcagtgtagtctagattctgtgtctcatattacagactcacatggtcccagtatgcacgtccacannnnnnnnnnnnnnnnnnaagagacagggtctnnnnnnnnnnnnnnnnnnnnnnnnnnnnnnnnnnnnnnnnnnnnnnnnnnnnnnnnnnnnnnnnnnnnnnnnnnnnnnnnnnnnnnnnnnnnnnnnnnnnnnnnnnnnnnnnnnnnnatgagctaccacacccgaccccagatcaattttttaaactaaaacaagataataaatcatttaatttagctaaaacaggttatcagtttcttttattaagctcgtttggaacacatggattttggtgttatattatctcaatatggttatgaattgttcttaattccctgcgtgcaagatgatcatgtatgtttctgctgagtttgctgtcctatactgtgttaagccatcaagatacaggattatctaacttataaaatgggaagggttgttcctctcagaactttggatattcaatgagataatgactataagagcctttgatctgtagagcacattacaaatttggtaaatttttgaaaaatgtcattaacagattccctccagtctgtatgaagctgtaaaatgttttagaatctttttcccatttcacaactcctaaatattaggacaaattccagtatagtgaattttaaaggaacgtttaaattgtttttgaataaaagtaagaccttacttggaacttagggactgtttctttctttgtgttatttatgcatggtgagttattgaagggaagatagagctacaaagtgtctctctgctttcccttaagtatggttgtaatgaaatttgaactatattcaaattttcatggttaaaaacacttctagaacaattaggttgaga

SEQ ID NO: 267503 - DNA, 919 bp, Homo Sapiens
  misc_feature (213)..(235): n is a, c, g, or t
  misc_feature (469)..(477): n is a, c, g, or t
attgtgtgtgatcgatttgactttgtcctgatttggtgctctatttatatagaaataatcttcaaaagtatatagagatatatgtacagaaggtaagtaatatgtaggtaatgtaaaggtataatcttactatagattttatttctcatattctggaaatccttttgaaactctgtgctcaataagagtggtctgcagcttttaacgtgggannnnnnnnnnnnnnnnnnnnnnnggagacagggtcttgctctgtcacccatgctggaatacagtggcacaatcacagctcactctaaccttaaactcctgggctcaagcagtcctcctgccttagcctccaagtatctgggactgcaggtgcatactaccatgcccagcctgcttttaatactttttccccagcagaatcctttcttggaataaaattctacgtgcttccctagcaagccgactcagggaagggggnnnnnnnnncatgcatgccaagtgtgtaaaatataagaatagaactgctattattgaaaaagttgggtgcctagggccttactaacttgatagaccctgaggtatccatgtagactcccaaagcagagttttcaaacccatccttaaatacagatattagataattcaccttcctaactgtagaaacaggcagtattgctataatgggagcctttttattagacagtcttgcatagtcatctttgactgtatcttctttggacttatttatcatatggaacaatgtttcggtaactaaccaaaccggtagagacagaatatagtatatgtgctttcaatacttattaaaccatgaagtcttgtttttagctggacttcctgctaaattcctctatctagttgcaaatttagaccctcagtttattactgaatttaaaaactgaacttaaag

SEQ ID NO: 267504 - DNA, 1028 bp, Homo Sapiens
  misc_feature (331)..(342): n is a, c, g, or t
tggtctgaaatcaggaatgaactttcacagtctcaactctggccatttttccttttaacaaacaaatagaaaagaacttccaagaatgattttgaccagatagagtctgctccttttaacaagattgtgtgaagcacctactgtgtgccaggctgtgtgtgatggagagggagcaaatgcataagtccctgacatcaaaagatcttcaacctaaaacagagaataatgggggtactgaatttaattcataaaaagtagcaccccactttcttgtgatcccttggttagaatcaccaacttttatgagtttgtagaaaagcccagagtgctnnnnnnnnnnnngcaaacattccatttctgagcaatttgggagaaactaaatttggcccagtcaggagacacgttggggagtaccttaaaggataagtgtcaagtgtctgttgacatttctaaagaaatccatttgcattttcactgctaaggagaggccggcctccactggccacacattcagaaagctggcaggagccactggtcagcaacccccaatcaaacaggcttcctctttctggccaaagagctcagggtctgcgtgacttgaggcaagtcatccagggacatttgggattctgatctagtgagccagtgaagacggtacagataaggcccagacagaaatctggcagcctaagtaacatctggttggtctgaggtttggactctggctggggccgggagcccagggctggcgactggggagcctgcacttggagctggtgacagcaggaggcgcaggagcgcagaaaccaaccttcagtgggccctgaaagaaatcatggtgttaatgccaccccaaaccacagccaagcaaggcaaaggcgaccatgttgtcctcaagtcctgaaaagggcaaattgcacagatggagcaaagaaccatagatgggcaattctccagtaaagaaaagccaaggtaggtcgtcagagatctaggtaaaatccttcaatggtcaaggacttcagaacttt

SEQ ID NO: 267505 - DNA, 844 bp, Homo Sapiens
  misc_feature (662)..(662): n is a, c, g, or t
  misc_feature (665)..(665): n is a, c, g, or t
ctcatagcacttactatatggcttctggaaagcaggtttcatttttccctaagctcttaccctagtggctaatcaaaaaagcctgtttttgataaagctttggtgttttcttcatctgtgtctgaatttcattacagcagcataaagcatcatttaatgtatcatccctgatgaactgctgggagcttccctgatagtaagtgaaaggggtagagggccccagaagaggaaacagctaaggaaatagataatccttttggggatgcagcttctagatcatctgtcttccgtgcaggcttgtctttggattatttcactatgggacagcgttttcctccgaccaccctcatacagcaatcaccctgacctttctaaacagcaaattcaagcatgttctggtgaaaacttgtaatgcttcccattgtcctcaggataaaggctaaacttaaagtggctttcaagggccttgtttgtcacattagcccctaatcccttcctatgtgtggttctgcattgcagaaactggaggttgcttggagaaggaatgttctgggcagagggtctggtacaaatacgttcttctctctcctatttctgcttctgaaacatcttctagggatcttttgaagccagaagttcaagaccagcctgggcaagaaaangcngccgcctctacataaaataattaaaaaattatcctggcacagtagcatgtgcctgtagtcccagctactcaggaggctgaggatcacttgagcccaggagttcaaggctgcagtgagctaggatttgaccactgtgctcgctctagcctgggttacagagacaggtgtctaaaaaataa

SEQ ID NO: 267506 - DNA, 710 bp, Homo Sapiens
  misc_feature (214)..(267): n is a, c, g, or t
aaaatatattgcagcttaagtgatttagccagattctcctccccacatctctccaggacacaattgtggttatcagttaggacactcttcactttgttttgataattctgagtgtgcaaggatgcttagaagacagttcttcctcctcgctccataggcttcccaaggagcacacaccaggacatcaggatgagagtcaagccaggttccctgnnnnnnnnnnnnnnnnnnnnnnnnnnnnnnnnnnnnnnnnnnnnnnnnnnnnnnaatctccagccttggctcatcaccccagaatggactgggatagaggttagatggtagaattagatgtctaggaaatttcccaggattaattctaggcagaggtatcaaactggtgccacctgtgactctgcctgcctacaaatgaaatgtgtttggtcttcagaatgcttctgataaagttcagttaggagcccacatttaaatatggcaaggttttacatagaaacctgaattttcaatttggaaaatctggaagctgcagcaatcctgggccacatttccttatggtgacacttggttcagcccttttgaggcaaagcacgtcctctgcagttcactgcagccttgcaatcccaaatttatggacagtttcagggcagcagtacttctttcacacacagtgctaatatcaatgttttgaatgttcctattagatctcattt

SEQ ID NO: 267507 - DNA, 587 bp, Homo Sapiens
ctggtatcttggtcatctgattcagtgtggtggtgtatttgtaccttttcacactgctataaagaactgccggagactgggtaatttatgaagaaaagaggtttaactgactcacagttctgcaggcttaacaggaagcatgactgggaggtctcacggaaacttaccattatggcggaaggcgaagggtacaaggactttcttcacattgtgggcaggtgagagaggggtagtggtaaatattttttaaacaagcagatcttcgtgagaagtcactcttgaaacagcactagtgggatggtgctaaaccatcagaaactgcccccaggatccaatcatctcccacagggcccctccttcaacactttcggattacgatttcacatgagagttgggtggggacacaaagccaaaccctatcaggcagtaacactaacatttcaaatattaacctcaatatggttagaattgtatcatcatcaagtatcctaaaacatgggaaaatattctaaattctaaattttcaagaattaacttcaggaaatttatctattcctaactctggaaaagaccaaatctgtaaggca

SEQ ID NO: 267508 - DNA, 418 bp, Homo Sapiens
ggcacgaggagagctaccagagcttcaataccctgtcctgtaatgacaatgctggcgggaaggggcgaggagcagggcaaaatagtacccagttgagaaccactattaaacaaagatccttcctcctctttgtctgtatgtaaaagttacctcaacttaattcacacaatgacataaagccattttgaataaggttaagaaactcatcaggtttcttgcagctcagtaagacaattgtggggatgaaatcaactcttgttaagttcaaagaaagtcataaataatatctgaatagtttctataccaaaagctttccttttctatgtgttttattttaaagtactttattccaaggagacacctccagaaaatcagatgattaatatgatgttcacacacaatgcacatgtgaaaaaaa

SEQ ID NO: 267509 - DNA, 686 bp, Homo Sapiens
  misc_feature (571)..(583): n is a, c, g, or t
  misc_feature (648)..(648): n is a, c, g, or t
gattcaataccataccccctggcacccaccttcatcagaaagagtagaaagaatgaaccaaaccctaaaaagccatctaaccaaattagttttaaaaactcgattatcatggaccaagtgccttcctattgccttattaaaggtccgaactgtccctcagaaagaagttggcttatctccttgtgaaatgctgtataggctgccttactcacacttcactgttgacattcctacgtttgaaactaaaagtcagtttctcaagagctatgtacttggtctctcttccactttctcttccctccaaagctaaaggctttttagtacagatgccacccttggagttcccagcacatcagcatcagcctggggatgatgttctcatcagaagctggaaagaaggaaaactcaaaccagcttgggaaggaccctatctcgtgcttctaaccaccaagactgcagtccaaacaacaacaaaaaaatgcagacccatcataccccagtcaaaaaagcatcgccatcttcaaagtcatgcgctattgttccgagaccaattcctaccaagctaaagatnnnnnnnnnnnnngcttaaccctcttatagtgcctttttttctttcccctctctactgtcagacaattatcctttccntcacccaagtaacaaaaccaaagtggccgtcgtagagg

SEQ ID NO: 267510 - DNA, 789 bp, Homo Sapiens
tctgcgattgtctgaatgtttgtacctcctcaaaattcttattttgagtgatggaattatgaagtggggcctttgggaagtgattaggtcatgagaactctcacgaatgggattagtatataagaagcctgagggagctcattctccccttctactctgtgaagctacagttagaaggtacctctaacaatcagaaagaggtcttttaccagacaccaaatctgcttgctggtgccttgatctttaaactttccagcctcaagaatagtgagaaataaatttctggtgtttataagctaccccccagtctacagtattttgttacagcagcctgaatggactaagacaggatcatataggggcaactgtatctcatgactgactagtacgctctgagttgtttactggctatgaaattacagggtttaaacggagtatatttctgaataatacatagaaccacaaacttgtttgcaggttataatccttttttaaagacaagtagttttaaatttaaatatgtgtacatgctaaaaagactttcccaaaaaccttattttatatacactgatttaatcctaagaaacgactgggaaaaaacctaaagcagtattttcctacacaatttaatttctcaatatgcaggagagctcactcctagtatatcccttttctattttatcaatttttaagtgtaatctgcattaaaaattcaggtttttaaatcactctgtcttcatcttaatctaaggttttcatcccctgacccagattatttcaatctggtct

SEQ ID NO: 267511 - DNA, 379 bp, Homo Sapiens
ttgctgtggctagcagaaaaagaaacatgtccaagaacaaattgagacaacttaggaacaacttaggaaccaaaaaagtattcccaaatatgtatgaaattcttggaggaaaaccaaaagatatgtgcttactataaggctgccaaatacgacgtatcttgaaacaggctggaagtttcaactaaattagtctgccaacaaagcagctggccaaggaagcaggctctaattcaacctgaaaaatcttgcatgatagcaatgctgaggaagtgacatatcccttaataggaggaggaagtcccaaggacagccttccagatttcctttcccagttcaccttgggcttagggcattaggtggaggttcctttaaaagttcc

SEQ ID NO: 267512 - DNA, 780 bp, Homo Sapiens
gagaagacagaagaggaaaacagtcctaactattaaaaataccaattaactacttaataacacatctttcagtgtcttgcataataatttcttagatattttgcaaaattcggcatggttaagggattttgtaatggttaaataattttattagttgtttgaaattgactgtctttgttttcctatctgtgtgctgagatttatctcaattatatgtgtgaataatgttatgcatggggttacttttaatatggatttaactgagattctagactatattctttgtaaatatgaacattagaaacttgttcaattgtgggtcgtcattaattcaagtcaggaaggctcaccctttgtcctcacaccatctcttaagaagataagtcctgtggataagctggagaggtcagatgttggtgttgacttaaagcattgccacccgaggagggcagaatgctgtaaaacaaagcagaaggaactgtgtgggagagaaggtgaatgactgggggacttgaagttgaaagaaaagtcaggcgctgagcctgccaagggcaaaatgaggcttgtggggataaggaatggtttgtcagaagtcacctgttttgcttcagaagtcatctttccctaacaagggtctgtttggtattgttcctgtattacaatttataataactgtttttttacctgctgagggtaagatctttaaagtgacatcttaccagctattattcttagctcttgcttatgcaaatctcaatttgaaaaataaccttttaaagg

SEQ ID NO: 267513 - DNA, 387 bp, Homo Sapiens
  misc_feature (28)..(28): n is a, c, g, or t
  misc_feature (38)..(38): n is a, c, g, or t
  misc_feature (44)..(44): n is a, c, g, or t
gggtgtgagggacaaaggggtgagcccncccggacctngaattnaatggacgacccccacaattggaacaagtttcctaatggttccatatttacaaagaatatagtcctagaatcctcagttaaatcccatattaaaagtaacccccatgcataacattattcacacatataattgagataaatctcagcacacagataggaaaacaaagacagtcaatttcaaacaactaataaaattatttaaccattacaaaatcccttaaccatgccgaattttgcaaaatatctaagaaattattatgcaagacactgaaagatgtgttattaagtagttaattggtatttttaatagttaggactgttttcctcttctgtcttctcctct

SEQ ID NO: 267514 - DNA, 392 bp, Homo Sapiens
  misc_feature (116)..(116): n is a, c, g, or t
aaatagtatatgtggtaaccgaatctaggatcctggatacatcccagtctggctaattacatatttttttcctaactaaaatgttcccaggcaggttccatttgccatgtgaattnacttgctgagcccatgttgacttccctattcctaaaagcctcactctgccttgggaagcagtttactgcacttcaccctagacctagtctaatgttggagcagacaaagtgtagctacccatatatacttcaaaaatattttccagtctccccacaagaggaaagaaaaatgtctagcaattgcatgctaatttagaccaaagctttgttttaaccattcttggtgatcacaaatggggaaaaatgatttatgaacagtataactataaaacaaac

SEQ ID NO: 267515 - DNA, 392 bp, Homo Sapiens
  misc_feature (334)..(334): n is a, c, g, or t
  misc_feature (372)..(372): n is a, c, g, or t
  misc_feature (378)..(378): n is a, c, g, or t
accagctctaattccagaatgtgttcattaccccaaaaggaaacactgtacccattaagcagttactctgtattcccctcttccctaatccctagcaaacgccattctgctttctgtctctaatttgagccaacatcgaggaagagtactctgtacaattgaaattgcagaaaaaactttgggatgtgattgttaggaataaaaaaccacctaattctttgcatgcttctctaagtacagtaggacatgctgccaggggactctttatgggaaggaaaagttgaggacttcataggaagtttggcagttttgtttaggatccaccccagagggntttttggcttcaaactcttaggactcatttggtatttncttccntggggttattaggg

SEQ ID NO: 267516 - DNA, 641 bp, Homo Sapiens
  misc_feature (218)..(277): n is a, c, g, or t
ccttttatcttctgatttaatgtggcaaatatgagaagaaattgaaatgccaaccaaaatgccattgtagagtttataatcccatgttttttggccgtcccctgttacctctcctagataaacaggagttgaatgtcttgtgtcctgatttttatggtctcttagttactacaataacaagatcactcaatcccgtggagtctgtcctattacagaannnnnnnnnnnnnnnnnnnnnnnnnnnnnnnnnnnnnnnnnnnnnnnnnnnnnnnnnnnngtttaagatgcttccttttaaagttggagaataagaataaatgtattggacggctttgtttagtagcagcattgtcctttagatccactgaggaatcttaagaatgaaatcatcataaataggcaaataggtaatgtttcagtaaatacttgtggcgactatgtttcctttttaaccaagagcccagtaaaatttgtaattacttcaactgaatgagaacacaaggccatttcatgtcctcaatctttgttgatatgctttgcttattttaatggcttgcatgcattttttattgtgctgttgataatagttttacataattcataatgatacacaataaaagtttcattgcgttcaaaaaatt

SEQ ID NO: 267517 - DNA, 754 bp, Homo Sapiens
  misc_feature (415)..(415): n is a, c, g, or t
agctcatagccctcatccaggacatgactcagcagtgcaccgtgacccgcaaggtgaggctccagggaggggcctggacccccactggggtgggctggaagaggggctcggtgctggcagggtggcaggaggcactgctgtgtccagatagttcaggatggaggtgcagggcacagagcggggtgtgcagggtcaggtttgtaaagtggacatcctaagaagagcttctcccagtgctggcagggttcacggggacaggggtgtttaccatgggactcccccagacccccacacagctggtctatgatggccccgtccaatgtcacctgtagagtacttgagccaggaggagtatgaggcctggagccagagaggggacatcatccaggagggagaggtgtccgggggccgctgnctgggtgaacccgccatgctgtggagtccctcatggaaaaggtgaggtcaagggcggggtgggcaggggagctgtcctgggaagggtttcaggaatgcagaggagggggatgagataaaggtacagggaccgacctgagacctgggtgaccttgtcgccgacctctgggtcccaacagcccagcaggagcccaaaactcatctcagccagttaggatccacgtgactgtgggtgaggtctcccaactccttgaatctcagtttcctcagcttgggggatgtttaatagatatttgttcgagaatgaataaatccgagctaacaacactctccacgtttg

SEQ ID NO: 267518 - DNA, 404 bp, Homo Sapiens
gttgtcccggggggcccgctgcctgggtgaacccccgcccatgcctgtggaagtcccctccatggaaaaaggtgaaggtccaagggcggggtgggccaggggagctgtccctgggaagggtttccaggaatgcagaggagggggatgagataaaggtacagggaccgacctgagaccctgggtgaccttgtcgcccgacctctgggtcccaacagcccagcaggagcccaaaactcatctcagccagttaggatccacgtgactgtgggtgaggtctcccaactccttgaatctcagtttcctcagcttgggggatgtttaatagatatttgttcgagaatgaataaatccgagctaacaacactctccacgtttgaaaggccaaacgcgtgaaaagcagctcc

SEQ ID NO: 267519 - DNA, 717 bp, Homo Sapiens
  misc_feature (367)..(367): n is a, c, g, or t
tcttagaagcactgcagtcctgaattagcagaaagtccagaactggagggggtttctcatagaacttcctgaaggatgctaattatcaacctaaaacccaagagatggcactttctccttaatcccaaccccataaaaagcagcctgggagccattatgcagccattatctttcccaaaacacacagaagagaaggggagagaagaagaaagggaaaatgaatgaaatcagtggaggtgaagggaaagggccggacgggagttttgccatcctgagtctaaaaagctgaatgaaggaaagacacattatggttcaggcaaggggggttggtgtgcctgcaattcccacacccaggcctggatgcctnctcaggcaatgtactatggggtgcccacggctgggataatccatcccttccctttgagaaaggcaacaaccttcccgtttcccaggcaagactcacaacctcatactcactaggagtgtaactgagatttcccaacattgcatttctattctgcgggaaacactcagtgcctttgtgatcagttttcagatggcaaataggatatttttctctttcttaaattggcatggttttaggcccagcacagtcagataataaagacttgcttttagccaattttatttgacaagaaacttgagaatttccaaaagcgtaatatgggcattgattcacagtgtctttaaaaactg

SEQ ID NO: 267520 - DNA, 462 bp, Homo Sapiens
tagaaacaaagtgcaagatggtagatttaaaactcatcatgtcaataatcacattaaatacaaatggtctacaaaccacaattaaaaggcagagattatgatatctgattagaaaaacaaaacccaactacatactgcctataaggaactcatttcaaatacaaagacacaaatacagtaaagggatgccatgcctaacacctattccgaaacaaagctggagtggttacacctaatattggcccaaagtacatttccagagcaaatactattacgagggacaaagtgggttaacttcagaatggaaaaggggtcaattcatcaagacataattgtaaatgtttatgcaccaaagtaacaaagctgaacatcacttaattagaaagcaaaaacggaagggtatctggaaaatcctcacgtatctagtaactaaatgacagttctaaataacccataagataa

SEQ ID NO: 267521 - DNA, 698 bp, Homo Sapiens
aatatcacctttaaaaaaatcattacaagaacagatccctttcctatgctgagcatcaaaagctgatagaaaagtaggtatatgttactcataattcaaaatataaaacattttttttaactgaatacaaccaatattcctgtatggtgttatgaggtgaaggccagaaaattcttagtgatagattagaaggccctgttctctagaggttaagacacagcaataagggcagaccagatataaaggagagaagtcctaggactctaagggagttaaaggcatctgcgcatgggacagcagtgcagtcgcagcatttcagggcctgacaagtcactctgcagcctctgagcctgtgggtgtaacagggcagcagcccgtggcattagccctacagctggatacgggactatttttctatcctgggccacatgtgtggtgacagagctccacagttctaggaaatacaggaaaaaccttcagcagaatgaaagcctacaaacaaaggagaaggagggaggcaggaagttcttagggacacagcagagtggtcagaaagccgtgactgacagcgacactctcccctcggcagtgcttctgctgtgacatattttctactactaactatattggtttttctaaacactatggttttagtcaaatacacaacatcttaccaaatggatgaagattaaaaaata

SEQ ID NO: 267522 - DNA, 685 bp, Homo Sapiens
  misc_feature (244)..(476): n is a, c, g, or t
  misc_feature (499)..(508): n is a, c, g, or t
cttactcatttttcttctctgatttgaaaaagcaatagagttcagagcttgtcagtgtacagctgataatacaggccctaaagtctcagttctcaccttatttggaatggctatttagcattgtcttagaattaaaaacaaatattcagaatacaggctgttgatggactgtaatgactctcaagagtcaattatcaacagagcctttgaaagatggacttggaggtcaggcgcagtggctcannnnnnnnnnnnnnnnnnnnnnnnnnnnnnnnnnnnnnnnnnnnnnnnnnnnnnnnnnnnnnnnnnnnnnnnnnnnnnnnnnnnnnnnnnnnnnnnnnnnnnnnnnnnnnnnnnnnnnnnnnnnnnnnnnnnnnnnnnnnnnnnnnnnnnnnnnnnnnnnnnnnnnnnnnnnnnnnnnnnnnnnnnnnnnnnnnnnnnnnnnnnnnnnnnnnnnnnnnnnnnnnnnnnnnnnntgaccgactgagactctgtctcnnnnnnnnnngacgaacttggtgctgtaagtcctacttatgccctggacttgtctttactagtaccagcagtttggaccaaataaacttacatgctcaaatacacaaaaagacttttaaataccaggatttgcaacacacaggtattatagtacatatgccgtaaaaacgaatgattaaacgtgcct

SEQ ID NO: 267523 - DNA, 981 bp, Homo Sapiens
  misc_feature (84)..(84): n is a, c, g, or t
  misc_feature (916)..(916): n is a, c, g, or t
ctctattcaacgctgcctgctctcctggatagtaaccctttcacagctggtgcagagctgccggggcctggcgcggagctgggnggccatgcctccaggattgagacctaccctgggcgtgttccaggcagccttggagctgaccagccagtgcgagctgcaccctgacctcgtgtctcagacttttggctacttgttcttcttctccaacgcatcccttctcaactcgctgatggaacgaggtcaaggccggcctttctatcaatggtcccgagctgttcaaatccgaaccaacctgggacctcgtcttggactggctacagggagctgggctgggcgacattgccactgagttcttccggaaactctccatggctgtgaacctgctctgtgtgccccgcacttccctgctcaaggcttcatggagcagcctaagaaccgaccaccccaccttgacccccgcccagctgcaccatctgctcagccactatcagctgggccctggccgcgggccgccagccgcgtgggaccctccccctgcagagcgggaggctgtggacacaggggacatcttcgaaagcttctcctcgcacccgcccctcatcctccccctggggagctcgcgcctgcgcctcactggtccagtgacggacgatgccttgcaccgtgaactccgtaggctccgccgcctcctctgggatcttgagcagcaggagctgccagccaattattcgccatgggcctcccgtggccacgtctccttgagaaccaataccaaacgagcgcgcgaaccttgaaatgtcacgggcttctacggacaggagcccgcctgaacgcaaagctttctgggagttgtagttcttatcccgcgtggaatgttgggagattgagttttcgggaagtagcggatgggacnggtgggagcatgggcttaggatgtgaatgccagggagcaataaaggtatccgtggtatcggcaaa

SEQ ID NO: 267524 - DNA, 767 bp, Homo Sapiens
  misc_feature (188)..(196): n is a, c, g, or t
aaaagtatattctctccctttctctatagttttctctcattttgtcttcagacctagaagcatgagagcccagctgtcaaagtcatctagacccccttcagaaggtcattaaatttgtctatttcacaggattgcaagataaaatacagaatgcccagttaaatttgaacttcggataaacaacaaannnnnnnnnagtataagcatatcccatacaatatttgggatatacttatatttttatattgtttatctgacgttcaagctaactaggcatcctgtatttttcttagctaaatctgggcaactgtgctatttcattgaaaacctggaaagtgtacaaagaaggaagaagcagaatctgccatatgagtaatagaagtgagcaggcccaggactccctaagtcaagaaaccaagaggcgtcattacggaaaagagtaactcaccctgtgtgctccttggtagttctccctcagcgatgcccccatgttatgaatggggaaaagttcactgaagggttcatagtgaagaaactttttggatgatttctgttggtgggttttggataccttcaagggatcagaaaataatatacttaggaaattttggtaatgtcatcattactctctacattattattatgacggttacaattgttaaatctaggtggtgggtatgtgggttatattgtacatgatttttaacttgtctgcatgtttgaaattataataaagtcaataaataaattattgagacactcctaaa

SEQ ID NO: 267525 - DNA, 778 bp, Homo Sapiens
  misc_feature (87)..(117): n is a, c, g, or t
  misc_feature (686)..(686): n is a, c, g, or t
  misc_feature (756)..(756): n is a, c, g, or t
ccgaccccaccccctaccccccgcccaggtaaatccaagtaaatgattttctgaaggtcggtctcctagaaagcgtttaggctctgnnnnnnnnnnnnnnnnnnnnnnnnnnnnnnncccagttagggaaggaagaggagcctgtgcagagttgaactggggtggagaggtgccttgtaaagtatggtttccagagatggtgagacctcgtagctaagcgttgtttcctctgcacgtaactgtgagttgtgaacttgtggctcctgggggacgggacagggcctggcagtgcgggggagggggcaaggaattcaggaagttggcgagaattcttcgtttttcattcttcgttgtaaattgcttctaaacacttctgaattttaaattgctaccgagaaggtccagaaaccgttctcatccaatttagtcacttttattacgttccactttgcctcccccaatcactgcggcggctcccagtttcagcgtggccgcatttggaaaaggctgaaggtagaaaactctggaatggagaggctggcgactggagcaggatccaggggctttaaattttaacctgaatgcgatcgaatgcgcgactcccagaagagatagccaggcgtccgcccggccgctcaacccccgccaggactcggaatgccttgcttttggttcttttcgtgagntccgaccaaatgtttaagtggactgggttttgcagaagctcatttgtaagcactgacggaaatgggttgngggcatttgatttcctttgatt

SEQ ID NO: 267526 - DNA, 774 bp, Homo Sapiens
caaagaacacataattaaactacaccaaagcagagacaataaaaattagatccctaaggaaatcagcattagaatttctagatacaaatgtaaaataattagatataaaatgttcaaagatattttttaaaatggaattataatagcgagcaacaaaaggctatcaaaaataaccataaagatttgaaaaacaatgttaaacaacagctataaaagagttaatgaaagatgaatctgaagaaataacagaatttcacacagaggagcaaggggatggaacatatgagagcttgagatgttgaagacactgagaaagtcaaacatgcccattgcaatcccagtaggaaagaatggaggaattgcaataatctgaagagatggtaactgaaattgatttagaattggtggtcagcccatcatgacaggaaatttataatgtataacaaacagaataagctacaggtagaaaataccaaatacagagaggtaagcagggagaaaacacagtaccttcagaagaacagcaagtagcaggtctttgaatagcaacagttacagccagtatcaagtaactatcatcaaaaccttccttaaagaataagggcaaagtgaaaatattttcagatgaaccaaatctgagagaggttatttaccaatggaattttaaaagcatgtactttaggaataagcattatcctagaaggaaagcaagaaggaatagggaataaataaattggcaaatatgaatccaggggtaaatggtgccatataaag

SEQ ID NO: 267527 - DNA, 531 bp, Homo Sapiens
cttaaaaggaagaattgagctgtggcctagggtttttgtgcatggatcgatgtgagctgcttgtgggcaggactccacagtgtgtcatcactgagttgtttccagcctcttatgcatctcagcttctctctccagaggtctatgtcctctgagagggctcaaaatgccaggtgatcagcccttatatgcatttcctggatgacccatttttaaaattaaatttttctggggatttccctgcagggccactgcatgttgcagggggtcaactccccagacgctcccacgaggcccctggtcacccagggacgcctttcgctggaaagagcaaatgtcctttctctttggagctcagaaaactcagtttctcatttgcctatgaaaacaacagttcagttcctcagacaaatgcacacagacaaacacaattgagattaattatgggagaaaaagcaatagataagaccctttggaatgcatctccgaactagaattgggatccttgaacaacaatttcctaggagagaagag

SEQ ID NO: 267528 - DNA, 868 bp, Homo Sapiens
  misc_feature (55)..(55): n is a, c, g, or t
  misc_feature (543)..(543): n is a, c, g, or t
  misc_feature (549)..(549): n is a, c, g, or t
agatttgggggttctaaatgccgggttccactttaagggtgctaccatgatgagnccaactgttacttatttgcagtcctaaatgaattgccagctgggggaagtcaccaagcaggtttccttgagctctgggcttgccaaaaacacaactcagggaaaccaatcaagtacgtttttcttctcttctctttttaaaaggattgctaatccttaaggataaattataattttaatgaaagtcctttttttcaatactaagaaacaacaagtgttccagaaaggaaatctgtctcatcatgtgttactttctgttactttcaaattagcagtcactcaatgcaagaacttatcaagttcgatttctctcatttatgctagcttcctcatgaataacataattgcttttacaaaaaaatgtagttttcaaaagaaattaaaatataagatttaacaaagaaattatttctcaaaactttttttaaaaagtcctcatattcgattctcaaatacgtgtgcaaaacagagatttaaaaatgtttccanaagatnctcatcagcccctttcctaacattttctctctcctcttgccccgtatcctacacaatggactgtgtatggatgaaaattttctctgaaagaataaataagttttcttttgattaaagacaagtggaaactttatactcaaactcagaaaactagagcataatgaatcattcccagatcaattttaaaaatagatttattcaagaatgacatttctctcaagaaaaatgttaaattgtagacatatagctgccttcactgctatactgtgcaaacatcgaggatgacttttggtgtatctctgttgccgtgtttattgaa

SEQ ID NO: 267529 - DNA, 491 bp, Homo Sapiens
  misc_feature (160)..(172): n is a, c, g, or t
  misc_feature (191)..(432): n is a, c, g, or t
gaaaatgggaagaaaattcagtgttcaaataaagagattaaactaaacttaaaatttgggaacagaaataaaatttgagaataatataagtaactaagaagcactgaaataatttaaatattatagtgtaactatggttattaaaacaaaacaaattccnnnnnnnnnnnnngacacagtctcactctatnnnnnnnnnnnnnnnnnnnnnnnnnnnnnnnnnnnnnnnnnnnnnnnnnnnnnnnnnnnnnnnnnnnnnnnnnnnnnnnnnnnnnnnnnnnnnnnnnnnnnnnnnnnnnnnnnnnnnnnnnnnnnnnnnnnnnnnnnnnnnnnnnnnnnnnnnnnnnnnnnnnnnnnnnnnnnnnnnnnnnnnnnnnnnnnnnnnnnnnnnnnnnnnnnnnnnnnnnnnnnnnnnnnnnnnnnnnnnnnnnnatgagccaccgtgcctggcctaaaacaaattctaataattgttcctgtaaagaatgact

SEQ ID NO: 267530 - DNA, 683 bp, Homo Sapiens
ccgcttaattaaagatctttttagtatattaataggtaaaaaagaagaccacacttaaatatgtgttcatctatatctatattaaaaaagtcttaaagaaagtgacataggctatgtctgggtaactattctttggggaggagttgagtatattctgcctttggaggggaatgagtattcgtgatcaagaaagtggaatgtggttgttgtattgctatatacaaacgtattttgtatgtggaaaaagaatatttgtgatcaagagtatcaaaaatactacttttcacaaatatctactgcatatcctactcccaaggtttcccaagggaaagcttcctactccattgatgttgaccacacccatgtaacttgctttggccagtggactatgaacaaatagggcccatgtcccattccagcagctttaaatgcactgtataggttggctcagcgtccagttcttcccttccaccacaggaagggcttgtcactgagcaactgttatttcaaaatggatctcccaacgagaagacgcttagagcagagctctgccacagccgttctgtagccaccaaaaagtaattgaaaagggaaatgaatacctgtttcaacccattaagattttagggttctttgttactcagaaaagctgtttagtaaatacacaatgcaatattgtgctg

SEQ ID NO: 267531 - DNA, 755 bp, Homo Sapiens
ttgtgtgtgaggatttcaggagccagtgaggcgaggctgtcaaagatgcagtctgcccttgacattcactggcctcagccgtccctaaacacaccatgtgccctcattttcaatctcattgttattattagatatagtccctttggtactttctttaaactaccattttgttttcatttaagggagtggggaaagcctatttgcctaattcagggccaattatacacaggctctgatccattcattatgttttgttgtttgtggtctcacttgtccttcttcctctaagaagggctgatttcctgaattctgttaatagcagcaacaaatatcagccaagtgattcggatggaaggacgagggggaagcactcaataagatcctagataacttctgtgggtgtttgaccagttccttccgaaccccagaattaagagccaggcgaaaatgaattcagagcactatgccacaggccctgggacaacttttccccaagtgtgttctgtggagtgctactctgacaagaggatccttcatctcccatcactcctggccacatccaggattctgtatgaaatatctgttatttgcccaattttaaagcttcatcttgtacacttacaatactagtgggcatatcagaggctctgacaagctctgcaatagaaaaaaacctgcttaactctgaactcagtgtttgtctggaaaaccttttcaccacatattattgtaagtcaacatcccatagagctagt

SEQ ID NO: 267532 - DNA, 276 bp, Homo Sapiens
  misc_feature (113)..(123): n is a, c, g, or t
actcttgaatcagctcagtctgaaaatctgtcttttaattcatggggattttttagaatgatttcttggagggttttgtcttttgaatgtgtggtcccttctctgcctagaannnnnnnnnnngaatgagacatggtcttgctgttgtccaggttggagagcagtggtgcaactatagctcactacattcttgaatttctgggctcaagccatcttcccatctcagctttcagaatatcttggctacaggcatgtgacactatgcccagataattt

SEQ ID NO: 267533 - DNA, 338 bp, Homo Sapiens
acgagctagcacccaagtgctcgttacttagccctctttagtattctcctcattctcatgctccccttctggtcaaagcccaaaactcagatagcatagagagcagtgccccttaggacaatctgcacttccttaagaattcctttgaaggagtgaaataccaacatgaggcagtcctctcctcttctgatgttcccctctcctgtttaccttcctataagtaccgaacaaagtaagtaggtatatcagtcttaagggcttcccatgccataagatataacttaaagcagttatatcttatgaaggaaattatttcttgtgatggtcttttttaaaaa

SEQ ID NO: 267534 - DNA, 803 bp, Homo Sapiens
  misc_feature (70)..(70): n is a, c, g, or t
  misc_feature (119)..(149): n is a, c, g, or t
  misc_feature (171)..(422): n is a, c, g, or t
  misc_feature (444)..(460): n is a, c, g, or t
tcaaagaatgcatgtgaattatgtacatataactatagtatataaattatatctcaataaaacttattancaactgtacagttaagatttgtgcatttcaatatatgtaaacttcaccnnnnnnnnnnnnnnnnnnnnnnnnnnnnnnnaatgggctgggcacagtggctnnnnnnnnnnnnnnnnnnnnnnnnnnnnnnnnnnnnnnnnnnnnnnnnnnnnnnnnnnnnnnnnnnnnnnnnnnnnnnnnnnnnnnnnnnnnnnnnnnnnnnnnnnnnnnnnnnnnnnnnnnnnnnnnnnnnnnnnnnnnnnnnnnnnnnnnnnnnnnnnnnnnnnnnnnnnnnnnnnnnnnnnnnnnnnnnnnnnnnnnnnnnnnnnnnnnnnnnnnnnnnnnnnnnnnnnnnnnnnnnnnnnnnnnnnnnagaccttgtctctttttacagnnnnnnnnnnnnnnnnngaatggttacataaaagctcactattctattctgctcactttgtattatgtttgaaatattccttaagttttttctaccaaagtgtaaaaacaaagtaatttttttaaacaacaaaacgttcctaatatccattttttgttgttttttgacacagaagcagaatcttatattttaaaaagactagagaggtcactatctttcattattctattgcaatgttatatgaaaacagaaatatgacagaagacatggtatgtggtaaaaatgaatacttcatcttaaatgtacaaaaagaatctgaacttcctcagttctcaggcatttcctcatccttggattcct

SEQ ID NO: 267535 - DNA, 248 bp, Homo Sapiens
catttttatttttgaaaagaaaactgagcttcttgttacattcccccagcgaaaatgagaaagccacaaaagtctcacacataaaaagaaatatttacaatcaatggtgagaaccatcaaaaggttacgtgaaagtaactgatggcaaggaggtatttccaagatataatgtaaagtgaaaaacagcaggctaataaaacagtatgtttactatgatcctacttttaaaaagaaataaaaatcttaaa

SEQ ID NO: 267536 - DNA, 988 bp, Homo Sapiens
  misc_feature (284)..(284): n is a, c, g, or t
  misc_feature (737)..(782): n is a, c, g, or t
gtagagaccaggtctcgcttacattgcccacgctagtttcgaactcctgagttcaagcaatcctcctgcctcgggttcccaaatataggcttgagcactgcacccagcctaaagttaatttctatataacgaaacctacttttccactgatatttattataatataaaaaataagttcttttggaaaaagacatggaaacaaaataagtaacatgaaactttccttggaaatactcttaactagaagtaataacacacaaatgcaaatagacaagttttttttnaaactgacagtagaaaaatcaccccaaaatccaaagccattatatctttaatatgaccacagaaaaatagttattattttctatagtattcagatcttgttttccaaccttgaggaagctaccagtattaaaaaaaagcatagtgagctgagccataaaagaaagaagaaatatgggtatgtaaataattcaaaatgtcgtaataaatgaacaaggtaaagagaaataaacgaaatacatgtagaacaatccaaattaattatcttgcaagttgtattattctcagtgaacaaagagctaatgcttacctgaattcttagttatctagtcaagcaaattagcaagagaaaagcaacagacaacaaaaagagtatagtaaagctttggcactgtcaccagcagaattaaagcaatgctactgggtgtcacttacatgcctaaatgataatcagnnnnnnnnnnnnnnnnnnnnnnnnnnnnnnnnnnnnnnnnnnnnnntagaagagggttcaatttgtaactaagtacatgaaaaatgaaatgtaggtaaaagcagaacactcaacactatttaattgcctttgataaccattaaatagaccataagcttgactaagcctgtagcacaggaaaatctccatttttatcttctactctccctttccacagactaagtacttgtattggtgtgagaccattttatt

SEQ ID NO: 267537 - DNA, 412 bp, Homo Sapiens
  misc_feature (336)..(336): n is a, c, g, or t
  misc_feature (354)..(354): n is a, c, g, or t
tttaatgggagaatctgtaagttatgtctgaactttcaggttgtcttataattgtctttttccttatgtcagatgttctatgtcataagaataaaatggttcacaccaatacaagtacttagttgtggaaagggagagtagaagataaaaatggagattttcctgtgctacaggcttagtcaagcttatggtctatttaatggttatcaaaggcaattaaatagtgttgaatgttctgcttttacctacatttcatttttcatgtacttagttacaaattgaaccctcttctatttttttcctgctcctgtttctgtttcattttagttttccttnttccctggattatcattntagggcatgttaagtgacacccagtaagcattggctttaaattctggctgggtggaca

SEQ ID NO: 267538 - DNA, 351 bp, Homo Sapiens
  misc_feature (38)..(38): n is a, c, g, or t
  misc_feature (44)..(44): n is a, c, g, or t
atgactcaacatctgtaaacccctaacactttgggagncctganggggaaaggattccttgaggccgggagttccgaagactaacccctggacaacgtaaatgagatccccatctttatttttcatattagaaaaaaatctggcttgggcatggtggccaatgcctttaatccccagcactttggaaggctgaggtgggctcatcacttgagcccaggggttcaaaagtatccctgggcaacatggtgaaacctcatctctataaaaatacaaaaattagctagacgtggtggtgtgtgcctgtagtcccagctacttgggagcctgaggtgggaggatggcttgagccca

SEQ ID NO: 267539 - DNA, 610 bp, Homo Sapiens
aaaacactcaaaacactgccaggcacagagcaagagctcagtgactggaatagcatatgctctccgtcagagaaggcggcatcccctgaaagaatccttcgcatgtgcatgttcagagctgacacaattgctgttctcctgacctgacttttgggtctgtactaccgagctaatttgcttggcctcgtgtcgaacctgtgattagaacttccacttcagggtgtaggggtgttggtggaactagtgatgaaggaggctggaggcatgaaaaaagagagttgggatttctattctacttgctagtggttctgctgatgtaatgtaagaaatggaaagaagattatgtccacagccaagggccgccttcagagctggtgagcagatcccacgcggggttgaccatttatctgggctgagcttttggacaaggtgttctggacaccctccctgtgggctggcagctggggccagctcattttggcctcttcctggctctgtgctctgggaaactcttgctgtctttggcttttccttgctttttctctccattttggaaagattgtactgggaacccccattagaacatccaaatggaaaaatctttattctc

SEQ ID NO: 267540 - DNA, 447 bp, Homo Sapiens
attcggcacagccagcccaagatgattccagcagtggtcttgctcttactccttttggttgaacaagcagcggccctgggagagcctcagctctgctatatcctggatgccatcctgtttctgtatggaattgtcctcaccctcctctactgtcgactgaagatccaagtgcgaaaggcagctataaccagctatgagaaatcagatggtgtttacacgggcctgagcaccaggaaccaggagacttacgagactctgaagcatgagaaaccaccacagtagctttagaatagatgcggtcatattcttctttgggcttctggttcttcccagccctcatggttgggcatcacatatggcctggcatgccatttaacaccagctgggcccttacccctattaatggatcctgtgtccttaaatttattattacaccagtgggttcct

SEQ ID NO: 267541 - DNA, 574 bp, Homo Sapiens
cagcccaagatgattccagcagtggtcttgctcttactccttttggttgaacaagcagcggccctgggagagcctcagctctgctatatcctggatgccatcctgtttctgtatggaattgtcctcaccctcctctactgtcgactgaagatcccaagtgcgaaaggcagctataaccagctatgagaaatcagatggtgtttacacgggcctgagcaccaggaaccaggagacttacgagactctgaagcatgagaaaccaccacagtagctttagaatagatgcggtcatattcttctttggcttctggttcttccagccctcatggttggcatcacatatgcctgcatgccattaacaccagctggccctacccctataatgatcctgtgtcctaaattaatatacaccagtggttcctcctccctgttaaagactaatgctcagatgctgtttacggatatttatattctagtctcactctcttgtcccacccttcttctcttccccattcccaactccagctaaaatatgggaagggagaacccccaataaaactgccatggactggag

SEQ ID NO: 267542 - DNA, 659 bp, Homo Sapiens
  misc_feature (310)..(310): n is a, c, g, or t
  misc_feature (598)..(598): n is a, c, g, or t
taaaatttcaaaaaagcttcacaatataaaccttaattttaatgacatattggctagtcaataaacaagtcttatctcatctcatctcttttctgataacaaacacccgatgtgttcaatttgctttcatatttaagtctttcctgaattgctgtcatcattcaacaacagttgcatgtcgccttgctagctgtcaaagtagacttcatccccaaatggatatctgtaatgaaagaatacaaaggtgaaattttatttaaaaattttttaaaagaatttggttttggattaaaaggcatgcaagcagcanttaattccactcacagttacagtctatcacctggggcattcactacttttcagagtcagatcacagttcaaaaagacagctctcaccttgggggcatattccccaagtcagtgtgaacatgtcttgtcccaagaggacactttatacgcatggatgttcacaaatttattctaaactgcaggtgtctgtcaggattcatttgttaaacatgtcctctgtgttaaaaatcctaaaatccttttgcatttcttagaaaaaatcacgtttctgatgaaattctaaagatgnttgcaatattaaactagaatatattaacatgtataattttgagcaagaccctgtctctaga

SEQ ID NO: 267543 - DNA, 687 bp, Homo Sapiens
  misc_feature (193)..(193): n is a, c, g, or t
  misc_feature (645)..(645): n is a, c, g, or t
actgggaacacttctcagcagggtgccgctgacatttcagactgggtgcgtttctgctggagggctgtctgcacattgcagaagctgagaggcattcctggcctccacccactagatgccagtagcagcccccctccagttgtgacaatcgaatatatcttctgacgttgccatgtgtcccgtaggggacaanaattgccaggtcgagagcactgctttaaagaagcagctgacacgtactctgacttactctgtgccttgcaccattggcaactctcaggtaagtgaatcattcagtcttcgccacacacgtccctacagggctttacaaatgggcatgccatggtgcacagaggtgacataactcacctgtcatggccccagctagtccacatcggagcaggatggaacccagattgttcaaggtctcaaccgctctgccctgttgctctccagtatacaagtacctgggtaaaaagtcactctgagccagcgagggggacggggggcagaggcctgccgcagctcctgctagagtcccacacaaggtagcacctcaggtcctctagcgacatcaaaaaagggagtgccagagggaatttccacacgctccactctcagtaattaaactgcaacaacctcccnagactctcaggcctcaggagcaaccgccttaattaagcggcc

SEQ ID NO: 267544 - DNA, 692 bp, Homo Sapiens
ttattttgaaataactttattcgcagcctaacactttgcactgcattcagcatgacttagaatttacttttggtgttgtccagctgctgccaaaaattgggtagaatcagattggtattctttgttggtgcctggaatcgtagccagtggtacaaaggtgatgttgttccttgctgagacttcgtggaagaaggcaaaactttgatcatctgcccttgcacttgggcagtgttgaaggtgattggagtacaagtgccaatttgcaggaacaattgtaaacacctttggatacaaatggccatcatcccatttttactgattaggaaaaactttgctattaataggtgcaaagtccatctcaggtataattggtaaggaactgagtgcactcatgggaagaaaccttgttttgttttttgttcgcttttcttcttatccccttttctcagttttatggctggagacatgatttattgcagccatccatcttgggggctcatccatcacacccgggttgctaggagattgtggcagcagctgtttgctctgaatcagacagaaaagttgtcaatcatcaaaggcaggtgaatagcattagaaacacgctattgtcagacggaataattaatcaaagagagaaaagataattaaaaagatatgacccttgcaagtacttgctctgggttgcctgt

SEQ ID NO: 267545 - DNA, 731 bp, Homo Sapiens
ttgcaccctaaattatagtaattataataattgtgaagctgtttctaaagctgcttgttcctggttctgagaaccacgggagcctcacactggggagccgtactccaggtcagggctttggggatgcacagcagcgtacgggcagcacgcctgtaaggaggtgagtgggtgggtgtctcagaaaatggtcagcacacccccaagaaagggccccaagagcagactaggaacgcagggggctgctgctgccaggacaccacggagagccgggcacccgcctcacatgtctcctgtctggctccactgagttagccgtttgagcccactcctatcttttggtggttagtgcatcttcagctcttttctgcaagacactggaacattcctaggctgtcccaaaaggagtttccaccatagcctttaaggtccgagcagggcaccaaggggttcacttttctcccgagccattcagcttggggtgcctgcgggaggggcggacagccagccggcttcccggcggcggtacgagagcccaacaggagaggattagctgtgccaaggaacacgccactgctgcctgtctactgcccgccttctctccacttccatttttgcctttgtttttaacttgtgctcttgtgagttcttggtgtgtttctttgtgagtttttatttaattgtgtaactttgtttttgccgtttactgtgaaaccaagttgtcgtgcttttaa

SEQ ID NO: 267546 - DNA, 764 bp, Homo Sapiens
  misc_feature (351)..(351): n is a, c, g, or t
tgagccacaggacctggcccatggtttcttatacagtcaatgtacaaatgctcatttatattttgcacaataatgaaaataaaaataacaattatagcaacatacaaatatgtacaaagattcccagacagactttgttttttggcttataacaatgtgtagatactacacaaagaatgaggatgtaattttcatttacaagcaaaatgtgaccaaaatcccttttcttcttaaaattgaaaaatgaaattcttgagaatactaattagtgacggccaaatcttagactattttaaattagccatggttaaacataggtgagttaaacattgtgccctttccaaaattaanggtttgcagttaggaaacataaacatttgaataaaacttcctcaaaattaattatgagtggcttattcatgtcctttggattccagacacacactagaaaaagtaaacgttaaagaggtgatattttggaaagcatccctagtactgaaaagcatccctagcactgaaaaaagcatccctagtactgaaaagcatccctaacactgaaaaaagcatccctagtactgaaaaacatcttcaggagtactcagtactccctagtacatccctagtactgaaaaaagcatccctaatactgaaaagcatccctagtactaaaaaacatcttcaggagtacccagtggtcaaacactagcaggaaactcatgatgcactaacaatactgagaacaaagtgtgggaagtaataagcag

SEQ ID NO: 267547 - DNA, 721 bp, Homo Sapiens
  misc_feature (44)..(74): n is a, c, g, or t
  misc_feature (85)..(180): n is a, c, g, or t
aatggtgtaatgtttttgttttattagagacagggtctccctcnnnnnnnnnnnnnnnnnnnnnnnnnnnnnnnaactcattgcnnnnnnnnnnnnnnnnnnnnnnnnnnnnnnnnnnnnnnnnnnnnnnnnnnnnnnnnnnnnnnnnnnnnnnnnnnnnnnnnnnnnnnnnnnnnnnnnataagataccttatctgttcttgctgtttagctcaaagaaatatactgttcgagatctgcaatcaggcttcatgtacggatgcagggaaaaaggagtggctaggcactgtattattaaataagaaggaggttttattgggtaataaacaccctataacggctttcataaaacccagttaagattggagctttagaattaccaatatccaaaacaatacttaaaattacagtatccctggggggaggggaggcggttggggtgggggaacctaccacagactgtctgcttatttatcccacctgcaatgtgattgcttgcaaacaggtaactcgtgattctgaataattatcctgcatccaacccagtggtgttgtgactgctgacattcctcacgagaaagcaagtccttgctttgaaaggtgtcagttatgtggaaaggaccaaaacccacctcagtgtccccagtgttaattctcctttgtatattaccctagggaactttctgaccactgccccctcaacccaggactttgtgcgtgc

SEQ ID NO: 267548 - DNA, 823 bp, Homo Sapiens
  misc_feature (454)..(454): n is a, c, g, or t
  misc_feature (737)..(767): n is a, c, g, or t
tgctggctgaccaaatgaatgaaacccctataaccaggaaatacaattgttatggactgaattgtgccccttaaaactcgtatcttgaagccctaaccccagtgtaattgtatttggatacagggccttgaaggaggcaattatggttaaatgaagtcataaagtgggaacctaatccaatagaattggtgtccttataagaggaagagacaccaggaatgtgcatgcatagcgcaaaagccatgtgagaccagaagaaggcagctgtcggcaaaccaggaaaagattctcaccagaaaccaaacctgccagcatctttatgtcggatttccagcctccaagaactgtaaaatattctgctgtttaagccacgtagtcagtggtattctgttatggcaggccaaggtgaataatataatgaccaaaatctatgtgtcccggttcctatgaatgnatggaatgctaagcagaacctacaccactgctagaacaaagatacctacaagagacattccccctgcttccggaaaactgaaccccacatttaacagaaagaatggcagaaaacattattctcacaccgtgacatatacatttaaagaaaaaaaatggatcttcaagaacacaaacaccaaaattattagtatcaatcaccatctgtagcaattcaatcagatggacaaggtagtagagttacataaagaatgtaaagagtaaaagtgagtttgttgaaggtnnnnnnnnnnnnnnnnnnnnnnnnnnnnnnnggctgggcacggtagctcacacctgtaatcccagcaccttgggagccaaggcaggt

SEQ ID NO: 267549 - DNA, 463 bp, Homo Sapiens
aatttattactttacaataattattatagccaaagccaccatatattctgcatttcccaggatggtgtcagttttgaatgttgtttctttcaggcaggcatggtgaattttggttcagaaaacaggatcactctgtcacgctcttgagggtgaactgttggagagtcactgtggtgatcaaccaatgggtactccctagttcctggaactgagaacttcagtctggatacttctctataaatggtttcggtagactctgccactttccccggggatctgaaagagttctccaagaagcccccacttctcaggcggcaacagggcaggtacctggcggtagcccttatgctactgttcataaatcaatctgagttttatgggtgctttttctgaggaaggagagatttaaagttatgtagcggcaacaaagctttctaataatatttttggcaggctgctaaag

SEQ ID NO: 267550 - DNA, 768 bp, Homo Sapiens
ctagttcatgctggtgctgccttcgtccatgcttgtgagtggaatccccatgctgtagttgctctgagaaataaccttgagatcaatggagtagcagatcggtgccaaatacactttggagataacagaaaactgaagctctcaaatattgcagatagggtgatcctggggctgattcccagctctgaagaaggctggcccattgcctgccaagtgttaaggcaggatgctggaggcattttgcatatccaccaaaatgtggaatctttcccagggaagaatcttcaggctcttggagtcagcaaagtagagaaagagcattggctgtatcctcagcaaattaccaccaaccaatggaaaaatggagctaccagggattctaggggaaaaattgctgtcaccagccaccaagccacagttggcaaaggtgggcagaatctgcagaaactcgaatcgccactcttcttcagcaggtgcatgggaaaccatggaagacacaaattctgcacatccaaccagtgaaatcctatgctccccatgtggatcacatagtcctggatctggaatgctgcccctgtccttcagttggctagaggaggtagatcctgggacacatgggatccacgtgcgagtggcccttaaatgtatcagttcagtccaggttgtcatcccttttgtcccctggtgatcagtttttttcatattttatagccctgaaagcaggctctagatcaattcaaattatttcatttggtctttcattgataa

SEQ ID NO: 267551 - DNA, 833 bp, Homo Sapiens
ttgggatcgagcttcctgcagtctgtcctgagctgtgtccggtccctccgagctagaattgtccagagcttcttgcagcctcacccccaacacaggtggaaggtgtccccttgggacgtcaatgcttactattcggtatctgaccatgtggtagtctttccagctggactcctccaacccccattcttccaccctggctatcccagagccgtgaactttggcgctgctggcagaatcatggcccacgagctgttgcacatcttctaccagctcttactgcctgggggctgcctcgcctgtgacaaccatgccctccaggaagctcacctgtgcctgaagcgccattatgctgcctttccattacctagcagaacctccttcaatgactccctcacattcttagagaatgctgcagacgttggggggctagccatcgcgctgcaggcatacagcaagaggctgttacggcaccatggggagactgtcctgcccagcctgggacctcagcccccagcagatcttctttcgaagctatgcccaggtgatgtgtaggaagcccagcccccaggactctcacgacactcacagccctccacacctccgagtccacgggcccctcagcagcaccccagcctttgccaggtatttccgctgtgcacgtggtgctctcttgaacccctccagccgctgccagctctggtaacttggttaccaaagatgccacagcacagaaatatcgaccaacacctccctggtcacatccatggaatcagagcaagatttcctttctgcttctgttccaaaaataaaagctggcacttggccgcttgtca

SEQ ID NO: 267552 - DNA, 558 bp, Homo Sapiens
  misc_feature (21)..(21): n is a, c, g, or t
  misc_feature (155)..(155): n is a, c, g, or t
  misc_feature (185)..(185): n is a, c, g, or t
  misc_feature (426)..(426): n is a, c, g, or t
  misc_feature (522)..(522): n is a, c, g, or t
agagacaagcggaagcacagntgccagcttttatttttggaacagaagcagaaaggaaatcttgctctgattccatggatgtgaccagggaggtgttggtcgatatttctgtgctgtggcatctttggtaaccaagttaccagagctggcagcgnctggaggggttcaagagagcaccacgtcancagcggaaatacctgggcaaaggctggggtgctgctgaggggcccgtggactcggaggtgtggagggctgtgagtgtcgtgagagtcctggggggctgggcttcctacacatcacctgagcaggaagagaggtcattgaagggggagggtccacaggacaaaagctgacccggtgaacaaggggtgattcagggacagcagacaaagagggggaaccaggggatcaaagtccccaagggcnacatggagcatttgaaatgtatagttcatttaatctggcaataggagtccaggaggagggcctgggctgtgtaatgataccatttatcaatgacanagaggcagggtctagcgcaggagctctggggtgaag

SEQ ID NO: 267553 - DNA, 195 bp, Homo Sapiens
gccaaacaaggctctgggctctgcctctggctctctcaaacctgggccttccctcttagcactagcctcctcctaagggggcagcccccaaagcctttcccaccaggcctgttctccatagagagttcctaaagggttactggctcatgttgtaagaaattatgaaacataactttcttgttttttcttttcatt

SEQ ID NO: 267554 - DNA, 296 bp, Homo Sapiens
  misc_feature (1)..(1): n is a, c, g, or t
nataagccactgcacctggtctaaactaaggcttctaaagcaaacatggaacttctagaaatcatctactccaatctcacctccagatttaactgtccaaggatcaagctaacatttatactaacatttacagagcactttctaagtattaggcttttaaaatatcttattaacccttcatatcaaccctaggagatggacattatttccacatttacagttgggaaatttaaggctaagaaagatgaaatgacttatccaggaacaacatgaggaatgaagttactgtgccgaat

SEQ ID NO: 267555 - DNA, 797 bp, Homo Sapiens
ggtatgagccaccaggcccggcccaaagaagactcttgacagttctgctttctgcctggaagctgtatttaattcataaatctgaactcacattacctttgaatttgatttttcctctctattctttcaaggacattgagatatgctacaattctctatggagttctaaatcagaattttgggtgatcacaaaaaggaaaaaggaccacagttactacgttacaaagttcagaatctggaagcagcttatttttcgtcttcgaaatatgagacaagatctatttatctatataaacagactttgtactgatttaataaagattctattgacatatatgtaaagtgaatataaaactattctgtataatacataattgggtaccaaataacaagtaggaaccataaaataatacccattgtattaataagacataaaagttgaatagctcatttcaaataactatcatttctcaaaataaatttagtgaaaaacacatactacatttatctaatacataatgctacaaaataaggcatagtaattttaaatttttttgtaataaaaatcatactaaaatcagatgagaaatggaaaacaatacctcccacttttccccaaagattatgcagatcaaaatagatttattgctattaaattaaggagctatcaatttgcactggaaaaaaaacatggcagtgtcttatataagtacataacaatgttcttccattattgccacagcaaagacaggaagctcatcgctttctcacttgtactactcccactcaaaacctct

SEQ ID NO: 267556 - DNA, 818 bp, Homo Sapiens
  misc_feature (165)..(211): n is a, c, g, or t
  misc_feature (213)..(451): n is a, c, g, or t
  misc_feature (752)..(752): n is a, c, g, or t
tcttattcctatgtaaaacagacattaacataattatttaatctattagacctacaagaatcttcaaaattatgattcaactcttcatttgactgaaaaactgacacaggttcttagaagtgaagtgaaattttctcaaatcacatgcttgatgacaggggtggnnnnnnnnnnnnnnnnnnnnnnnnnnnnnnnnnnnnnnnnnnnnnnngnnnnnnnnnnnnnnnnnnnnnnnnnnnnnnnnnnnnnnnnnnnnnnnnnnnnnnnnnnnnnnnnnnnnnnnnnnnnnnnnnnnnnnnnnnnnnnnnnnnnnnnnnnnnnnnnnnnnnnnnnnnnnnnnnnnnnnnnnnnnnnnnnnnnnnnnnnnnnnnnnnnnnnnnnnnnnnnnnnnnnnnnnnnnnnnnnnnnnnnnnnnnnnnnnnnnnnnnnnnnnnnnnnnnnnnnnnnnnnnatgagccactgtacctggccaacagggctggtattttaagccagccttctaactttaaattcagtaattttttgttgttgttgttagctgctaaatgatgtgaaaataaaatattttaaaatcctcttcagttgcataaactttttgccacttagtttctctatagcaaagtatcatctatttgttcagtaagttattgtacataaattggcttctggtggtttaaaggattttattacaactacctttttctttggtttgaatttgtagttttaattatgaaatgtgtcaaacatacagnaaaatgtagagtcatattaaagatttatgtgtacccatcacagagaataaataagtgttaacattt

SEQ ID NO: 267557 - DNA, 969 bp, Homo Sapiens
  misc_feature (59)..(89): n is a, c, g, or t
  misc_feature (438)..(446): n is a, c, g, or t
gaggaaaaagataactgtgtttagcacagtggccagcaaaagaagtcacaataaataannnnnnnnnnnnnnnnnnnnnnnnnnnnnnncctcgtccatacaacacaaggactggacaagacacgtgggctctccacaaatgggttctgcagcactttcgtggaagccagaatctgtttctgagggatgaaggtgcaaatttcctaaagtctagagctgtctaaaaaaactcaggggacagataatggcaaaaatagaaagaaagaacctaaatgtccaccaacaggggaatagtgcatctgtaccacgggattatcatggagcagtaagaaaactgcagtaaatctacgtgtactaaaacatctctaggatgtacttactgcaaagataaaaaagaatgtaagatgcagaaggcacttaatgtgatctgtttacatnnnnnnnnncacagacttttgtacatacacgtattgaagtgggtaaaagataccaacaaactaatcccagtaattactcctaagagagatggctaggatccagagtaaatagtagttttaggcatatttaagctttatctgtcttgtttgaatttttacgtcattaaagagctaccagtttgcttgtacaactaaaaaggactttattaaaaaacagaatcagtggggctgtttctaccaagttccccagctggaggggttcaagaagaccccggcaagcacttaacagaaacactagaatttcacaggacattggatgagactggctctaactttctactcttgcaagccctgcactttctaccagtccagcaaaacaaaggaatattccataggtggctgtgcttttggctgttatcatttaagggacacttccatgggccactcatttctttcctgaccttctaagaccctccaactttacaatactactcttggctccaataattgacctgctgtagtcaccagagca

SEQ ID NO: 267558 - DNA, 765 bp, Homo Sapiens
  misc_feature (20)..(20): n is a, c, g, or t
  misc_feature (142)..(142): n is a, c, g, or t
  misc_feature (401)..(401): n is a, c, g, or t
ttttctctaccacctgtccnccagagaaaaccagtagaggaggaaattgaattaaatgtttctttggagatttgccattgtcaaagatgacatttacaactttgcttacactaaaaggtataaagccaagaagaatctttanctttagacaatcaactatccatctttatataccttgacaggcactttccaactggaaatgaggtatattatttccttcctatttatcacctaactaaaccttgggctagaaattccatcatatacatatatctagcacagagtaaatcacattggagtgggaataattacatcaggagtcaacatccccccatgtatcttgtactttttatttaatttatccttaaccacctcaattactatcataataaataaaatgnaaatttctctgggattcacaagacaaaagacctaagttaggcattttgtctctcattttctattgcccgatatttcatttgaaaaaagcatttctttaattttggcattttccttgtgtttcagggacctgagtaggaggtaaaggggtttagagcaggcaggtcactagcctcccactccaactttaattagaaaacccacccatatttatctgttttgtatactcaattttgtttgaaataagtgattctatacttcaaaaaaataattctgaaagaccagtgatgtgataatttatcaatggctctgggctgatggggagctgagaaaagagggtatactaaaatcagagggaaaattaag

SEQ ID NO: 267559 - DNA, 1106 bp, Homo Sapiens
  misc_feature (234)..(234): n is a, c, g, or t
gctcgcttccaggtgaacacagaagactcagccttcccagcagcccgggggaagacccacaagcccctaaagcctgcactcaagagggggcccagtgtcaccaggaacctcggagagagtcccacagggagccgcagagtcggcaggcatcgccctccggagcctcttctgtggcagtccaccccctgaggctgcttcggagaagttggaatcctgtgagaagcgcaagctganagcgtcgtccgaatctccctggcaagtgacgcggacctggaaggcgagatgagccctgaagagattctggagtgggaggagcagcaactagatgaacctgtcaacttcagtgactgcaaaattgatcctgctcccttccagctggtggagcgggacctcttttgcacaagactcacactatcttctcactgctgggagtggaccatgcttatgtcaccagtattggcagactcattggaatcgttactctaaaggagctccggaaggccatcgagggctctgtcacagcacagggtgtgaaagtccggccgcccctcgccagcttccgagacagtgccaccagcagcagtgacacggagaccactgaggtgcatgcactctggggcccccattcccgtcatggcctcccccgggagggcagcccttccgacagcgacgacaaatgccaatgagcccctcgtgggtggcctaggatggtgctagccatgcccgtcagcccagaatgtgcatctttcattccttctgcttcggaaggcaggaggcagctacagctggaggctgcaccccagccccctccagacctggggtgccagcttctcccagttcatcctacctggaatctgacccactacccacctgcaacaagtcttccagaggcaggaagataggcctgccctggcaggatgggttgggtcacttgacccctgctccccctttgaggggaaaggggtggaactaagatgggtttataactggaacctccaatgaccagatgtatatagagatttacaaagatttttatattaatttaataaaacaaattcttaaatagaacaaaataaacacctaatgagccacttatatatagaaaa

SEQ ID NO: 267560 - DNA, 649 bp, Homo Sapiens
ggccgcttaattaatcgggcttttatgcaagatgttagtagcagtagcagcacagttttattaagatccctgaatctctcacaaaaactgactgagcaactgggataacaaggtattaactacgacaaaacaatgtaacagggtgtcatcatggacgttttgtgaggttaaaccacagggacccaggggaatcaccaatttttttggaagaaggaaaggaaaggaaaaaaatgtttaatggccctgggaactggaaaacctagaaatacaagtgctaacatctgtgttcctaaattcagagattcttaccaggcaaaaagaactcagcagattaatctgagaacagcagctgaggctggcagaaggcttcctgggcctcaactcatagctgagagtgagggtggcaaaaagcagtgctgtgagtggtctgtttcctatgaaccctacaaattaaccacccccaaaacaaagccctgtcctaaggagaaactgcaggaagtcaattataaattgagttgggaagcacactgaggctcaagaaaagggaagctccaggttaagatgcaagagaagaagggaaaaggcagttttctgcaagttcaagcacaaataatttctttaccttctagttctggaaataccaggtgct

SEQ ID NO: 267561 - DNA, 682 bp, Homo Sapiens
actcctgcccctgccacgagaacacaccctttccagtttgctggagaaatataagagaagtccagtgaaagagagctgagtttccccaatgatgccatcaagatgaactaactacagttaaccagccagctgatagcagatgcatgagtgagcccagctgagagcaggttgtgcaagcatggcacgtgcatctgtttggcttgtggtgaggcctcaggaagcttacagtcatggtggaaggcaaagaggtagccagtacatcacgtgaactcgtagagtgagaactcattcactaccatgaagacaacaccaagccattcctgaggtatcagctcccatgacctgaacatctcccactaggcccacctccaacactgggggtcaaacttcaacatgaaatttggaggggacaaacatccacgtcatatcagatatcattatttaacctaccatatccttggaattaggggttgatgtgttactgcagcatagtttaatgtatgctgaggaatatggaagccatagtaagttaatactaaaatctcactggacattaactatagaagtatgcccaaggtaactatttagtagacataatcagcctcaactttttgttgtcttcatgaggttgcaaattatagaacttgcttatgaaagttaatacaaaatgcacaaaactgaa

SEQ ID NO: 267562 - DNA, 536 bp, Homo Sapiens
aaacaacagagtaaagtaaaactaggtagccagaagaattgaagtagctgcctctggggattgtgactaggagggctggaaaaactatgagagacaacaggggagaaaaagaaaaatctgggaagaaattaataaatccctcacaaacattgttccttgttttttcaattccataagattaaaattccctaggttggcccacagataacaaggctcaaccagtccagggttccataacagattgtggacaaaatcctatgaaccatcatcagacctcatccctaaatgcctgactcctaatttggaccagagacaaggttaacctccagaaaacaagagtctgtcaactttctttagcagacccttatgtctttttacaagagatttttaaaaaagaaaataatcctgtcatatttcctcacctgtacaccctagcttcttcagaggaaatggacaaatatcttgaactaagcagcattccagggaatcccctagcaaaaatacatacaataatcctgggctgggcagttgctcat

SEQ ID NO: 267563 - DNA, 404 bp, Homo Sapiens
taaacaacagagtaaagtaaaactaggtagccagaagaattgaagtagctgcctctggggattgtgactaggagggctggaaaaactatgagagacaacaggggagaaaaagaaaaatctgggaagaaattaataaatccctcacaaacattgttccttgttttttcaattccataagattaaaattccctaggttggccacagataacaaggctcaccagtccagggttcataacagattgtgggacaaaattctatgaaccatcatcaggacctcatcctaaatgcctgactctaatttgggaccagaggacaagggttaacctccaggaaaacaaggggtctggccaactttctttaggcggacccttatggtcttttttaccagggggtttttttaaaaa

SEQ ID NO: 267564 - DNA, 470 bp, Homo Sapiens
  misc_feature (88)..(88): n is a, c, g, or t
ctgaagctggtggcttcattccattcatttggaaaacacagagataaaaacaagccaggcacgttgcactcttcctgaaaaagtgtcnatcccttggagaagggctcagatgctgaaatacacaactctctctttcagaaagaactggcatgaaacccattctgccttcaagttttgagatgcagagcttttagttcctctgctaatagagcctcgtttgaatactctgcttgaaaggcaaaagacatctgcctcaacttcaatcaaggaaaaatagagcaactgtacagcaggcagaatctctgatgactggaattttgtctatcaatggatgtaattaatcctttggctcaagggcaataaaattttgtcttaaagtagcagatcctgctccatcaaagcacaactcaattgggagtaaatgcaaacatgtatctatattgagagatagattttactctgattagaaa

SEQ ID NO: 267565 - DNA, 716 bp, Homo Sapiens
aaactttgctgtagagtgggagggaaaaagaggaagatagtcttcttgtcatgggccgtcttatcagcctagcaataataaactatcaccatagcaacaggaagtctaattgatggcagatgttgagccactttaaaagccacgccaactgaatgccaagctgatgctgtaaacctctctcctctcccgcggctagactaatcatgctatggtcatattggagagacccatctttcaagggtggaagaaactctggacttggcatcagaagacttgagtctgagcctcacatctgcccgtgctgagctctgttgccttgagcaagtcagttcatcaaaagtagaagatagttatcattaattttatcatcattattactaccagtagtaggaactctctgaaattcaatttcacaatctaaaagatagataatatttgtgtaagcatcgtcagaaggtttaaatggaataaaagatgtggaagtgcttagtaaactataaagtaattcacaaatacaaaatattaacaccaagagacagcttgacgtgctagaaagagtttgcattggcatcagacagatatggctgcttacagactgcttcatctgaacgcatcacttacatgctcagcctcagttttctatcagtaaaatttcttagtgtaaatctgtaaaatgttctacccatgttacaaacctgtggcttaattaagcggcc

SEQ ID NO: 267566 - DNA, 696 bp, Homo Sapiens
actcaggcttctggaagaactggtcccaggaattggaaagccatcagcaatcctgagggtcctttctgtttatgtctttctttctgcaaagcttttactcatctttcttactaactggctttctctgccactctgtcggtagagggtggcctcccacagccctaaactatgcagccaagttctagccaaatggaaagcctgtctttccatctcaattctaaattctctaagacttgggctaggcttgggttagatgtctatccctggactagtcagctgtggccaggagcggagacatgctgcacatatctgtctgcctctgctcacctccgaaaagtaggtgggaagatagaaaaaggggtagggaggcagcagacagagagacagacagcagagagacattgtaaggctggcagacaccttataaatatctaatatggtgagtctccataaactactacccttaaactatatcataggatcacttctaggttattttgttaaaaaaagtcagtcctaggtgaaacttaaaaaatttaactttaaaaagacgatatcttttaaaatatgcatataatttgagactcttaaggtaacgggatattcactatagttagtaagtcttagctttgtgtgtatatatgatttttatgcatgacactctttaattgctgggaggttctagcagctctgtcc

SEQ ID NO: 267567 - DNA, 671 bp, Homo Sapiens
  misc_feature (406)..(618): n is a, c, g, or t
ggccgcttaattaaatagcatactatacatagtaatttaaattgggactgggtcaagcttagaaaaaagtttagagtaagggatgcttgctgtcacgttgtgcctcgtatatatttctcagatctgtgtttccctgatggccttgggtttaaatgtgggcatctgcccctgtgtctgcctcctgactctcaacccctacatggtttgtttgcctcctagaaactccatttttcctaggcatgggctcaggcctctatttcattagagtgtcatggcagagtcaaatcaatgcatttcagtttctttccttatgggaacaccttttataacatctcccattccataacttgactgatgtgtattgtcaataaaatttaataataatgcccagatgtggtggctcatnnnnnnnnnnnnnnnnnnnnnnnnnnnnnnnnnnnnnnnnnnnnnnnnnnnnnnnnnnnnnnnnnnnnnnnnnnnnnnnnnnnnnnnnnnnnnnnnnnnnnnnnnnnnnnnnnnnnnnnnnnnnnnnnnnnnnnnnnnnnnnnnnnnnnnnnnnnnnnnnnnnnnnnnnnnnnnnnnnnnnnnnnnnnnnnnnnnnnnnnnnnnnnnnnnnnntgtgccacccacaccccacccggggcgaggtgacagagcaagattctgtctcc

SEQ ID NO: 267568 - DNA, 681 bp, Homo Sapiens
  misc_feature (135)..(267): n is a, c, g, or t
caccgtgggcctttgactgagctgcagggagggatagagatggacccagtcagccagaagggttgaccctggcacttggtcctgtctgtgaacttgcaggtgtggaaaataaggttcagtgaggcgatggatgcnnnnnnnnnnnnnnnnnnnnnnnnnnnnnnnnnnnnnnnnnnnnnnnnnnnnnnnnnnnnnnnnnnnnnnnnnnnnnnnnnnnnnnnnnnnnnnnnnnnnnnnnnnnnnnnnnnnnnnnnnnnnnnnnnnnnncaatggtgaaaggcagttttcctcgaatgagagcatcagacaggcatgcccgggacccagctgtgggaaccctgagagacagacatgaagcacttcgccttggaaatgctttcttagtctttcaatttaacattcaaagggatgagggatttttatcaacagagccagctgcaatgcaaagtcatgctttctagtctcagttcaaatggacatttcccttattttagccgtgcatatcacagtctccattttcaagccaattctggtttaaaggtgaccctgctcttaaaaatcattaaataataagtggtctcactctaatttttcagcttctctctgactttacaactcactaaaaggaaggttctgcctgccgcccgtgagcttctaaagaataaagtggaataaaatttg

SEQ ID NO: 267569 - DNA, 815 bp, Homo Sapiens
gggcatgtgagatgagtgactgccggtgaatgtgtccacagttgagaggttggagcaggatgagggaatcctgtcaccatcaataatcacttgtggagcgccacttgacccaaggcgccacctgggcggacagcaggagctctccatggccaggctgcctgtgtgcatgttccctgtctggtgcccctttgcccgcctcctgcaaacctcacagggtccccacacaacagtgccctccagaagcagcccctcggaggcagaggaaggaaaatggggatggctggggctctctccatcctccttttctccttgccttcgcatggctggccttcccctccaaaacctccattcccctgctgccagcccctttgccatagcctgattttggggaggaggaaggggcgatttgagggagaaggggagaaagcttatggctgggtctggtttcttcccctttcccagagggtcttacctgttcccagggtggccccagggccaggccaggggcccacactatgcctgcgcccctggtaaaggtgacccctgccatttaccagcagcccttgcatgttcctgccccacaggaatagaatggagggagctccagaaactttccatcccaaaggcagtctccgtggttgaagcagactggatttttgctctgcccctgaccccttgtccctctttgagggaggggagctatgctaggactccaacctcagggactcgggtggcctgcgctagcttcttttgatactgaaaacttttaaggtgggagggtggcaagggatgtgcttaataaatcaattccaagc

SEQ ID NO: 267570 - DNA, 449 bp, Homo Sapiens
  misc_feature (15)..(15): n is a, c, g, or t
  misc_feature (40)..(40): n is a, c, g, or t
  misc_feature (57)..(57): n is a, c, g, or t
  misc_feature (67)..(67): n is a, c, g, or t
  misc_feature (70)..(188): n is a, c, g, or t
gtggacaaatgtggncaataaagaagcccctgaagtggantaacaaacaaaaccctntttatttatntannnnnnnnnnnnnnnnnnnnnnnnnnnnnnnnnnnnnnnnnnnnnnnnnnnnnnnnnnnnnnnnnnnnnnnnnnnnnnnnnnnnnnnnnnnnnnnnnnnnnnnnnnnnnnnnnnnnnnngatgataacaaattgtaacattccttcattttattatcttaactttctgttgtcactggctgcttatgaagtcaccagagctaaataataattaatatagtctcatgctagaggcagattattatataatcagttgtttgtcaaagttgcggcactgcttctgatagttcagacttttttcctattcaatgtaatcacaattctgaaaacttctaaggcagaagctcagcaggtaaaataaacctgagtatgcgtctgtcc

SEQ ID NO: 267571 - DNA, 611 bp, Homo Sapiens
ggccagtcttctgatctcagtatctcctcccaactcctctaaaaataggtagagtggcagagaattggggtgcctcttctatagcacaacccatgatgcatccagtcatgcctgaccccactatgcctttcccacaaattgggaggagttggggcagtgagcattttgctagctctgtctgtttcttgcttcttgtgccatttatagtccttggccatgagcaacaaaagtagaatggtgccagtgccttaactaaatttttctcaacctagattttcacctgagacaatatggtaatattattaaattactgtaaagatagcaaattttctgggatactttaaaatcaaagttgtatcaaagatcaagaagcacccataaaagctttataaactttcacaaaaaataagtgaaaattctttgtttttatggccgtgtaaaatgtcatttttataatggaaatgtcttaattttcaaacttaacatatactttaagcaattttagtatttaaacctttgcaaaattgtatttttgaatgtgaagttcaactttggcagtaggttgttgcaatagtgtactctgcactatggtgccagtatagccacatagg

SEQ ID NO: 267572 - DNA, 610 bp, Homo Sapiens
  misc_feature (282)..(282): n is a, c, g, or t
aaacaacaagaaattagaatgaaaatctgtgacaaacagcgtcagtgtggccatgtccacattcctacatgtctctctctacaagcacctctctaagaagcctgacatcccggtggactctttatagtcatgtacacttgattccagatgagctctggtcttatctggatgctcagataagaggtttctatctgagcatccagatgttccctcaggttccaagacatttcaccccaggccctgggttcactctggaattcgtaggcttcacgtctctctagnaaatgacgtgtaaaattttaaggaccagacctcagccattcagcgttccagaccatcctagaagtctttcccaatctcacagagaaagccctagtatttcccagtgaccccaggattccacgttggggtggccaaagaaataggtctctcagggctttgccacagcctccagcccatccttcagaggcacacacagcacctctcggctgctccagctctgtaggatagcctcccctggggtccgtgggacgcgggccacagtgttgaggtagacaaggaggatcagtgagaggcctcttccctctccacagagactggattggcattg

SEQ ID NO: 267573 - DNA, 739 bp, Homo Sapiens
aaactcatcagtgaccgcagaagagaacatgggggtcttacatcactggcgatctccctagatgcccgggcagtctggaaggggatggcatccagcctgaagtcataactgccagcccgggtctgctcccaggagtttctgtagactttctagattggaaaaacaaaagcatgagtaagcaggcagtcactccactgtcttccatgttgctggtactcagcaggagtggttcttaacctttgttggttcctaggatggcacagcctatagctccatgtccaccttggcgactccctagcactggggattggtgggggttggccgtaaaaggcttcagctctaagcccccaacccgcccacccattaggccctgctcctgtggggcttgtgatcttcgggtatggctcatttgcgacacccacttggtatcagaagcctccaacccactccttcctgtctttgcaattcactttcagtgcttcgggtttgcagcttctaggtgccagaattcaagcttccagaatccagtttcttcctacatgctgaaagtgctgttccttgggccttggcactcatgtgtttgttagctccactgacatccggagggcctcagcctggctttgatgccatgccttgcaccatcactatgaggcatgctgcatctcatatacacccctggtgcctgcacgaagggaagagccttcacctgaattaaatttattgtcaagcacctgaaaaa

SEQ ID NO: 267574 - DNA, 459 bp, Homo Sapiens
caaccaagctaccaacaactctccagaggactgaatcaggaaccacagcttcctaacgtaatattcagaatgttcaggaccaatccagaaccactcagcatacaaagaaggtgaatatcctcaactcgcatgggaaaagatgatcaacagcttatctgagctaacagagacattggaattagctgacagactccacagcagctattataaaaaacactccaagaagtaaggaggggtattcttaacataaagggaatgatgagaagtctcaggaaagaaacagaaggtataaaggagaaccaaatggaaaacttcgaactaaacatacagtaactgaaattgtaaaaacccactagataggctcaacggcagaatgaagatgacaaaggaaagaggcagtgaacacggagagaaccctgggctgcacacccttcctgacaagcacattctggacctagg

SEQ ID NO: 267575 - DNA, 410 bp, Homo Sapiens
  misc_feature (396)..(396): n is a, c, g, or t
agactttcctgggttagtgaagtggtacaactgttgttactgtccaagtgtccagttaggtttgataccccaagtatctgaccactggccattagaattgtttcagacttaaaaataaaggaagataaaatggaaagtgttttagaaccaaagaatcacataaacccacaaaaaggtggcaattatgcaacagctgtttccacccttagaaattcttgtggcaaaaccaaagccattacctgggataatcccagcctaaaaacaattcgtctcagtgaactttatggataaagtttcttgttaaagaatttactttcttttacttgtctagttgtataatttccaatttaaaaataggttaaaatcctccaccgtcctcccctttttcctctcttnttacccttcaccca

SEQ ID NO: 267576 - DNA, 761 bp, Homo Sapiens
  misc_feature (737)..(737): n is a, c, g, or t
ttccactcagaggaagcccctaaaagagctgcttctctggttcccaaagccaagattatcaccattctcattgacccttcagaccgagcatactcctggtaccagcatcagcgatcacatgaagaccctgcagctctgaagtttagcttctacgaagtgatctcagcagggccccgtgcaccctcggagctcagagccttgcagaagagatgtttggtcccggggtggtatgccagccacatcgagagatggcttgtttatttccccccatttcagttgctaattattgatgggcaacaactaagaactgatccctgctacagtgatggatgaagtacagaagtttctaggagtcttgccctcattataattactcagaagctttaacgtttgattctcataaaggtttctggtgtcagttactggaagaaggtaaaacaaaatgccttggaaagagcaaaggaagaaaataccctccaatggattctgatagcaggacatttctgtcaagctactatcgagatcacaacgtggaactctcaaagctgctgcacaaactgggtcagcctctgccatcctggctgagacaggagctgcagaaagtaagatagcactgagagaaaacttgagacttcatcgtccatgtagaacacaccttttccaaagcttccagaagctaccaaaaggcagttgaaaaatatacctcttcaaatgagaaaaaagaacagtttcttccnatgtgctggcacgtggatgattag

SEQ ID NO: 267577 - DNA, 589 bp, Homo Sapiens
  misc_feature (56)..(56): n is a, c, g, or t
tatctggcccccccttaacactggagccccactcccttctcccatccggcccgagnattagggaggattgactgtgtcagggatggcgggtggcctctctcgctgccagggcccttgtcagagcagccaggctggacagacggcctccctcctctccatctgaccggcacctgctgcttcgggcttaggccaccgctccctgtccccagaggagatagccccagatggactggaatgttgtggcatgagagcgcatgtgtgcgatggccccgctgtggtcccctctctgtccctccatctgtatgtgttctgtgtcccttgcatgtgtgcgtgttagagtgagcgcgtatgcatcaactcattgggctcttggctgctcacaaggcaaatttgacttggaaagactttcatctccttggaaccaagacttcctgagtccccctcaccctggccctgttccaccatggttatctgggtattggggaatggaaactttgggggagtgactttttaaagagacacttataatttctactactgcactactgtccattgtgggatgattaaacatggtatttaactgtgaaaa

SEQ ID NO: 267578 - DNA, 742 bp, Homo Sapiens
  misc_feature (26)..(26): n is a, c, g, or t
  misc_feature (75)..(75): n is a, c, g, or t
  misc_feature (85)..(85): n is a, c, g, or t
ttaagcgatagcagcccacccaggcntaatctcttgggcctccctgatctacttccctgacaagggtgtctggancaaaataaancagaaccaaaaacagaggtgagtgggaaagcaaagggaaatgagaatggagaaaagtattttctagataaagcagttggatttgatgggtgagccaggagaccagcagcagggagggtgggtggtccaatgggcagagttatggctaggaagtgaagagtcaagagcccctgttttacccacagtccatgactgtaggatccaaggcatgaccccttcccaacagcaatgcccctttaagaaaaggaaatgtgatcaaaagggtaacaagggtcccttgctccctggaggggaactgctggcccgtctgcctgaatagccactggaggcaggccttggttaggccttcccactgacacccagtgggacgtgatggcagagcagttggtgcttttgtcaacatgctgcttccagatcttcaggtaaggaaatagcccccgttttcagtgcccagagcaaggcttcaggccagatcaacagcccccatcctgtctctgtgtatgggaacagagccaggcttggacttgggtgcagttggctgtgagtagctcgatggcccatgactggcccttctacagacccacacagcacaggacagtcacagagctgtgtccactgacctcggagcgaaatggactttggggatctttgtttttcc

SEQ ID NO: 267579 - DNA, 666 bp, Homo Sapiens
  misc_feature (22)..(22): n is a, c, g, or t
ccgcaaaggaactcaatttgtntcaattttcctcagtgaaactcttccaggagtttcatccaccagtgaagcttatctcaatcacaagagaagagactagaagcccacaccacacttagacaaatgtcacaaacgatcatctgttcttctaagggccattcatcttttcccaaaatcatttactctgcctgaaattggctacatccctgggcttccttctcgtctatgtagagggtatataagctcctaaatctcccggtttttcaggtacttttcttcctgtgatgccaccacacatgtaattcaatttatataccttttctcttattaatttgcctgttgttagtatgtttcagaggctgagttattgaactctcagagggtagagagggaaagtcttcacttttctacaattaagtagatcaatttaacttctaaggataagtctgtctgtttttcccatgttttgaattttgaatcataatgacctgagatccccaattaaggagaaatgggaaacaaatatctgtatgataatctataactgttttcttttatacacaaatctcaatgtcatgaatataaaagtaatgcttgatttggagttcctttacatttattattcaaaaacacccacatggccgggcacagtggctcgtgcctatc

SEQ ID NO: 267580 - DNA, 1005 bp, Homo Sapiens
  misc_feature (216)..(258): n is a, c, g, or t
  misc_feature (778)..(778): n is a, c, g, or t
  misc_feature (807)..(807): n is a, c, g, or t
  misc_feature (817)..(817): n is a, c, g, or t
ccatttgaggaaatgaaggcatagaaaagctcaatggatcgctgaagaccacagccctgataagcgtcagagatggaatctgttgccaggttggcctgcctcccaagttctacacaagcatatactctaatgctcggatcctaagaggaggaaaactagtcttcatgtcagggacagtttcttagacatctttgtgctccccacaggaccttagcnnnnnnnnnnnnnnnnnnnnnnnnnnnnnnnnnnnnnnnnnnngaaacctgggctcaggctccaattctgccatggacttagtgactcagtctcctgcaacttggagctgcaggtggttactcagctgggcaacttcagggaacatttgaaatcaattatgggtgaggaggaacctattaaaatcttctcttttgtgtatgttggggttaaaaaagaggaaaggaagttgagaaggcgggaaaggaacaggatggtttcaaggttgggtgctggagcttaaaagttacacacgtggatgggacagaatttggcttacgtccagttctcagttccaatggcccaaccaaatgggctcctgacctcagtctactcctaggtggccacatggccctgagctgccaggcccctgactagctactcttacagaggactctacagtggagcagttgtacacagtcctctcctacaccttggttgttctgtctccgctatgggaaataggccacttcagaagatctaccttgcagggacgccaggtaccacgtctcgccttctgagggcncagagagacggttcagcacccaaagcctngtgagctccngtgttgtcctcaactctaaataaatgtattctggcaattcattctggaattcaactttctattttggaagaatgtgggagtttggagtgggggagggagaggggaaactttagttgattttcttttctttactagttgctaaagtgcaagttagtcacaaccccgaaaaatgtcacttttgcccttta

SEQ ID NO: 267581 - DNA, 640 bp, Homo Sapiens
  misc_feature (292)..(292): n is a, c, g, or t
acttatcacgtacctcctgcacgcttgatttcctcttctgtcaaatgagtagttgtaccaaatcttttatttagtcattaaacatttactgaacatgtatgggtgattaacactggatgttggatgttcggagaaaaccacaacagttttaataccagctacatttaattgggcaaaaacagtataccagatgctgtcttagctggtcatgccatttaatttgaagagcaaacctaataggtggctatgataaatctattctgtctctgtgggggttggaggcatgttgctngaaattcccgtgaggacaacaggctcagacggtttggactaatttgttctggggttacacacatctgacatacctgaagtctggaaaatccaaagcccagacctttgtccccacactagactgcctctctaggtgagcaggagtcctgttgccctctgtgagggtcaccgtatttgcagcatgatgtgaaagtaaatattcagtgacagcaccaaaagggctttaatcttttttgactctgcttgcttaggtctgggaaggtgtctcagaccagccctcctattctctttaaaggttagccgatgattgcgttttcccctcacccagtacttatgctgccctgcccag

SEQ ID NO: 267582 - DNA, 457 bp, Homo Sapiens
  misc_feature (428)..(428): n is a, c, g, or t
  misc_feature (441)..(441): n is a, c, g, or t
tctgggcagggcagcataagtactgggtgaggggaaaacgcaatcatcggctaacctttaaagagaataggagggctggtctgagacaccttcccagacctaagcaagcagagtcaaaaaagattaaagcccttttggtgctgtcactgaatatttactttcacatcatgctgcaaatacggtgaccctcacagagggcaacaggactcctgctcacctagagaggcagtctagtgtgggggacaaaggtctggggctttgggattttcccagactttcagggtatgtcaggatgtgtgtaaccccaggaacaaattatcccaaacccgtcttgaggcctgttttcctcacgggggaattttcaggcaaccattgccttccaaccccccacaggggacaggattaggattttattcataggccacctntttaggggttttnctctttccaatttaat

SEQ ID NO: 267583 - DNA, 558 bp, Homo Sapiens
  misc_feature (389)..(490): n is a, c, g, or t
gattcagtgattgtacaagagcagtggagttttctccacaaagtagagaaaatcatttgtgtattgttatgcaaatagcttacagaactattaataattttgttttctttaatttgtaatttcttatgtaactagtccatttgctttcacccagtgatgagcatcttacctgcttcactcggtagcgctccattcctaatctttttaaggacaaattcatcaacttggcgttaaagtctatcagtaacatgatcccagctacttctccagattcctcttgagctgtccttactacatgtgcactacactgcagccacactgtgtgacttattccctggggtttctattgtttctgccttgcttttctcatcctttagatattagcattnnnnnnnnnnnnnnnnnnnnnnnnnnnnnnnnnnnnnnnnnnnnnnnnnnnnnnnnnnnnnnnnnnnnnnnnnnnnnnnnnnnnnnnnnnnnnnnnnnnnnnaaaatgtcggcctgcagtgagctgatactgctgtccaccctgggcaacagggtgtgagacctcatctc

SEQ ID NO: 267584 - DNA, 738 bp, Homo Sapiens
  misc_feature (21)..(21): n is a, c, g, or t
  misc_feature (354)..(354): n is a, c, g, or t
  misc_feature (373)..(373): n is a, c, g, or t
ttccaagacaccaagacaganctccgcatagcctgatcccttgtgccaaaccctgtagcaggcgggagcacagtgcctttgaaggggagccgagagggagggaagaagggtgctgcagactgcggtccgaggagccgaggggtggacgcagagaggctccatcctaactgcctctgatttatcttaaacaggggtgtgacaagatcagatctgagtttcagaaagatcaccctgactttattatttgagatccgatagcaaacaccctgcccctcctgcagaaaatgtatgtccccactgtgaactggcacagggcacagggccacaaagcagtgatgccccgtggttcaaaanactggcctctgcccatccnagcagacctggtgcaaatatgggtcctagtgcctctaagccacaggaccttggccaagtcatttaaatactctgagcctgtgtcttggtctggaaaacagaaccactaatatctaccgtcagaggatgttgcccaggaattaacacgatcatgttttctggagtgcttagcatggggtctgccaggcccttggtaagaggcttaattagcgcatttatttagttcacaaatatttaacaaatattggcacctctctatgtgccagaggctatgcaagttgccaaaatgatggtgaataatcaaagttcctggagcttatactctaaaggggatgacaaataaacaaccatgtaagagaatttcag

SEQ ID NO: 267585 - DNA, 1003 bp, Homo Sapiens
  misc_feature (878)..(878): n is a, c, g, or t
tcataactatatactattccattgcatgaatattctgtaatttatttaatcccctatggattgataattaggttcattatagatagaagtgtaattaacattcctgtacatgtattttgctacttttgtgggtatttctgtaggatgaataactagaaatttattggatcaggtttcacatttgcagttttgaaaactactaccaaaaagatttcaccaatttacaactccatcattagtaagaatgcctgtttgcctatagtctgccaaccctggaatccttaaaaatttttgccaatctggtaggcaaaatttctttcttttctttggaatattaatgaggaggaacatcttttcatgtttcttggccatttgcatttcctattatgaattgcttttgcccattttcctttttttaattatgaaagtctaatgactaccttctcattgtataaaaaacacagttctttgaatagagagacccttttctccaatgctaccaatcacattccacttaccacagtttaacatacatcctctaggtcacctttccgtacgaatatacatacacataaaaacactttttacataaataggatctcatattctgtagctttttaaaattttggtctcaaaaaaagataacaggtctttaaatttctttaatggttgaatatgattaaatactatgaaaatgccattatttattcccttaatttttttcctctcgctattacattgccaaagtaaacatcctattcagatgtctttgtgcatgtgtgtgaatatttctttagtctgggagtccagtaaggtgggatttttgggatcaaagggtttgttctctgtccaccttgcagtcttccccaaaggccttncataactgtattttcaccaagtgtatggagaatgttcatttccccatataaccatacctacacttgatagtttttatctgttgggcgaaaaagaaccttttcttattttgcatttccctgattat

SEQ ID NO: 267586 - DNA, 746 bp, Homo Sapiens
  misc_feature (91)..(172): n is a, c, g, or t
agatgttcactgtggcattgtcatagtgtaacttggaaacaaatgtccatcagaaagaaaatggtttaacaaactaaagtttcatacttgnnnnnnnnnnnnnnnnnnnnnnnnnnnnnnnnnnnnnnnnnnnnnnnnnnnnnnnnnnnnnnnnnnnnnnnnnnnnnnnnnnttccgaaaataaacctttcattctaggggaggaagacagacaatgaagaaataaatctattacatgtcaggtagtgataaatataaagaaaaataaaacaagttaaggggaaacagagagggagaatgaatgggaggatataggaattggagaggaacatcaaggaacttctgatgaggctgtatttgagtagagacctggaataaagtaaggaaatgaggccaagaaaatattgaaggactggagcctcctcagtccaaggagacaggtgggtttgtgttcccacgtgttcccagaaacatcaagacacagcccagtgtgagcagaaaggagtgggtaaggaggaggatgcaatgagagatgaggtggccatactccatagatgccatcaagtaagaatttgggattttattctaagtctactggataacatatagctattaaaattaataatgtaagtatatatgccctgatataaagagcctgcaggacacacagactaacaaatttgcagaacaatacatagctgttaacaccttttatattaaaaagacactgggcctcgagggccaat

SEQ ID NO: 267587 - DNA, 268 bp, Homo Sapiens
gtttgcctaatacatccccccaaggccctagaacagtgaagggcacataattggtgttcaataaatatttgtgaatgagtgacaagtatgaaactttagtttgttaaaccattttctttctgatggacatttgtttccaagttacactatgacaatgccacagtgaacatcttcttatatgtctacatgcatacatatatatctccagggtggatttggataagaaaaatttttggatcaatgtgtatgcacatttaaaattttaata

SEQ ID NO: 267588 - DNA, 1011 bp, Homo Sapiens
ttcggcacagctggaagaaggaactgagggtcccatctgtagctatttggcaagtggatcataggcccagaaggaagtaagtctatccaaactctccccctctctcttcctccaagatcctgccctggcctatgtggctctggcccatgatttaggacttcaggtgtgtggtttttttacacttggtccggttggttgcggacagggagaaaagaaactgaataatgattgctgtttaaccaggaaagctgtgacaaactcagctacagctcagcatgttttacctcttccctttcactcccgcaaacagcaatgagcagatacatttttactgcaaagaatgactgttaagtagttaggaattagaagatgtgtttgccagagagaagccttcattgtagagaatttactataaccaagtcagagtcacttaggaaaagagctttgtcacacagacgctaggagagtctccactgacactggaataggatgtcacctgtgatgagttatctgacttaaccccagagcagctgtctgagtggcctgaagatccggacgttctggggtcatgccaggagactatcctacccctctcatgtgtctgtgctgtgagaccccaaataagcgccatgcatacagagttactaaattaaggattattaacaagggagataaaaaataaaatatatatggttaaagagccaagggagtgtctgtatgtataaaaagtgaatccaatttgaagacaccagacctaggcaaatccagaaaacaatctaatgcctcaggagaatatcatggatcaagctgacatggaaaggctctccatgtcatggaacaggaatgaaaacatcttatctgcttcttctaactctaaacatatacaactgctggataaaatgtaatttaaaattttttaatatatagcctaggctggaagcttagaaagtaaatcccagaaacgaagaggaaaccattcaataaatgaatggacctttcagaagtatttgg

SEQ ID NO: 267589 - DNA, 395 bp, Homo Sapiens
aatatattctgctttgggttctacattgtcagataatagtattatggctaatgagatacttaagtgaaaccagaataaaaccaaaagggaggagaattaacatgattgagcatctcctgttacaaacaactccacttgatgtgaatatcttttcaagcaattctgtgaaatcattatccccattctacaaataaggaaaaccagggcttaaaacagccagatgttggtgcctggaatcacattgcttgtgagctgagagtcacgggtccaatctggttatgatgtttctgcttattccacactgaaacctacacatcacctatccacctaaaaacaaatgcattcagaatttgtgtcaggtgtttttatgaaaggagtcactttataagaaaaaa

SEQ ID NO: 267590 - DNA, 359 bp, Homo Sapiens
ggaggccaacagagtccctacaggtggtgctcacggtaatgcaccgacaatgagtggctgttttccagtttctggcctccgctgcctatctagggacggcaggatggccgcgcaggggccgccgctttcctcctgaccttcgacttcgacgagactatcgtggacgaaaacagcgacgattcgatcgtgcgcgccgccggggccagcggttcccggagagcctgcgagccaccttaccgcgagggcttttacaacgagtacatgcagcgcgtttttcaagttacctgggggcgagcagggcttgcggccgcggggaccttgaaggcgccattttaacggaagccattcctttttgttcg

SEQ ID NO: 267591 - DNA, 742 bp, Homo Sapiens
tccaagtgtctttaagacttaaaagcagtacatctctatgactccccacaggctggactttgctaatcaatctggtgggctagaagagaaatcctaagaaaaccttcctgcttaatccatctgtacacctaatagataagcatcggtataccaatacaatgaagcgatcttcaaatgctttatcattcagcgctggggccccaggctgaggtgattagggagttagtagtaggcagctggggccacttgcagagcggctcccattgtcagcttcagtgccctcagccctttctgcagctgcacagctgagcaagaagaaaccctggtgagaaggtgagaaagccccatgactcaacccgagggcaggtcccactcttaccagccctgcaagtttgagcctgaaaaacatcctttagtgccagggtggaggctccttggggtgccccacacccacctcctgtgacttaggagggccaagacagtggggggacgcactgcaaacaggaaacattccatcagggaacaaagggaatttctagcacccctagatcttgttctccctcccgctgggatggctgacggctgcctgtgtttccttgcaccaggaggataaagctttcccgtgatgaaagcattggcagcgccatctggaaggggctgattccacatcccttgcaatggggaaatctagccttggactgaagatctaggcggctggctcatctccatccctttcttcctg

SEQ ID NO: 267592 - DNA, 824 bp, Homo Sapiens
gcgggactcagagtcaccaccctcgggctgaaccagaaagaaggggatcaacctgaaagagtccaaccaatcgcatcatctaccttgatccattccgacctgacatccgtttatggcaccgtggtaatgaacaggactgttttattcttggggactggagatggccagttacttaaggttattcttggtgagaatttgacttcaaattgtccagaggttatctatgaaattaaagaagagacacctgttttctacaaactcgttcctgatcctgtgaagaatatctacatttatctaacagctgggaaagaggtgaggagaattcgtgttgcaaactgcaataaacataaatcctgttcggagtgtttaacagccacagaccctcactgcggttggtgccattcgctacaaaggtatctcctgaattctttctcaccaactcgcatttttgaaaaagtgtcatgcggcagaacacttgttgccctactttaacgatccattccagtgacctgagggaactgatctcttcctcgactaaaatcttgttgtgcaatcctaatgaattctcgaaggtgtttccagcggcgtccgtgctatgcaatcactggacccgggagctccccagtctcggggcgggaggggcaggtgtgcagccttcaggagaacgggagagagcaggcaggtttggcttttactttctccagagttcgccaaagactcaagagagaggcaaaagggccccccctccgagaagataaaagaatagagatgtctgaaaatttttcagctgaatccccatcatgtatgtcatgtattctgttaaa

SEQ ID NO: 267593 - DNA, 781 bp, Homo Sapiens
  misc_feature (389)..(389): n is a, c, g, or t
  misc_feature (416)..(416): n is a, c, g, or t
atgtcattgcctctgtgttgttcttgctcctctgccgtgctctgtatgtctttcttataaggggtctcattccattatcaaccagtcacttgtgcatctgtattacactcacctttaggctgctcaggtgcaggaaacactttatctgtcctttgttcagcaactagcagtcaattacacattgtaagaattctaaagtgtgcaaaattaaaatgccttttggtgataaaacaagctccatataaaaacagtctccaaagtggaatgtacaaagaaattattacaactgtcctatttttaaaaattcctatttttacatgcttaaatgtacctcatatatattgctgtagaaatatatgaaagtaatttaataaatacacatacagtcnagggtacatacttgcctatggttttgnattgaagtgtttgttcccctacaaaactccttgtttaaatttggttgccattgtaaacagcattgagagttaggacttttaagaggtatttaggttctcatcaagggagtgggttcgcccccttttgttctctctctgcctttctgcctgccgtgtgataccttccaccatactatcatgcaccaagaaggcccttgccaaatcccagtacgctgatactagactttccagcctccacaactgtaagccaataatttctctctttataaactacccagtctatggtattctgttacatcagcacaaacagacttagacaatgcttcaaacatgttttcctaatactgatgtgtaatcaaaacatt

SEQ ID NO: 267594 - DNA, 708 bp, Homo Sapiens
aggaagatggatctgtagaactggaatctcaagttcagaaagatggtgtagcggattctacagttatttcttcaatgccctgcttgttgatggaactgagaagggactcttctgagtctcagttagcatccacagagagtgacaagcctacaactggccgagtttatgagagtgactcctctaatcactgcatgctttccccttcctctagtggtcacctgggctgattcagatacgttgtcttccgcagaagagaatgaaccctctcaggcagaaacggcggtagaaggagacccttcaggagtgtctggtgccacagttgggcgcaagtctaggcggtcccgatctgaaagtgaaacttccactatggctgccaagaaaaaccggcaatccagtgataaacagaatggccgagtcgccaaggttaaaggtcatcggagccaaaagcacaaggagaggatcaggctactgaggcagaaacgggaggctgctgcaaggaagaaatataacctgctgcaggacagtagtaccagtgatagtgacctgacttgtgactcaagcacgagctcatcagatgatgatgaagaggtttcagggagcagcaagacaatcactgcagagataccaggtcatttggatccaggattcctagcaagtgacaaaacatctgctggcaatgcgccactcaatgaagaaattaacattgcg

SEQ ID NO: 267595 - DNA, 923 bp, Homo Sapiens
  misc_feature (404)..(404): n is a, c, g, or t
  misc_feature (407)..(407): n is a, c, g, or t
aataggatcatttgagcagtcctgtttctgtgtacgaacagcagttgcaaatgatggatgtacgtgaaagaaaaaagcatttgatctgtatataacttagaaagggtaacatttctaaacactgactttataagaaaacatgaaggacatcttacactcaacaacaatggtttaaaaggaggatataactgtctgaaggatgcagtggcagaatgccatggcctttgttttcaatttgctcttaacctatgttgggatgcgttcacactgctggggtttcctgcagaatctagcaccaatatatggatccagattttgtcttttgatctgagtcctctatgtcttcagttttgagtgtattgaggtatgttttctttggttgctgttgtaaagaatatgtagtnaanaaaaaacctgtaatatttacaacaattaaacattttagatttcagtgtcaactcttcacataagaaaaaattgaaaactctttaagaatcatcagaaggccattacttcctagcgtctgtcatgaaactgttttcgatacataggacaattagccgattagcacagctgtatgctttctggtccagaatcttccccgtgctcagcgggaaggcaagtcccgtgaccgctgtgtccgcggttcgccatgcttcacagtagttatccacaaggcggatgccatggggctggagccatgccaaatgactttctggggccaagaaggatctgtcattatgtctcgaccatcaaaggagtatattggaatatgcatattgaactgacctccgtggccagaaaaaattgagtcccaattattaaaaagtacttggcccttgaggttcactatgggaaggctgtatctctctgctttcctcacaatggtggacagatcttgcaaatgggaagataagaatgct

SEQ ID NO: 267596 - DNA, 711 bp, Homo Sapiens
agagctagcaccatgagcttaataccctgtatcaatgaaagaagttatcactatctctcctcctgcatgcttcaagggtcacacaagcataaagaaaactgaggttcagggaaggcaaagaacccacccaaagtgacatagccagtaagggagagagcaggcttaagtcaacagtcttctgttgatgtcaggaatgaaaactgcctccaggccctgtagcgaccaatgcatgcagaaggcaatgggaaccatatttatttttaccttgaggttcactatgggaaggctgtatctctctgctttccttcacaatggtggacagatcttgcaaatgggaagataagaatgctcggtaggtggacaacagtcctgcagctctggcctgcttgaagcactgaaaatcagctcgaatgtccccagaaaatggcatgttcagagcagccaaatgcagctgaaaaatgtgagacaaaagagagcagtcagaatcaaaggcaaactccagcccccagaaccatctcacattcctgcaaagattccagacttcttaggctggaaggcacgttggaggtcattttattcaatccctccctgacattggaattacagtctctgcctgaccatttccggggaaggagagctatggtctcccaagcagcctgtttcagctctctgaacagctctaagtggtagaaatgtcttccttaggtgatt

SEQ ID NO: 267597 - DNA, 933 bp, Homo Sapiens
  misc_feature (498)..(498): n is a, c, g, or t
  misc_feature (562)..(562): n is a, c, g, or t
tatgagagaatattatgcatctaataattgtgacgactatgtataaacatggaaaatatttaagatctgatgtttaactagcatatacactattattgtagctatgagaaagaaatactgcatatttagaaattaatatacaaaaatgaaaacaactatgtttggggacagtgattatgtacttttaaattttttttaatcttgttatctttaaacttttctaaaaatgatgtgattacaagcaatggctctttggggatcacctaataaatacctactaaattctaggacggggacaacgagctctgccatcctgcaatggctcctgtgacctagttccagggccattctgaatggacagaggtcttcacaatggaggtggagatgcagggagctctatggcatgaaatggttaatgattctcttttgtaattgtgttttctgtttgctgccttagttctaaaaggaggcaaaacaactgtggtttattctaccctnttcccaggcatagttcttcctcctacctttgtgatccccaaattaatatcaaatgtctaattangtttttttctcccattggtgatccccaaattaatatcaaatgtcagacaaagtaaatcaaaagtacaaataaaggtaaaactgctcttgcaaagggctaaaatagcaatgtttactagaagcattcaagagccagttcaatttcctatttctcattaagtggtaaaatagtaatgccaagaccacatcccagaatctccagggtaacagaggcccaacgaagggctgcagagaaacttgaaagtaaactggcttagttctttacacacagaaattgttctacaaagatctcttgcaaagcagtgtcaccagtagcatcactgccactaagccaatgtcccaggaattgaggaaaggaagacacacttaaag

SEQ ID NO: 267598 - DNA, 616 bp, Homo Sapiens
  misc_feature (169)..(182): n is a, c, g, or t
  misc_feature (199)..(305): n is a, c, g, or t
  misc_feature (331)..(446): n is a, c, g, or t
tattaagtactattgtatatagtagattatggcattgtagcattatagtatattattgcagtcttaacagttgggagtataatgtgttttagttccctgccagcccacagaattattcagatgaaccaataaaattttgttttgaaattcaaggcacatctcactttcnnnnnnnnnnnnnnctcctaaaagactctcnnnnnnnnnnnnnnnnnnnnnnnnnnnnnnnnnnnnnnnnnnnnnnnnnnnnnnnnnnnnnnnnnnnnnnnnnnnnnnnnnnnnnnnnnnnnnnnnnnnnnnnnnnngacgggtgtgcaccaccatgcctaannnnnnnnnnnnnnnnnnnnnnnnnnnnnnnnnnnnnnnnnnnnnnnnnnnnnnnnnnnnnnnnnnnnnnnnnnnnnnnnnnnnnnnnnnnnnnnnnnnnnnnnnnnnnnnnnnnngtgtgagccaccacaccaagcgtatctcaccttcttgatactacaaaaccttcctcagtcccctgtttgttctctttgctcccaagtgcaatccctgtgtgggcctgcatagcttacactactttcctcttcttgtctgagggaatgtgtaactaataaactgttgttga

SEQ ID NO: 267599 - DNA, 277 bp, Homo Sapiens
  misc_feature (11)..(11): n is a, c, g, or t
  misc_feature (138)..(138): n is a, c, g, or t
ccagccctgcnacccctcaacaaaaggctcccgtgaaccactggaatgaaggggggtgaaatgaaatcccctgaagtcccatctgggaaggtgaactcccaacccagaaattccaggccttggagtttgaaagtttgnccagcaggcaactaattcgtggtgttaagagttacctaaacttgcccttagcctcctgtgagtgggtgttggctcccaagcactaggatggtgtagggtacacaatttgggtgggttggccaagcacggtggctcacac

SEQ ID NO: 267600 - DNA, 544 bp, Homo Sapiens
  misc_feature (28)..(28): n is a, c, g, or t
  misc_feature (38)..(38): n is a, c, g, or t
  misc_feature (47)..(47): n is a, c, g, or t
  misc_feature (56)..(56): n is a, c, g, or t
  misc_feature (80)..(80): n is a, c, g, or t
ctccttaaaaacccaacgaaattaagtnccctgctggnaaaaacttnaaaactccnaaacctgaaaaatttctggttggnaagtcaccctccccaaaatggacctcaagggaattcaattcaccccccctcatcccaagtgctcacggaagccctctgtgaaggtgcaagccccctggagaggagcccctgtggccctcaagcaaaagggcaaggcaaggctggtgaagcacccccaaccctctggatcgaggggacctcaattatgcgggataaaaggcccccctaatccctcctcagtgcttcccaaactcactctgccttctgaaagggatccttccgtacccctgggttcagagagtaggaaagcccgcagggaccgagtatgcatgaaacaagcccaagtctgtgggggctgtacatggtcaagatcacagatttccagaccaagccagctccaccctagctgggatgcccaccctgagacacccctctctgctttcactggaataggatgccctgacttggccgggtggactgttgaa

SEQ ID NO: 267601 - DNA, 735 bp, Homo Sapiens
  misc_feature (16)..(16): n is a, c, g, or t
agtaaaaatggtatcncatttgttaattttaattagctagatgttgggacagaaatatgaaggccgcatagtctgtcagtattttaaaagaactcagtactgaacggaaggcaaggacatgaagggagcacatgttagtgtaacttctttacagatagaaatgtaattctcacatagaagactcatttagtatgtagttttcatcttggcaaggaagactgctctttctttctccataatgggtaatttctaaatctttcctagtctaggtcatggaggccaaatactattgtgggtcaggtgggtccatcgttttcttaggtgactgtatcacataagtctgaaatgtaattttaaatatgagataataatatcaccttctgcttagctatgactacagtcctagcacccaaaggaggtcagaatttccccctttaatatttagtcccaactttactgttgaaagcatttgtagattgagtgttttttgtattatgaatcgggtttagtctctcccaaggcaggaagttttcaagtattacattttttaatacacagcaggtggattttgtctgaaagatagttttatgccaggatattgtacttgtttcactattgaactacagaaccttagaattattttaaagattggaaaggtataacctgtctcccatgaaagacctttgtagtggtaaatttgccaaccttgttaattttactcaaactttgtttttg

SEQ ID NO: 267602 - DNA, 803 bp, Homo Sapiens
  misc_feature (324)..(324): n is a, c, g, or t
  misc_feature (538)..(682): n is a, c, g, or t
gttcatcagatttttcatttaatttcataaatcataccttgctatctttattatttagtactaagtgattcctttcattccacgccatgcacttttgaaacttgcctcaatttgggggtatcccctctttacagttttcttatgaacattataaacctattctgattctttaaccttgctcagtatatgaacaaaagttgactcctgatttacaaatgtgtgggaccttagattttattcgcactgagtttggaactgtattttctcacagaagtcaagtccaaaagaacaatattaataatggacttaaggaaaaacggttgnagaagaataggaggcataaagggaaaagaaaggagtaagctaatttaaaggtttttggatactattcataacccattaataataataaaaggataatgacttcttcttgtggttataggaagacaggaaatactgatatttaagtggtcaactccctttagtaagaagtacagctttattttgatgtcaagttttcaaaaattttataaattannnnnnnnnnnnnnnnnnnnnnnnnnnnnnnnnnnnnnnnnnnnnnnnnnnnnnnnnnnnnnnnnnnnnnnnnnnnnnnnnnnnnnnnnnnnnnnnnnnnnnnnnnnnnnnnnnnnnnnnnnnnnnnnnnnnnnnnnnnnnnnnncatgtaagtaaattaacaagataactatatattgtgataactattttgaataaataagatgttaccactttaaggaggtaacatcagaattcagatggaaaatgtaagcatatttttcttg

SEQ ID NO: 267603 - DNA, 808 bp, Homo Sapiens
  misc_feature (246)..(351): n is a, c, g, or t
aaaagatggaggacaggtaggcagagatgtaacggaaccatgttattttactcaaactaatctttgtcatctattttcatgtttctacccactctatgttttagagttggaatgtattgtgactgaaagttacctaattatttgacctatgcaagaatattgaaacatctcttggtattgatctatttcacaagtcagccaatttcttttttggatatctttttctattagaatatttttcatctnnnnnnnnnnnnnnnnnnnnnnnnnnnnnnnnnnnnnnnnnnnnnnnnnnnnnnnnnnnnnnnnnnnnnnnnnnnnnnnnnnnnnnnnnnnnnnnnnnnnnnnnnnttataaaatcttgacttattgagtacacctgaataataaatttatattctctcttgtcaatcatccaaggtataatgcatagagcagattttgtttctccatcaccaccttttagtgttttaaatagtagtgttgcctttctggttctgcagttttggtggaaattttccatccataacaaacagtcctgattaggtaattcataaaatttattattttctaattggaatattgctattcatacactaggttcatgtattttgttggtttatttgtttgtttagaagagtaactcatgcttattgccgaaaagtttaggaaataaaagtataaagaagaaagtatgtattgcaagtccttactccctttaatctaaccaccattaatgggggtttctatatttatgtacattctttaacaaaagtggaataaaattatgtttgctattttggaactt

SEQ ID NO: 267604 - DNA, 546 bp, Homo Sapiens
  misc_feature (514)..(514): n is a, c, g, or t
cagatgaaatgagaggtcactgagatgtattaagcggagaagggaaataatctgtttgtgttttaaaagactgctttagacactcatattagttaattattgctgcacaaaaaattaccccaaattgatttacttacaacaacgcacatttattatgtcatagtttctgtaggaattttgcaagcagtttagctggatggttctgactcagggtctctcatgaagttgcaagtggtatgtcagctgggacttgactgaaagtggagaatccacctccaagcccacttacttagctgctgtaggagccctcagttcctcactatgggtttctccatgggcctgttcacagtgtggcatctggcctcctccaaagtgagtgatctgagagagtgtgggcaaaatggaagtcccagtgtcttcttatgacctagtccatgaagtcccccactgtcactgccttattcattagaagtgaatcactaagttcagctcacacacaagaggaaagacattnaagctccgcctcttgaagagaggagtataaaa

SEQ ID NO: 267605 - DNA, 477 bp, Homo Sapiens
  misc_feature (174)..(222): n is a, c, g, or t
  misc_feature (262)..(426): n is a, c, g, or t
  misc_feature (433)..(433): n is a, c, g, or t
atgtctttcctcttgtgtgtgagctgaacttagtgattcacttctaatgaataaggcagtgacagtgggggacttcatggactaggtcataagaagacactgggacttccattttggccacactctctcagatcactcactttggaggaggccagatgccacactgtgaacagnnnnnnnnnnnnnnnnnnnnnnnnnnnnnnnnnnnnnnnnnnnnnnnnnagtaagtgggcttggaggtggattctccactttcagtcannnnnnnnnnnnnnnnnnnnnnnnnnnnnnnnnnnnnnnnnnnnnnnnnnnnnnnnnnnnnnnnnnnnnnnnnnnnnnnnnnnnnnnnnnnnnnnnnnnnnnnnnnnnnnnnnnnnnnnnnnnnnnnnnnnnnnnnnnnnnnnnnnnnnnnnnnnnnnnnnnnnntgagtgnctaaagcagtcttttaaaacacaaacagattatttcccttctcc

SEQ ID NO: 267606 - DNA, 437 bp, Homo Sapiens
  misc_feature (252)..(273): n is a, c, g, or t
  misc_feature (370)..(370): n is a, c, g, or t
caactcaccaagcctggacagttcagtggtttttagtatatgcacagagttgtataatcatcatcacaatgaattttagaatattcttaccacctcacagccctaggcagccaccatgggtttgcctgtcccagacatttcatgtaactggaatcatttgtggtcttttgtcactggcatctttcatgtaccatatttttgaggttcttccacgtggcatgtgttagtacttcactcctttctataactgannnnnnnnnnnnnnnnnnnnnnggagacagagtttcactcttgtcacccaggctggagaagcaaatggtgcgatcttggcttactgcaaccctctgcctcctgggttcaagccgattcncctgcttcagcctcccaaggtagctgggattacaaggtggatgccaaccatggccgggctaatggtt

SEQ ID NO: 267607 - DNA, 706 bp, Homo Sapiens
atgaagaatataaacatcactattcagtcttgaaggttaagacaccagttctgtaatgagctaggtttgttataacaaaaacccccacttccttcaacaaattctcaggagaaaaataacattcctttttaaaagtatgtttatgcaaacaatgggtttaaagggtggtttgatcacttttttaaaataaacttaaaactgagctctgagtttcagagactgggcaagatcatagtaacacaataagggagtgaattggatgaattggtgcctcatgcctttttgatcagcagaatttagtcactaatcctttcaatagaagattaatctgaaggtttcatttccctgaaggaagtttgcttctttcaaagtttgtgctttttcactgaggttagaaactgaaacatcctaacttcctaatacaacagatatctactgctggaggctcaccagctccttccttcacttcactatttgcccaacgaagacagattctgatcaaagagggacaagccagttgagaaattgctgcagcacattctccccatgcccttagaaattgttatgattgtcccagaaatccaggcttaaatgatactcaggtgtaatattcaagataagggtctgggagaatataaaatattaatttgagggtgaatcaatctaattcagtcattgtcttggattgtccgactaagtataatgt

SEQ ID NO: 267608 - DNA, 672 bp, Homo Sapiens
aaagaaagaggcagtataggtctccttggtgcagacaaaggtactgatggcacagaagtgaagaaacttccagtgaaacacaagccccaatctatgtgactgggctccttgctcttccctgggccttcctccacctcccagctcctggcagggacgctggaccacacatcatttggtagaatgtccccgtgactgggcatgagccagcagtttactaagcctaaatccatatatcttcatttaaaaaacagactagcaaaactttccattttgtaagaagtataattctggtgcctttaatatgtccattttcaaaggcaacgccatactattaatatttattagaaacttgacctagaattttcaaaagaaacgattatgtttggatgtatatagtaactaggtagtttgaatattaattttcaaagctggaaatactatacaacaataaatatctcctttattgttggtcttttacattgagtttaaatctattaatattagccttttgctctaatcccctttctcctgaagtgattaaaaactaaatgtctttattaaagcagatataccctttatttccagtaatagtacctttgaagagcaagctaattaattctttctaactgcttaatgtaaacaagaaatacaacagttttgtgagtattgctg

SEQ ID NO: 267609 - DNA, 449 bp, Homo Sapiens
ggccgcttaattaatattagggagcagtattatctgcatttacttcatgaagatgcataactttcagatcttttaggatgatgtgtttggtttttttcctcctttgtgaggattattaggatattaaccgtccctcttaacacacgggaacctataccatatgtgaaaattaaaagtcaattatttgagcactcaacttaagcagtagttggggaaagaataatgtcaaagaaataacaaaacatttggctgggtgcagtgattcacacctgtaatcccagcactttgggggctgaggtgggcagatcacttcaggccaggagttcgagaccaacctgggcaacatacggaaaaccccgtctctactaaaaatacaaaaattagcgggtcgtgatggcgcgttcctgtaattccagctgttggagacgctgaagcagaattgcttgaac

SEQ ID NO: 267610 - DNA, 519 bp, Homo Sapiens
  misc_feature (47)..(47): n is a, c, g, or t
  misc_feature (50)..(75): n is a, c, g, or t
  misc_feature (424)..(424): n is a, c, g, or t
  misc_feature (460)..(460): n is a, c, g, or t
  misc_feature (471)..(471): n is a, c, g, or t
  misc_feature (498)..(498): n is a, c, g, or t
gatgaaatcaggaaatcacgcctcagaaaatgtttcttgaggggtgnggnnnnnnnnnnnnnnnnnnnnnnnnnnttaatatgactatgtgtgatgtgcattagaaaatcagcaagtaaataactgttgctatgtattgtgagaaagatgggaccaggccaagaaacacaattaaaaggtggccctggccccactgctttcctggaagaacagtatctcataagcttgtgggtctcgtaggggtatggactgagctgcttagtggtaggaaaaatcaccaggggcagtgaaactgaagtcccagctacatttcccagctacgtaaatgttgatcctttagatctggccatttctgcagtgtcaatccacccactgagcccagccctaaggagaaagactgtgattggtaaggatggatacactngacaataataatatgagggtagggtattactattcnctgttttaaangaaactttaaatcacttgtcccagggncatatgcttaggtgaatgctg

SEQ ID NO: 267611 - DNA, 471 bp, Homo Sapiens
  misc_feature (22)..(22): n is a, c, g, or t
  misc_feature (27)..(27): n is a, c, g, or t
  misc_feature (362)..(409): n is a, c, g, or t
tttaaaatgaactatgtgtgangttgncattagaaaaatcaagccaagtaaaataaactgttggcctaatgtaattgtgaagaaaagaggggacccaggcccaagaaaacacaaattaaaaggtgcccctggccccactgctatccctggaagaacagtatctcataagcttgtgggtctcgtaggggtatggactgagctgcttagtggtaggaaaaatcaccagggcagtgaaactgaagtcccagctacatttcccagctacgtaaatgttgatcctttagatctggccatttctgcagtgtcaatccacccactgagcccagccctaagagaaagactgtgattgtaagatgatacannnnnnnnnnnnnnnnnnnnnnnnnnnnnnnnnnnnnnnnnnnnnnnnaacttaaatcacttgtccaaggtcatatgcttagtgaatgctgacaccagaattcatactca

SEQ ID NO: 267612 - DNA, 972 bp, Homo Sapiens
aattcggcacgagtcggcacgagtgatgtgaagttgaaacacaaggacgcggaaataaaaactcagagtataaatatctatattgttaccattatctgggataattgatgatttataagaagctgaggtttcgtcttcctagaaatggacttttattaggccagcaagaatgaccacttagccatttaaatgatttgtcagcatcttttgctgctctcttctaagaccattggttttcactaaaggataaatacctgctaagcaaattataaaatactataagacatttaatctcctggaagaggacttgctgataattggatcaaagttccagcattattgctcttttcgaattcatatgggacttagtgttctcatgaccgaggagttcacatttttagcttgctaaaatattcactggagaacatggtcaaatccacgagtggaaacgttccatggtattttcaaacgccacgtgtcaggaatttggcatgccttcctctgggagaggcactggagtgtggccagatggaacccagcagggtacagagggcatttgtgggagcagttaggaaaccaggacgtccagcttctgcctgccagggagctcgctcatgttgtctctgaaatttgcataagagcaattacctcatattctaattttaaagatacaatttttaaagacatggaaggctctgaggcctcctgaaggctattcctatgtgaggtattgtttacgggtggcctttcactatttccaaatcagcgatgaaaagaagactgagtctaaaataaatgaagcaacagacttcagcagcctgagagaattttgttcaattccagtctccttaaaaacaaaatcggtttttgctttcaatttaggaaaattgttttgggttgcattgttgaaagtaatgatttctagcagctacttatgtataatctcttaaccaattaaattctgaatctctt

SEQ ID NO: 267613 - DNA, 749 bp, Homo Sapiens
  misc_feature (282)..(282): n is a, c, g, or t
  misc_feature (668)..(668): n is a, c, g, or t
cttcggtaaacgttacttatgtgcgtctcataaatcaggtgtctgagttctcaggctgtggctgcagtctaccattgaattacatcccgtgagcaatgttgtccgatttcaccggccagcacgttcttctcgagtgtgggattggtttttgcaagacctcgaaaggattttgataagccacctgcttaaggccggctgaaaaagaagaaaggagggcatatgtgggtcagctcactcggaatagaagaggaatcagcttttcttgtgcacgtgcaacagtgngaagtgattgctgactgtgtgttggctccataagaagaacatcacagaaagcaaaatggtgccagctcaacaccagtatcctcggactcttcagacagaaaaacctgttaattccaatcacaattcattctttcattcagctcatggaagccaagcagggctttgggacattcattctggcaaagtgaaacaactgactttttgtgaatgctatttaagttgtttaaattttccacattggaaataaagtcattgcatttttgtgaggataaaacacaaattgtggtggagtccagcgtcatggtaacaataatattcctactaaattaagacactaatgaaacagaaatgtgattggaacaggtcatggtgcacacacaatttgntattgcatataaataaatgtcaatattctataaattgacatttatagacgtacgtgacaaaatttaccaaaatggtaaaac

SEQ ID NO: 267614 - DNA, 542 bp, Homo Sapiens
aattcttgagcatcatgcctagaacagtttcacagatgcaataaaacacgtctatctggctctcaaaagggaggcctcactgggaggtcagacattggttaagtctcatggttgagggtctggtccttgggaatgcaggtttagaaacatctcaatttattcgttggtgggggtaggaggcagaggaatatcagaagaggggaaggggggcaagccttgaaggtgcattcacttcggtaaaatttacatatctcacaccaaataaaatactgcctgagaaccaaactacttacatgtgtctattcagaatattaaaatgcaaattaggtttttggtaagcatagaacaagggaaagttaatattcttaagggatgtttttgcaaattatagcagcataactctagtaatgctgttaattttgtataaatcagtgttttccaagtttatttgatcacagaacacttgttatcaaaaatatcttttaagaccttgtaaaagatcttggcaaattcctataaaattaacaggaaatttacaaaag

SEQ ID NO: 267615 - DNA, 488 bp, Homo Sapiens
  misc_feature (345)..(345): n is a, c, g, or t
  misc_feature (434)..(434): n is a, c, g, or t
  misc_feature (440)..(440): n is a, c, g, or t
  misc_feature (446)..(446): n is a, c, g, or t
  misc_feature (467)..(467): n is a, c, g, or t
gaattcttgagcatcatgcctagaacagtttcacagatgcaataaaacacgtctatctggctctcaaaagggaggcctcactgggaggtcagacattggttaagtctcatggttgagggtctggtccttgggaatgcaggtttagaaacatctcaatttattcgttggtgggggtaggaggcagaggaatatcagaagaggggaaggggggcaagccttgaaggtgcattcacttcggtaaaatttacatatctcacaccaaataaaatactgcctgagaaccaaactacttacatgtgtctattcacgaatatttaaaatgccaaattagggtttttggtaagncatagaacaaggggaaagtttaatattccttaaggggatggtttttttggcaaaattaataagccagcattaactctaagttaatggcntggttnattttngtataaatccaggtgtttttnccaagttttaatttggattca

SEQ ID NO: 267616 - DNA, 741 bp, Homo Sapiens
  misc_feature (490)..(490): n is a, c, g, or t
gtgggtattaagaatacagcttcacatttattcatcattgtccattcactcattagttcatgcaaccacaaaaaggtattataagaataatatttcatttctgaggtaaggaaattatcatctagtatgtttttatataacctactattcacaatgacatgtagaattctctctgttattcaacatatgttcttgttcttcaaaatctgcaatatctgtagtctgattcttggagactggctcaccgcaattgtctagcagagctttagaccagggaagtgccacacagcaagtagtttccatcacagtcttaggctagtttattcctgaaatcctcccatatcttacaggaaagagccaatgaggtcttttgtaaaccactcccaggagggtgatggtgagcactattattccacacaccaggctgaatgcccatcgtggtccccagtgagcatacacttggctgatgaacataggccccaagaatccngggctcccacttcccagatgctgttaaccagccccatgtatacaccctgaggttttggtccctagaatttttgaatatagagtataggacataagattgcagactggatagcctaatcctattagcacagctgatgtaaggaactgggccagatgaatcaccggggtgtagaggcaccaggcttgttcaatcgagcaaccagttggtctttcattgtcatcttccattggagacttccaaagaccaataat

SEQ ID NO: 267617 - DNA, 1263 bp, Homo Sapiens
gggcacgagggcccgcctcctatcagcagatcgggagccgcaagcatgccttcaagcccaaagcaagccaggaaaatgagcattcaggacagcctggcgcttcaacccaagttaactagacacaaggagcttgcatctgaaaacatcaatttgagaactaggaagtactccagcagcagcctgagtcacatgggagcctacagccgatcacttcccaggttgtacagagccacagagaaccagctgacacctctcagcttgcctccaagaaactctctgggcaattccaaacgaacaaaacttggggaaaaggatctacctcatagcgtaatagacaatgacaattaccttaatttttcttctttgagctcaggggctttaccctataaaacctctgcttctgaaggcaatccttatgtaagttctaccctcagtgtccctgccagtccacgagtggcttcggaagatgcttctggcctccacctcctcctgtgcctctgatgactttgatcaggcttcatatgtggggacaaacccgagtcattcacttcttgctggagagtcagacagagtttttgcgaccaggaggaacttctcttgtggatctgtggaatttgatgaggcagatttgggaaagcctcagaaaggcctcaggaacccccaagcctgcccttcgggaacggaaaagcagtattagctccatttcaggacgtgatgacctgatggattatcaccggcggcagagggagaaaagactcaggaagcaggaaaaggagcgattggagagacagcgtctgaagaccatcctcagtctctgtgctgaatacacaaagcctgacagtcgcttatctactgggaccaccgtggaagatgtgcagaaaatcaacaaggagcttgagaagctgcagctctctgatgaggagtctgtgtttgaggaagccctcatgagccctgacacaagatacaggtgccaccggaaagactccctccctgatgcagacttggcaagctgtgggagtctcagtcagagcagtgccagcttctttacccccaggagcaccaggaatgatgaactactcagtgacctcacccggactcctccaccaccatcctccacctttccgaaagcttccagcgagtcctcttatctaagtatcctaccaaagaccccagagggtataagtgaagaacagagatctcaggagttggctgcaatggaagaaacccggatagtcattctgaacaaccccgaggaacttaagc

SEQ ID NO: 267618 - DNA, 621 bp, Homo Sapiens
ggcagagacaaggttttgccatgttgccaaggctgatctcggactcctgggcttaagtgatctgtccatccctgcttccgcctctcagagtactgggattataggtgcgagccactgtgcctggtccccaaagtaatttttttattgtccggcttctcatctgtttcccagagttttcccattcactaggtcatttaattcttaaacaaatctaggtaaggtggatagtgacaaatcaactgtggtgagtacttgtatcacgacatactaagtttagtttcctgatattcaaagtagaaatattccacctacctctcaagactgctgcaccgaattggttgacctcagttccttaagcccatggaacttgctctactgtgagagcactgtggaaagagcaactgaccctgagtagtaggattggaggagggaaggaggtcagcaacagggaactcatagtggaaagcaagacttgtaagggcagagtgagaatgtgggaggacattccaggaagaagaaactggatagtcgagagcccagagttgagacacactgggaaagtagggaattacagattccttagtcgacctccagaattagaaatcaagtctatgtaagctt

SEQ ID NO: 267619 - DNA, 770 bp, Homo Sapiens
gtatagtgattatatagttagtgttacacctgcagacacgaccccagccattgaaacccttgactcttagaaatgtcaacaggtattaaccatgtcacttcacttaatctgctctttagctggtttcagggatggttaagacttctgagaaccatactgggtaaaaaaacattctggatatgacttaatacaatactaaattcagcttcagtgcaattaatgtatttacaggaccatttttcctctatttacatgaaacagccctaacggctccacagcttatgggcacaactcagccaaagtattgttttgacacagctgatgcttctgtttgccaagagctgccccagaagtttgcatcatatttacagtggcaaacctgtctcaccatgtcagctgctggctaagcagatagcaaaggaagactaggaccaaagcaaaaaatggtcccaaacgggcttcctatctctgtgcaagagagagaacatttccgacaccctaaaaggcaccaggtcacctgttccatttttggtcttttgcatttttaaatgattttaagtcctattttgtgggcacagactttgtaaaaattatgttcagagctgtacccgagtcacacaggcaaattacagtcactgaagaaaaattgctttggcctcagtaagcaggtatctttcccaaaaagtcaaaactactacagcttagaaaaggaaagaatgtgtgctattgagttgtctgttaaaatcactatgtatgtgtgtgtgtatgtg

SEQ ID NO: 267620 - DNA, 599 bp, Homo Sapiens
  misc_feature (334)..(334): n is a, c, g, or t
cctgtccattgtagcaggcgatgtgaagcgctgtatttccatagacattgatttcatcaatctccacccacaggttcaggagatgcttgacaacattaatctgtccattggagagctgcagcatgcagaggggtataacccttcttaatccttacaggtcacttctgcgccatggttaatgagcaatgctacaacatccaagtgccccatgtatgctgccccagtgcagagcacgccggtccttcttgtcaaatgcattgatattttgcccctttggccaaagagtaaattgaccatcttccacgtggccgttcagagccgcatggtgcagagnctgtgcgcccccctcggtcggagacattgacactgctcagcaggggaatgatcacttctgcacatttgacagccttgttggctgctgccacatgaagaggggtctgccagttcttgtcccttgcattgacatcagctgagtgcttaatcaaaacctgtactgcttcttcgcttctggaagcaacagcccggtgcagtggagtcagccacatgttgtccttggcatttacacgagctcctgacaaaatcaggagttcaatgatctc

SEQ ID NO: 267621 - DNA, 317 bp, Homo Sapiens
  misc_feature (275)..(275): n is a, c, g, or t
ggcacgaggggattacagttgtgagccactgcgcccggctgcttatttggaaaggaaaatctttccaagatggccctaacacatactcccttgggtctcattgacctgagctggtccatcctcaaaccaattcctggtgaaaaagggacaggcttgctgtggttggcgctggttggctttggccagtcttgcatcatctgccaggactgggtccttagctgcccaaacaaatcaggattctgttggcaagcgaaaaagagagtggccgctggtangacagccaacagtgtctgctacagacggcaaaacacagagac

SEQ ID NO: 267622 - DNA, 572 bp, Homo Sapiens
cagaaataatagttctaaaaaataactttgctttctagctgtaatgtttctctccctttagattttgtttcctttccttcccatttcagcacaatttacactatttacattatttttggcaatgtgtctggagcaaaactacatctgtttaatggttttcagttttcagtttgttttcaaaataataacaatcttttttcttacattacatgcatgccaaaaaaaatattgtttagatcatattaacccagcttaaaaattaagcagtccacttgtaggctcttaaccaataacatatcatcttagggtggttctgttcccagccaacaaacatgaccgaaaacccactggaagtcaggccctgtcctaggtgctaggactacaagacatgcccaagccatgggcctagaattttatagtttaaagcagctatctgaatcaatgttttattatctgtgtgaagataatagagaagtggtgtgaataaccaaaagcaatcctatgcctgactcaaaaataatatcaatcattaaaggagactgtcacatggagtcattcatgctactccactg

SEQ ID NO: 267623 - DNA, 740 bp, Homo Sapiens
  misc_feature (635)..(635): n is a, c, g, or t
  misc_feature (653)..(699): n is a, c, g, or t
ggagggaatggctaaccggtcagcagacgtcacaggatgtatttgagctgagtcttgaaggggtgaatgttttgtaattaataattaatgagattttgttactgatggtgcataacatttattgaatattcacaggctctgtgctaacggctttgcatgcttttagtcctcagaactgccctctacggtatagatagtattcctaattccatcagatcaaggacatggaagctttgaagagttaggaaaatgtcctttgatcacatagtagaaaatagcagagctggggcttggacctcaggtctttctgactctaaattccacagccttaactgtcacattatgttgcacaaagtccatccattctacctagggagaaagatggaagagacttcatggggcgagtatttttggcaagtttttaggcacgaaaaagacaaggtagaagaaagatattcttggtaaagggaacagcatttgtaaaggcgcaaagttagtggttccactctgctggaactggagtagaatttctaaaatgtggtcagaatcatgtggaccacatgtcaaaattcagattctgtgacacctttcccagatacactgaattaatatctggaggtgagaagcacaaaagnttgtatggttttctccannnnnnnnnnnnnnnnnnnnnnnnnnnnnnnnnnnnnnnnnnnnnnngtgtaacacatagggttgatggtgagtggaaagaagtgagt

SEQ ID NO: 267624 - DNA, 656 bp, Homo Sapiens
taattggagaactggcagaattctttaggcaaatttaaatgtaatgataacatcagtctgtactttgagacatttcttagtactttctagattccaaaaaagacattaaaagcatctggatatagcaggagtaggcagatcgttgcttgagcaccaacaaactggcacccgagacagttgcttccagcatccttaccctcctggaagatactgggtatttttcctccccatctcttaggcttttattttctcctacgcctacttcttttctctctttttctttcccctgctgtctgtgcctcttgtcacttgccaatgacagttgtttagccccagtcacgacagaattcaaaagacagaataccttgagttagtggcaaggtttcagcgatgctttcttggaggtaagaatgagaagcatgggcatatgcataatttaattttcactttctatgtgtcatccctatgtaaaaagattttgtagaaatagtattaaaagagacccagctttgaaatacattaccaagggcacaagaaatacaactgctcataatctattataaaatattgcttgctaatattttaaaaatacagttcgcattttgaattttactgggttaaaaagaatgccttttcagagtgaaaagcaaattctt

SEQ ID NO: 267625 - DNA, 579 bp, Homo Sapiens
ggccgcttaattaatatcagttatctatctctggcctcatctctctccatttttctacctctgcctcctatagaagctgtgaaacatctgtgggtccttagttctctcttctcaaagtaaagagcaggattaaggcacattcaagctcatatgctgctgctacatcctaggagtaccactctgtgtcaggctggagtctcttgtaggggtagaggaagaaccagatgtctgcccttccttcctctgtcaggcaggccccagccccctgtccaatagccagccttaatgatctacgggctggctgtttcctaaaagataaaatggacaaatgagtaaacaccttctggagaaggccacagccagaatcaaaggtttaggttagtaagtgtggcagcaacatcaacagcataacagcagatggcagggttgctccactgactctacatcaggagcctgagacccagaagaaagttaacagcacttttgttgacattatagagtccatgaagcctttaaactaacacccttcaatgttatctgacactaccagtgtgtggcaggcagggtgagggctcttta

SEQ ID NO: 267626 - DNA, 688 bp, Homo Sapiens
  misc_feature (107)..(119): n is a, c, g, or t
gaagagaagagaggagaaaagaagcgaagcgaagagaagtatccgcatatactttaagcatcacaagaagaaatacctaccaatatatggcccaaatttggggtttnnnnnnnnnnnnnctctaagctagagacatgctttccaaatgtacctttttaaacataggcagtggtgtgcctaggacttaagaatacacaggagagacataatgcctgcatttaatctagagtaatttaaaatactgttttatttttaaattcacacacagtaaaaagtgaaatgaaaagtgctttgagcattgtgttttttttaaaagataacctagactttcaagagatttcactcctcccctggggctgccttccgggtatattcctcagacttaccagctctccctgccagtccaaccacactcccactcccacgcccaccatgagttcattctggcctaaaattaggagtatttctgtagaggagtgtgaaatgtaaaaagctagatattattatatagaaatattcaattgcatttaaaatttattagcagtagttaccaataggattatcaataaacaagaaagcagcaactctggagtcctgccatgccaggcatatcctagactagaggaattcactatttagaaagacttgaaagtcctaagtgccacaaagattagtttcattgggacta

SEQ ID NO: 267627 - DNA, 399 bp, Homo Sapiens
  misc_feature (289)..(326): n is a, c, g, or t
tgagccaccatgcccggccaggattttccactcttgaagggagtattttgttgtcacttcaactcgctgttttttttccagacaacctcaaatatgaccacactacagcctgtacacaacaagacagtttatcttgtccatggggtaagtgtatgcctgatctttttaattcagtacaatctctgaaggtgttaacactaatgttttacaagaatgtagaggcgactcggtgctatgaagcgtgttaaacaactcacgacgaattgctacaaaacaccagggaggggcnnnnnnnnnnnnnnnnnnnnnnnnnnnnnnnnnnnnnnttgtgagccatagtaggcctagagagattactgggtttttataattaaacatttatttcggtgaaatcaaaaa

SEQ ID NO: 267628 - DNA, 772 bp, Homo Sapiens
  misc_feature (189)..(189): n is a, c, g, or t
  misc_feature (631)..(642): n is a, c, g, or t
ttgaaatgcactttttgcccttccacccttctatcacaatttgaggcagcaagaaggccctcaccagatgttgagcaaattccaatgtcaggctcttggacttcccaatctccagaaccatgagccgaatgtttcttttttaaaataaattatccagtccggtgtcttgttacagcaacagaaaatagnctaagacaagaattgaataaaattgaataaatgtttcatgttatggtttgatacaatgggttctgacaactttattaatgaatgcacatcaaatctgaaagaaccatgtgaaagtttttatccttgggttctatctgtctactgcgccttataaaaatttggcattcccaaaagccattctggttacatttaaaataatcagcatggcaaatctatactgctttagctcttcccaagttacttttttcccccagtcaagatacatccctagggaaggatattgacaataatgggaaataattgattataattatatgtaagaagacatttttggcattcagtgccttctactaattttctttgtttcactctcccatggctttccctcaagagcaagaaattctttgacaagagtcaggaagagaaaaccaaaaagccgttnnnnnnnnnnnnttgttaccatcactccactttatcatacatctgaattctgaaaatgtatttgtgagtccaagacacccaatttcctatgttatctagacatcatagatcaggctttaacatgtgtataagagcaaaagcc

SEQ ID NO: 267629 - DNA, 773 bp, Homo Sapiens
  misc_feature (631)..(631): n is a, c, g, or t
  misc_feature (674)..(674): n is a, c, g, or t
  misc_feature (680)..(680): n is a, c, g, or t
  misc_feature (724)..(725): n is a, c, g, or t
  misc_feature (740)..(740): n is a, c, g, or t
  misc_feature (762)..(762): n is a, c, g, or t
cctggatggcatgggattgagctttcgtctgtgcagaattttacagacagactcatgttctgccaggcagacattcagcccttgatcttctcacagtcgccattgtgaaggagagcaagccctttctccacactctctgtggactactttctaacttttctattgtcatgggagaaaaatttaaaaaactgattaaaagggggcaagtgcatggcttctatgaaaactctaccgctctaaactgtgggactgcttgaaactgtttgttttggctggcctcggtggcaagactgacatatttatgtagcaagctcacatgtaatatttaacttggaattttacacataggaatgatgaactaaacagaatataagggtttgttgttgttgttgtttccctgcttgttctgaaatgtgagaaaatatcgagttgacaagtttcaacatggtcacctcttgcttggccagcacgattcataattagccaaattccttgataatgctgcagagattgggcactgagcagccgccacgtttgctatgcaagagagttaataaaatttttcagtgctggaggaaagcttatatacagtagtctgtttgtcctgtgtttccaccacctgagtcacagncaaaaaagcaattgtctactacatatttcaaacagatgctgangggtanaaagggtgaccagaattcacagcaataaaatcccgctctctaanntcccttgaaggaagngaactcataaaatttttgctgntgacttatttg

SEQ ID NO: 267630 - DNA, 1166 bp, Homo Sapiens
  misc_feature (304)..(304): n is a, c, g, or t
  misc_feature (1037)..(1037): n is a, c, g, or t
  misc_feature (1048)..(1048): n is a, c, g, or t
  misc_feature (1108)..(1108): n is a, c, g, or t
tgcattggagttccctggcctggggtccctggggcttcagagcccctcccccagtttgtggatcctgctctggtgtcctccacaccagaatcaggggttttcttcccctctgggcctgagggcttggatgcagcagcttcctccactgccccgagcacagccaccgctgcagctgcggcactggcctactacagggacgctgaggcctacagacactccccagtctttcaggtgtacccattgctcaactgtatggaggggatcccagggggctcaccatatgccggctgggcctacggcaagnacggggctctaccctgcctcaactgtgtgtcccacccgcgaggactctcctccccagggccgtggaagatctggatggaaaaggcagcaccagcttcctgggagactttgaagacagagcggctgagcccagaccttcctgaccctgggacctgcactgccttcatcactccctgtccccaatagtgcttatgggggccctgacttttccagtaccttcttttctcccaccgggagccccctcaattcagcagcctattcctctcccaagcttcgtggaactctccccctgcctccctgtgaggccagggagtgtgtgaactgcggagcaacagccactccactgtggcggagggacaggacaggccactacctatgcaacgcctgcggcctctatcacaagatgaatgggcagaacaggcccctcatccggcccaagaagcgcctgattgtcagtaaacgggcaggtactcagtgcaccaactgccagacgaccaccacgacactgtggcggagaaatgccagtggggatcccgtgtgcaatgcctgcggcctctactacaagctacaccaggtgaaccggccactgaccatgcgggaaggatggtattcagactcgaaaccgcaacgcatctggaaaagggaaaaagaaacggggctccagtctgggaggcacaggagcagccgaaggaccaagctggtggctttatggtggtggctgggggcaacggtanggggaattttngggaagttggtttaaggcttgacacttgggccccccaggtacttgcccatcttcttaccnaaggcctggggccctgtggttgctgttaagggcctgttaagccaccttcatgcctttt

SEQ ID NO: 267631 - DNA, 422 bp, Homo Sapiens
tggatatttagtacagaagagatattccagatattctaatgcagctacatcctcctcacaagatacaaatttaagtttatattaaatttagcataaatttccattttaaggtaagagataaacatattaagccactctagtgggaagttaagggggcagggacaaagaaacaatgaatgagaacttgccccccgccccactgcgctgccgccacccgactatcgacacggagcctggccgttatgtaggggctttcctagctcgactcattaacagctagtccacaacacgtataagtgcctgtgcatgtcagagacagcctccccaaggcacaaggtgtgaaagaaatagtctaaggctgcacctactggaggatgaagttttttgacaaataaataaaaagacatgtattggtcgggaag

SEQ ID NO: 267632 - DNA, 438 bp, Homo Sapiens
  misc_feature (26)..(26): n is a, c, g, or t
  misc_feature (42)..(42): n is a, c, g, or t
  misc_feature (62)..(62): n is a, c, g, or t
  misc_feature (89)..(89): n is a, c, g, or t
taaccccggggtaatggtgaaagggngccctccaccataccnggggaaccgcggatacctcnccaaccatatgaattcctgaaataaanattttaaataatagtcctagtaaaaattatggataacaacctactgaattaattttttaaaaaaaaccttagaatgtccagaagtcctttgtggtctgcagagaaaatgaagactaaatgttatagctttaattataattttaaaaatctaaatgttcactaaatctgaaagattagatatattgggttatgttgcattgctgctcacagtaaaatcttgtaagtcagtataaaatccactagattagaaaaagaaaagtaggctaggaagtttggtttggcttccctatctgtaaaaccacaactgtctatgcttgacacaaactaaggtaaataaataatgtgtctt

SEQ ID NO: 267633 - DNA, 729 bp, Homo Sapiens
  misc_feature (344)..(368): n is a, c, g, or t
agtagacgctgcaccggtctccttttggtcccggtgtctgtgtcacacacggcgggtcctgccgaaatgcacttctaggaaagggaatgacctgcccgtgtgataatgcctcgtcagtgttcttgggcttttgtgagtctcccctaaatgcaagctgtcaaattattttctggtatttgttcactcctgttccaatagtgacagatgatatccgaacatagaaaatgacttggcttctaagtttgaaatctagacagttttattaaccaaaggaatttactaatcacgcgttaatcgtttcaattaagtaattttcccattctgacaagttctgttttataccnnnnnnnnnnnnnnnnnnnnnnnnntcacaagcaatgtaatatctctgacaaataaacacctggcgtcctgacagtaaatttacaggttgtaggctgcggatggccagccagccaatggaatgaaatagctctgggggtgtgtactggtcctggctagccctgaatttgagcttcaggaaaaatatagtacgtgaagaaaggggtcagataatgtttggtagtcactgggttatcctgtggtttaaatcatttaatgtctgtagatttggcctctgtagtcagattgctttcttcgagcaaataagagcttttttccccccaatacattgcatcatacctctttagtaacataaaatggaaaggacaaaccacttttgtctactgt

SEQ ID NO: 267634 - DNA, 1120 bp, Homo Sapiens
ctacaatttttttctgtgtttttcaccagattgtactcctaaaacttaacaggccatcacaagcaattgtcttttgtttacaagattgatttaatatgagaggatacaaaatgtcatcgttatcctctcttatgaacaactgtagtcaaaataaggtggcacaatttaattgttttgtatcagaaatacactgacccaccttttattgagtcctgccacatgttaggtaccgtgctctgctgtggagacagagcagtgaccccaaggagctcacggtccctgaaggaggtgctagagaagagacttagcttctgatactgccaatttaatgtgagaacatgggggtatactgcatcatttccattttcatcaataacatatgttttatgcaccttctttacctgaaacttactaagaatctaccagtaaacaaacatcctgtctttttgcaagtatgaatcacttaacctgctgatagttgaagaacactttaggagttttgtattcttgtatatagtttatttattccatgtgctagccaggtaaagattacacagttcttctggactgttaaattgtgcatggttttggaccccttctgctctactacagagagtgaagaagaaagtattaaagctcacttaaccattcccatatacttactaaaagcctgtgtaaacatgtcttaatgaatgttgttgaaagcaatgtaaatagttgaaaatataaatttatattacagtttaagaaaaccttatgaggcatcactagccactgttaatatctatttgtattcttataccttttcaatatatttgaacaaatatagtttctggcactatttttatacctaggaaaaggagttactatgtatattatgcttagcttttaaggcattttaaataaccatgaatgttgatttcattactttcctttcctccatcacgagagtcatttcagatgactctttcatgacaaaatcactttaaaggaacacttacctccgattcctgtataaagtcatgagatggtcaaggtggttttccattgtgcaaattcttcacctgtcagtggtttcctcattttgccatgctttgtaaaaataaaaagaatgatcaag

SEQ ID NO: 267635 - DNA, 487 bp, Homo Sapiens
  misc_feature (243)..(261): n is a, c, g, or t
gatacagtgtgacattttaatacatttacatattgtgtaatgatcaaattaggataattagcttatgtatcacttcaaaaacataatttctttgtgatgagaacattcaaaatcttctagtattttgaaatacataatgcaatattgttaaccacaatcaccctactgtgcaatagaacaccagagtttactcctcctttccatctgtagcttcagacccattgaccaatctctccccttcgnnnnnnnnnnnnnnnnnnngctgtcaccactctcctcccctcccccagcaagaggcttgaatcttgaaggagcacatcagatagaaagagggaaatcaactgggacatggtttgttggaagtggggtggaatctggtttgtttacagtttcagagtttgaggcatcaaaagtgtatgtcattgcccaaaagtatttaacagctttctatgttttaggaattcactagaaataaggcatgcttttt

SEQ ID NO: 267636 - DNA, 745 bp, Homo Sapiens
tttttatttttattttgcccaagatcacaccctacagcatgtcagaaaggagatttgaacccatgtctgttctaggttttttccataacactaagtagcctgacttgtggcttatggtaatattttctaaatccagcttctttctgaaaagacttcattttcacaaaggtttaaacacttgcaagtaaacaaaaggggtgggttctgtggtcttcacgacagccatgttcccactacaggcctggctgctccctcagctgggagctgctgcccactcttatggaaactgcatccagggacaggctttattgatgctgccttcaaagccaaggcggccatctgagaggatggaagaaaccagtaaagtatgggactctggtgagccatcccaggtacagttgtgtttttatgcaccagcacatttgtggagcaaatttggtgtcctcataacggcagttcatgagtacaagtgaggttcagttctttgtgtaaacaggggagaaagcctgtgtctgaatataattccgacggcatcaaggtcattttagagctggtggagctctatttgtcttaggaaatctcgaaaacttttatagggaattcggaaaatattttcggccagcaggaaagataaaaatccctgcacacaaagtgcaggcatgggcccagagactgaacagacagactgctgtaaaacccctgtttaataaagcattaaaatgccatcgacctggacacatttttt

SEQ ID NO: 267637 - DNA, 457 bp, Homo Sapiens
  misc_feature (391)..(391): n is a, c, g, or t
gtataattagtatatattatcgtaagcgtttaagaggcaacagtgaaatatccatttaactgacaacaaaagtgattacaatttaccaagcatctgccccatgctaagcatcacactaagcagtgtactttcatctgcccagacaccacacagtagatcttagctcagttttgcaaagggggagaccgaggcgtggagaggtttttcccaaggtcagccagccaggtctacccaacccccaagtttatgcttttgaccatctcaccatcccaattaggatcatcctgttaaccatcattcagtcctaggacacggcagcattacttttgggatacaaattcaggccccatgggcaagggtaggaaaaatgaggattttttaaggaaagganaatcttaggcatgggtgtctgggtggggtgctggggaaaggtgttgggagggattaaaagttgatt

SEQ ID NO: 267638 - DNA, 416 bp, Homo Sapiens
ggtagagccttgtagaatgttcactggacgaacttggagaccgtccacgttcgacctcacccaagagctctctctaaaaggaccctggctctgtgctcccccaagcacgcagaagaccctccctcagtttgcactgtgcctggggattctttccagcatttcctactttatacagagaagccaagagtggtgtctgacaacttctgtgtaactgggattttctgggaaatatccagtgtagctccaggggacatcacttttattcttcttacactttccagcacccaccaggacaccatggcataggattttccttttctttaaaaatcttcattttttcttaccttggccaggggggcttggattttgttattcccaaaagttaatggctggcgtgttctaggggactggaatgg

SEQ ID NO: 267639 - DNA, 892 bp, Homo Sapiens
cattctttcaagagaaaggacaaaataaacacattttcaaaatttaggatgcacacatactcattcaaagaagtcctaggaaatatactccaacaagaaaaaagctgaaacctgaagaaaaaaataaacaaattagcaagtatcttggttaatatgaatcagtagtatgtttttaagtgctagtattttagaattttaaaaccagggtgaaattaaaatatctattaaaatatggtagatgatggtaggagggagttctgagctaaaatattctggagttattttattcaaaggcaatgaaatattccttcaccttagactttgacaagttatactggttaaagttctttgttgtaaacaacagaatccatgcaggaattttaaaaatttataacaaaattattgagagagctggaaaaacaatcctgggctaaacttctagaaaaatgcccaaaaccatggcagaactaactggcatgctgttcccatcaagctccaaatatcaggagctcgacttttcttcatttgctcctgctcccaggatcagtgtcaattctgtgtctggaacttgatcttgtagccagaagagtagtagctgtctgcagagcttgtatcctcacattccttacatttccatgggtacatctagtaagtagagccaatgtcacaggcctgcattctaaccgcaagagaggcaggaaatttgagttcgcaattctatcctgggtaggtaggacctataatcagaaaagtatcccaaatatagaaaggttatttaaaagattatggcaaccatgactataacacaatccattactgatacacatgttaaacatttaaagtaaccaccaaaataaaagaactagtatgtggaacttccaaacctatagag

SEQ ID NO: 267640 - DNA, 720 bp, Homo Sapiens
atttgtcagctactaacagagcctgccacgtgccctgcgaggtgtttggtgcagatgggcatggcttccacagggcaccacagagatcatgatgaatgaagtgtcaaggtggtagacacagagcgagtgctgtggaaaaggaagaggggagaggtcagggagagcctcccaaggagatggacttgggctggacctcagaggatgggcagaatttaaataggtagagcagcattttcggaccgaactttgttacccaaagcatgggctggtttgaggggcagtcggtgggagtctccctgtgcccaggctgccccctccccccagcagcgcctgcctgcaggaagttctcatttctcggctctgaagaggaactgtggctgcctctgagacacagacccaaaggagcaccccggcagtttctcaaaaaatatcccttctgccccaagtctggccagcagagcgcttctgtgtccacccagtaccccgtccaggcagcctctgggtctcctggcctcctgtccccttgaccctgaactggacagcaagagggaaaggtgtctgtccctggacaggtggcctcaggactcatctctgtcttctccaaccccagctggcctccatgtcccctgggggctttctgctgctgaccagcttgggccctactataggttttcttgctgggcttaggagcctgagagaggtagccatttccaaaagaaa

SEQ ID NO: 267641 - DNA, 712 bp, Homo Sapiens
  misc_feature (11)..(11): n is a, c, g, or t
  misc_feature (49)..(49): n is a, c, g, or t
  misc_feature (645)..(645): n is a, c, g, or t
tgtaggtaccncagcaccagccccgggcagggagccaggccaagggcancgacagaatcttccggagacagcacagcaacccactcatttgtgtgcacccgcacccacaaccgtcttgcactgggtgcatgtcacgcccagggtgagggaagttgaggcctggcctcacagtgtggaccggctgcgggacaagaacacagtcaactttggctttgcttggaaagctgcttcagatacataactcccggcccctcctgaaaatgatcgttttcttagccggggccctgtgctttaggagaggtttactgtcagagcttgctgttcttttgaaactgggccactaggctgaggacctgctcagaggctttgatgatcttggagccgaggtaggaggtgctgttggggcccgtctcctccaggaagtagcggtagttggccatcaggccgcaggagccggtgatgcctctgaggctcacatccgccatccagttgatgcgccacagcaccgccccgttctgcaggtggaagttggcccacggggtttcaacgcgtagccgcggtgcttctctccatacaggtaccaggcgcacagcctcatcagcggagtctgcagcgcccgcaccagcttctccgactgcacccacntcgctgctgctgaggaggagcttgagggtctcgttaatggagccacctgtgatctccgagatttcct

SEQ ID NO: 267642 - DNA, 887 bp, Homo Sapiens
  misc_feature (748)..(748): n is a, c, g, or t
gtggccgatagctggtcctctttctccaacacctagcctgagacttggcggcgcggctgctatcctgaactagcttggtaagtgttgtgtcccgaaccagcgtagagagacctcggaccagccgccttgatgacagcatccgcgtcctccttttcatcatctcagggtgtccagcagccctccatctacagcttctcccaaataaccagaagcttgtttctcagcaatggtgtggccgccaacgacaaactccttctgtccagcaatcgcatcaccgccattgtcaatgcctcggtgggaagtggtcaacgtattcttcgagggcattcagtacataaaggtgcctgttaccgatgctcgtgactcgcgtctctacgacttttttgaccccattgctgatcttatccacaccatcgatatgaggcagggccgtacgctgctgaactgcatggctgggaatgagccgttccgcctcactgtgccttgcgtacctcatgaaataccactccatgtcggctgctggacgcccatacatggacccaaagtcgcgccgccccatcatccggcccaacaacggcttttgggaacagctcatcaattacgaattcaagctgtttaataacaacaccgtgcgcatgatcaactcgccggtaggtaacatccctgacatctatgagaaggacctacgtacgatgatatcaatgtaagccatcccggccagcccctgacatctgccatcgatcttgcnccaagactgaacttgaacactgacattttgttagtaaagaaaaccggatggtgccttgttaaagggcaagaaaaaagggagggggttggagttttgaacgtagtaagccttaccttaatagaattaaattcatgaaaca

SEQ ID NO: 267643 - DNA, 762 bp, Homo Sapiens
aggctttaatctctgtaaaatgtttacaacagcacttagtgagttatttgtaaatgtatataaccataatgatgttattgttgtcttatgttttaccagactggcccaaagtccaaagaacatattattcaagaagtgcaattccatgttaaacatgagtcaaatttagctgaaggagcaagtttggacaagatgcctaaagcacagcagtttttcacaatgttagaattgataagtgctgtaatgtatctgaaaatataagtaataagtaggtttgcagtggtgtgctaaagccagcttatagacatgcaggaaccaattgttagttgacgtgttgatggcttcaaaccagtcagtgaaagtatttacattatggaaatcaggaacttttttcctcacaaagaaagattgttgttaaaaatttacctgctcaccactggatttgggacgtctgagggtatgaggcatttggttggcggaatcatgctactacatccttttgcactcttggcttgggtgtgtgtcttttcatttcatcagctgtcctaaattctggaagaaacctgtcagggtaaagtgtgtattctgtctttggctcaaaaaattataggaatgctgaccccagttacacatgattctctatcagcctaatacctaaacaggaaatgctttaaagtatcctaagttccagctcaaccttctttttagctatgtgatgaaggcaaagctttagccgtaatgactctcaatgttaacattaaa

SEQ ID NO: 267644 - DNA, 485 bp, Homo Sapiens
  misc_feature (57)..(200): n is a, c, g, or t
ttgggtcaaacctaatcctagttttcacttctatggatagaagcacaaacaccttgnnnnnnnnnnnnnnnnnnnnnnnnnnnnnnnnnnnnnnnnnnnnnnnnnnnnnnnnnnnnnnnnnnnnnnnnnnnnnnnnnnnnnnnnnnnnnnnnnnnnnnnnnnnnnnnnnnnnnnnnnnnnnnnnnnnnnnnnnnnnnnnnataaacacaacacataagtaaatcatatagtatgtcagaagtgctatagtaaaacagaaagcggggtaaaggggctttgggtgtactgtgagagttaagaatgggctgtgatttttaaaaggtcaagataggcttcaatgaggtaacttttgaccaaaggaggtgagagagttggcaatgcagatatctgggggaaacatgtacaaggcagagggcacagccagtgcagaggccctaacttgggagcatggctggcatcttctagggacaagaaaagaggtcggg

SEQ ID NO: 267645 - DNA, 776 bp, Homo Sapiens
  misc_feature (142)..(142): n is a, c, g, or t
  misc_feature (190)..(190): n is a, c, g, or t
  misc_feature (227)..(227): n is a, c, g, or t
  misc_feature (667)..(687): n is a, c, g, or t
atccctatcagtcaatcctcccaaaaatgtcctaaccttcccgacctcttttcttgtcccctagaagatgcccagccatgctccccaagttagggcctcctgcactgctgtgccctctgccttgtacatgtttcccccaganatctgcattgccaactctctcacctcctttggtcaaaagttacctcantgaagcctatcttgaccttttaaaaatcacagcccantcttaactctcacagtacacccaaagcccctttaccccgctttctgttttactatagcacttctgacatactatatgatttacttatgtgttgtgtttattgtttattgcctattaccccccgctagaatgtaagctccatgagggcaaggatttatctgtagtgtttaccagtgtatcccaagtgcctagagtagctattgacacgtaggaggtgctcaataaatatttgttgaatgaatgaacaaggtgtttgtgcttctatccatagaagtgaaaactaggattaggtttgacccaattctatttcattcagcaaaaatatcctttaattttaatagataccaaaatatgtaatattttatgttgtttagatcaattagatattaaaattatacaatcaaaatgagctttttaagcttatcagactcagtcaagaannnnnnnnnnnnnnnnnnnnngtagggaaatatgataggttgatcaataaaagactctccagcttaaaatattatattaaaatattgaggggtaagtggaatggaaatac

SEQ ID NO: 267646 - DNA, 763 bp, Homo Sapiens
  misc_feature (71)..(71): n is a, c, g, or t
  misc_feature (117)..(117): n is a, c, g, or t
taactgacctatttaaataagcttttcctttaaatatattaggaattccgatttacccccccagcccccancaaaaaaagaaaatattatttggtaacttggttcatgaaactaaancaagttttaatggacagctgacaagaaattgcaagtaaatatgtcaactttaagtataagtgacaggtcttaaaactagtcaccaatctttaaatccaatggtcaagaaggcctattaaaaagagaactgaattttgagtagcaacatgctcaacatcagtaaatgaaaactgtcaagtctcagtcaaagacattttcagaagaattattcttactctaagttgacttcttatataagctaagtatgatgcaatctaacagcaacatggctctcctaaacacccggaagtactgctagagtactagagttaatcctagtcaaactgtatggaaaggcaacagattttttccttcagtgacattatgaactaatatgaactaataattatgttttaagatagtaataataaatctatgattcatctgaggcttcttactaattcctctttaaaattaaatgcagtatcaattcatacactaattcatgggggaggtcagtcaaatgacaattactaggtttgaaaatcagtgctctagaaacaagtttacatgtttaccaaagaggaaaaatttaatatatccacaggcaagcaaaaatttgcatgaaatgtatactatatttacgaagctaaaaaaactggaagtt

SEQ ID NO: 267647 - DNA, 915 bp, Homo Sapiens
ggggcagtgtacagtgcagaaacaaagttctaggcagaggaaaaatgatttacagaaagcctggcatacagggcagggggacggggcctgcacacggggctgtttcaccgttagacgttataagcacagtacttggggctatgggcttcctgaaggtcccaagtatttgagacctgaaaaaaacttagttgacacctacataggaaaagtgaacttttaaattaataattccaaaattcaaatcacgaattgtttcaaaaattttacatgatagaattcatatttagtaagcgatacgggtatattttaatgcatttgattttaaaaacggggtagggcctactaagaacaggccaagccctggccccagtgggtttggatataatcctgagggcagctgggaaccactgagagaagcaggagaatgttctctgtggctacagtgaggagaatggattggagggaggccagactggaggcccagtggctagagaccagataggcagttacagtcttccagactgcgagacaatctctctttagtgccaagattagcataaaatcatagcattatataacccaattattctttgattcctgcatccccaatctgactcagcattctaaatttacttaagatctggggacaagggtttttggcaaatccttgaaggcaaatgatgttacagtcaatcagtatatgccttgagccagacagacatgggtacgggcctcagttctgctgcttgctagctatgtgacttttgcacaagtgatttaacttctctgggccctggaatccctactggtaacacgagcataatcgattcctcacagaattaagtgagaaaactatgtacgtaggaccttcttatggagtgggtacttagaaataaatggtagccgttatcattt

SEQ ID NO: 267648 - DNA, 417 bp, Homo Sapiens
  misc_feature (393)..(393): n is a, c, g, or t
ggttctgtcagcacctttcgagcaaataaggtgtgacttttcagggtactgctgcttccataagctttatttgtttactgtccagctcacagacatgtctagagacagcagtggcaagtgattaccatacttatcctagctccatctatttttgacgcttttgttttccccatcagtaaaatgggaaatatcccttatcataaagttcttgagccttttagcatgagggtggctgaaacagcataaagacttcttaatctggctgggcacagtgggctcatgcctattaatcctaggcactttggggagggccaagggaagggagggttcactttggaacccagggggtttcaaaaccaggcctgggggaaattattaggcagggacctcgtnttctattaaagaaaaatttttttt

SEQ ID NO: 267649 - DNA, 765 bp, Homo Sapiens
  misc_feature (724)..(724): n is a, c, g, or t
catgtccattttccattcttattggaaaataaagttgtactaatgtgaaaatatttggagataattgaaaatacttgtttgctatgaaaattactattagaaagaaattgagaaatatgagtatgattttatctgtagtacattgcccacaaaaatccatggatattattgaacattcgattgaactctaatattctacaattatagtttcaaaaactaaaaaatttgtgattactaaagtgaatagctctcattgacaacctgcagttaatagaaagaacaaccttgatcaaataactctcctattaagatattgtagtatagattgcttagagacatacttgcaacttatttttactaaaaattctgatacttaataaagaaaatcaaagaatatcagacgtaaaatgggctctgcagttcatttagaccagagtttctctaaagtgagttctttataaagaaattaaaaatggaaatttaataaagagcttaaaattcgaattatattgattttgtaacattttgaatttattttataaatttgttttgagtttaattatacaaaaatcataagcataagattgtaccgttttaagtttgtatatatttaagtatctttgtatcaaaaattattttgattatgttataaataataaaaagccaatgctgagggtcctccatgacttttgtcctttaaaaggactatgcatattactcaagnttaagaaacactaatctaaaaaatttctagtcaaacatagg

SEQ ID NO: 267650 - DNA, 768 bp, Homo Sapiens
aggttatcaggtcagtggggactggtggctttataagaagaggaagagaagcctgagcttagccttctcatcatgtgatttcctgtgccagctcgggactctgcagagtccttgccagcaagaaggcttgtaccattgtggcccttcaaccttggatttcccagcctccgtaactgtaaaaaatgcatttcttttattaattacccagaagatttctatcataagcaacaggaaatgaactaagatactattagtatgttagtgttatctagctttatcaataaaaaagttctatatgttagaattgctgtcatttcaacatatatctttacaagtatctgaaataagtgagggagatgggttgcttagagagtatcttgctgtttctgctcctttgtgggggcaagaaactggattctttgccttacaatgtattagtaaataaaggtaagggatagcaggtctgatgctgctatctttagaagggtctgcttatgaggctggcccttggctggtgtctgagaacttgacttttggcatgttacattgctctgcctgcctgggacacaaactgcggggccagcttgcgtaaactgcaaaaataacatgatttgtggtgaacacctactttccttctgggtctggaattcaggtgactgtggttaggcacacaggcagaggtgcctacatgaccagaccccagtaaacaccctggattttgagttataagcaggcttcaccagggcagaaaaactacagaagtattac

SEQ ID NO: 267651 - DNA, 769 bp, Homo Sapiens
  misc_feature (389)..(389): n is a, c, g, or t
aaagaatgaattcattcattcatccatattctgggagcaaaggaaattggagttaacaaaaccaacccagaaactccttcctggtcctctatcaagtgcagcagaaggtcatggaacaaatgacttcaagagtgttacttgttactgaagggtcagtaagagataatgacctttaggatctatttttgcacatcaagggtgggcaaaagcaacccgcaaatggagtcttaaaaggtgcctaggtgtctgctggcctacaagggtgggaaggtgttccagggctgtgggcctggcttgagcagtggcctgggaggtgagactcagcctgggcatgcaccctcgagaccctcttggccacttcctgtttccccagtgtgagtttccagtgnccatgagcagccctggccccgggctgcatccctctctctccctacccctgcctttcctctatctggtctccctgcagcctggagagtgtgtttccactcatagccgagggccagcgcagtgccacgtcacaggccatgcaccagctcttcgggctgtttgtcacactgatgtttgcctctgtgggcgggggccttggagacccctgtgccctgtggcactgggtggcaccctcctccatggtggggggcagagaagcctcgcagatcctcccctaccaccaccagggctcctgctgaagctaccctttctggactcccccccagactcccagcgctacgaggaccaagttcactggcaggtgcctggcgagcatgaggat

SEQ ID NO: 267652 - DNA, 319 bp, Homo Sapiens
gccttactgatgcaaatgcaaaggaacttagtctgttatgaacccaggttgatgacagaccagtccttgtggaataagattccctttaaaaactctttagccagtcgtgacatcaaccctagacctgtctgccttggcatttgctgtcaacatctgctgggctatgtaggcaggttaatcctccacttctcatgtggttgaaccagtgtgttttttggtaaaatggtgattgtagataagattagttccctgatcccctgccccctgtcccctgcctcttttcccaattcccttccttatgctgggacttttaaagctt

SEQ ID NO: 267653 - DNA, 713 bp, Homo Sapiens
  misc_feature (58)..(58): n is a, c, g, or t
  misc_feature (67)..(127): n is a, c, g, or t
  misc_feature (571)..(664): n is a, c, g, or t
ccccagtcctataatattgaacagtcagtgaacaaaaataattggttctgtgcaaagngaatttatnnnnnnnnnnnnnnnnnnnnnnnnnnnnnnnnnnnnnnnnnnnnnnnnnnnnnnnnnnnnncatattgtgtcaggcagatcaagaagatatatgactttggcataaaaaaatgcttggcttatgttgccttttaacaagttgattatgaatggggacacatattaattatgacaagtcaagtcaatgatggcatcaatgccaggctttgaaaacaaggctttctacgtttgtttcaacctcttcatccttattaccatgtctgagaacccctattaactggtatttctcaagttttggaaagaagtattaagggcccaggaatgatcattttattttgtcatttatctcctaaggaaggacatttgtcaaacaattttctttccacagcagaaagatagaggcacatttctatgccttaagtcacacatgaaccctaagagcagaaataggacctgagaaggcagtgtccaacatggctgctcccagtgggacaggtagatttannnnnnnnnnnnnnnnnnnnnnnnnnnnnnnnnnnnnnnnnnnnnnnnnnnnnnnnnnnnnnnnnnnnnnnnnnnnnnnnnnnnnnnnnnnnnnaccatcctggctaacacggtgggaccccatatctacctaaaatacaaaa

SEQ ID NO: 267654 - DNA, 790 bp, Homo Sapiens
  misc_feature (48)..(48): n is a, c, g, or t
gtttttagtactgtgtcgtcaggctcttcccaggcctcaggtgttgtnttttgtcctgtgtggggatgcattgctgcctgtatttatgatcttttgccgtggttctgagcattcacctcaccatgtttacaaagaactgttttgtatatagacattttcaggcacgtgctttgcacaaaccctgcgtggctcttgtctgtgttagctgtcacggtgtgcacactaatctctgttaaagttgtctatggctgttctacttgtaagatagttttctatttccttcagtaatgtgtccacagtaccctgtatttcgagttccattatactgaagtactcatgttttaatagtgcctctccaaaggcctcaccttggacagaggtcaatccttgatgctccagcacaggtgacgtcactaattgtcactttccagtttgtttttctctattaaggaagacattttctaattgcatctccatggggctgtgagactgtgtgaagccgtttgtgtggtctccatgtaggtgctgtgttccccgcaccgccttgctctgaacactggtaattccaggtgtgcgcttggcagaggggtctcgccaaagcgcatgtgtgtgcatgtgtgaacgtgtgtgtcctttgcatggttgggcgtgggtgccttgctagggcatcagcaggacattgtgtgtatagttacaatgcttccaaactggaactctacattttgtatcttttaaagctcctataagtaaaataactattggctttattaaaaatatacatttaataata

SEQ ID NO: 267655 - DNA, 412 bp, Homo Sapiens
gccatcaacattatagttaaacaatgttcttaaagatctgctgtacatttatttatcgtattataaaatgtgagataaaaaacaacttttaaaagttaaccaattcattgtcgtaaaaagcctattgtctccaaattaatttgcacactgatataggaatgtttgtggtagataggcactgacttcaagtagaagaaataaagattagttgaaattgtattactcagaatggtgatattccttgcttcctgaaataattgagctcttacaaaggtcaatataaatacgacttttcataagttacacttttttgtaactcacattattgtggtttttaaattttttattattttagggacagggtcctgctatgttacccaggctagactgaactggcctcaagtggttctcc

SEQ ID NO: 267656 - DNA, 729 bp, Homo Sapiens
aggatgatctcaggggtccaagccctggtcacacatgactgtatgaaaggcattcatctggcggatgatagcttccaggcagtatgagttatccccatctgctgtaacacgccctcggcaattttaatgagctgctggtagatctgaatggaaaggtcactcagcacctgacggtattcggtgaggtcaaaattcttaagacagtgttcattctgctttgcagtgttctgagtcatgaagccctcatccccgctgtactgcttcagacagtgaagaaggcggcaggtgttggataaccagaatgacgtcatctcaaagtcatcattgtgctttttcaggactttcttaatgccgttgatggtggaggtcagcagggagtgcaccttgagatcgtcgttggtgtaatcccgcgtgccggatgcaacatgtaagaggatgtaaggcggggaagacagggcactgtgcccgaacagcatctggggcttcaagtctgtcacccaggttccggatgaggagggcctcgtcctctttgtggtactccagcatgccctggaaatccttctctttccgctggaccgtgacctgcctgttgagctcatggcgcttcctctcactctgggccaatgcctgggcagcttctaggtcctgggctttcttcatgtaaatcttcagttgctttttgagcttcctctcattcttttccagcttttctaccagttctttaaggtc

SEQ ID NO: 267657 - DNA, 547 bp, Homo Sapiens
  misc_feature (351)..(351): n is a, c, g, or t
  misc_feature (487)..(487): n is a, c, g, or t
  misc_feature (502)..(502): n is a, c, g, or t
  misc_feature (508)..(508): n is a, c, g, or t
acagaggtaatataaatgtcttccagctgttgcttttctgttctcaagctgcccctcctggggtaggagcataatctacatcactgggcagtcacaggacactctatagcaaggttgtagcgtcctctccagtggggggagaaaaggaactgtgcctaccaaaggtactctcttgtcagcaatttccatttctatactttatgggacactagaaactaaaagcaacaaataatctgatataagtccttgtatagtcatccttcaattcagtagcaatattttctggtcactactaacctgtattgtattaaaatgagactattgggaaggaaatggtgctaaaacttaatnaacatctctttaccaaccttttacccaactcctggggttgggcaaacagctggaccaaactgccatcacctcccacttgggaagtgtatggggccgacagcatggaaatagctgagcccagatgttccctctggcntcttccgaattcccnggggtngggtgtagggtaggcctttggagggccttcggtacaggg

SEQ ID NO: 267658 - DNA, 687 bp, Homo Sapiens
acaaagactagttagtctattaaaactgtgaatgtgtgtagcaattctgcttgtgaagggaaatacactatttaacatgaaattatactcctgacacaatatgctatatatacaaagacctcataactagtaaattttcaacatgtgagttcagtgactagtaagaatgaataaaaatgaagctcctttagttaatctacgcaaggggaacatctatttataggttactaattaaagggactctgtaaagcaggaaaaccatgcatggtaagtggtaggcagcaaactgttctgttgatttgggcctcatgacggtttaaaaattgcccttgcaatttgatcctcacccagtggctgacatttgactatagtccatttgccagccaaggtaagtccctacccattgctctctgcagctggccccaagctcctgctggacaggaatgccttaaaggggacccacactgggaggcagttcagaaagagggaaaggcggaggaggtgtaagtaggacaaagaaaagtcaaactacagaggaatcataaagaaaataatagaataaattgagaacccaaggggatgggaaaaaatagcaagcaaggagagtgagaaagaagaaaaggtaatagtgtaagtagaaaaaactgttagtggaaggcaggttaaatttggaaggaaaaatagaac

SEQ ID NO: 267659 - DNA, 921 bp, Homo Sapiens
  misc_feature (124)..(565): n is a, c, g, or t
aacattcaagattcagtaagtctcccacaaccatacatcattcataataaccaagagataattaacatacagtatacagaacccccattaattttaaggggtcctgcatatattctgtatgttnnnnnnnnnnnnnnnnnnnnnnnnnnnnnnnnnnnnnnnnnnnnnnnnnnnnnnnnnnnnnnnnnnnnnnnnnnnnnnnnnnnnnnnnnnnnnnnnnnnnnnnnnnnnnnnnnnnnnnnnnnnnnnnnnnnnnnnnnnnnnnnnnnnnnnnnnnnnnnnnnnnnnnnnnnnnnnnnnnnnnnnnnnnnnnnnnnnnnnnnnnnnnnnnnnnnnnnnnnnnnnnnnnnnnnnnnnnnnnnnnnnnnnnnnnnnnnnnnnnnnnnnnnnnnnnnnnnnnnnnnnnnnnnnnnnnnnnnnnnnnnnnnnnnnnnnnnnnnnnnnnnnnnnnnnnnnnnnnnnnnnnnnnnnnnnnnnnnnnnnnnnnnnnnnnnnnnnnnnnnnnnnnnnnnnnnnnnnnnnnnnnnnnnnnnnnnnnnnnnnnnnnnnnnnnnnnnnnnnnnnnaaataaaaccacaacaaggtacatttaggcaaaaatataaagtctcacaatgcccaattattggtcaagatatggaataacagaaactcatatactccttggaaggctaaattgatagaatcatcttgtggaaagtttgttattacctatcagcgtatggatccaatactctaagaagacctcataattttacacctaggtaaatattaatattttacaaacttcacatatgtccataaagaaacacaagtaaaaatacttatagcaaaaaactggaaataactaggtccactgataggaaaaataataaaaatggaatgacagtcctgtaaaaaaacaacaacagcatgttatat

SEQ ID NO: 267660 - DNA, 671 bp, Homo Sapiens
ttttaaatctgaattgaaccacccattttcctttcttagccaaatcaccaaaatgtccagttagaacaagaatttagcattctgcaaaagaagttaacagctgagataacgaggaaatattctgaaatggatcccaaatatttcatcttaattttgttttgtggacacctgaacaatacatttttttcaaagacagagacaattacaacagagaagcagtcacagcctaccttattcacatcatcaatgtcacaggtattggctaattctcaaaacacaacagggaatcctttgggtcaaccaacacaattcagcgacactttttctggacaatcaatatcacctgccaaagtcactgctggacaaccaacaccagctgtctatacctcttctgaaaaaccagaagcacatacttctgctggacaaccacttgcctacaacaccaaacaaccaacaccaatagccaacacctcctcccagcaagccgtgttcacctctgccagacaactaccatctgcccgtacttctaccacacaaccaccaaagtcatttgtctatacttttactcaacaatcatcatctgtccagatcccttctagaaaacaaataactgttcataatccatccacacaaccaacatcaactgtcaaaaattcacctaggagtacacc

SEQ ID NO: 267661 - DNA, 654 bp, Homo Sapiens
  misc_feature (566)..(566): n is a, c, g, or t
taacgtatttggagtttatttagaagtaaagtgtgatgacgataacacttaagtgtgaatttttaaatatagttgagtagactgcatcatctgagttagaagcctattccttcagggctcggggtagcttgaatttgtagcaggcacatgacagaaattgtatgtattgtggatctgcatgtgtgctgagtattccctatttctttgatcccttttcccccattttctgctctgctcccccctgaggctgtcttctagagactggggtttcttcataggtttgaacagtggggagataccagaggtggggaggagaaaaagttatttattaccgttcccttcctcctgcctggaccatggtagcttctgtgttcccgtaaggataacagcttcctttgggaagccccatctatggctgtagatctctcggtttcaagttgacaccaattccctctccatgatcttcagacttaactactactgggtgcttccccaacccactggttgggtggtctttaattgtgaacacatatttataaaatagtgcctttattaattggttcttngagttaaatattctgagtgtgccatttattttctggtgccatctggttaaatgatgagcatttaataaaattgtgataatcagttatc

SEQ ID NO: 267662 - DNA, 1013 bp, Homo Sapiens
  misc_feature (175)..(183): n is a, c, g, or t
  misc_feature (198)..(228): n is a, c, g, or t
  misc_feature (386)..(493): n is a, c, g, or t
atgtttctcatttgctttagaaactttcaaaagattcgtgttgtccacaggataaaattcaaactccttattgtagcattcatagtcctctgcatactggtcccaacataacatgtgaaacttcactttgtctgaactgaatttcaaatgtagttgtggtatgtatttggaaggnnnnnnnnntcccaaatgtattcnnnnnnnnnnnnnnnnnnnnnnnnnnnnnnnggtgacaagagtctcactctgtggtccagactggagtatagtgctatcagagcttactacaactttaaacttctgggctcaggtgatcctcccacctcagtctcccaagtagctaagactgcacgtgcacaccacccagtccagctaatttttaaaannnnnnnnnnnnnnnnnnnnnnnnnnnnnnnnnnnnnnnnnnnnnnnnnnnnnnnnnnnnnnnnnnnnnnnnnnnnnnnnnnnnnnnnnnnnnnnnnnnnnnnnnnnnatgagacacacacccagccctgacttattctttataccaaaagtaacactgagtcaatcaaagatttatgtataaactattaaacattaaagttttagataatatcataagtaaatttatttataatcttggaagagaaaaggtattttgaagcagaacacaaaaccagaagttctcaaagaaaacactgattatattttacccacataatatttgaaaacttatgtatggccaaaaaatgccattagtgaaatctaaacataaattacacaggggaaaaagttgtaacacaaatcacagacaagggtctaatttcttagtttaggtagagtccttaaaatcaataatttatagaaattaacaatacacattttttaaaagatgctcaatctcatgaaataaaggaataaaattcaaaactatcagatagtttacactctttagaaaggcaaacatttcaaaggtaatgacactcattgttgctagaaagatggagaaaagggtactcccctggattgtt

SEQ ID NO: 267663 - DNA, 547 bp, Homo Sapiens
aatgaaatgctttgctacactggatccttttcaacttagcacttacaaatataggtagcttttgcaacactaaactgcattctaataaacagcattcagctaaatgacatgttagttacccccttcctcttccccagttgatgcctcctaagagccgactgctattcttgagaacaaattcctggatactggcattagtgacaaagaagtgtcaggacagtttgccaagaatgttgtttcttcttgtacaacacaaagcaaggaaacctctgtattttatggctttgaggttttaaaaaatgttctgcagtttgattgatatgggcttttaaattcagtgaatcactttcatgaatactgaagtaggtataatcttcagaactagtaatcattatagttacagataggattccatcgcatgtcctgctcaaatgaagacctgttctcattaatcaatactgcatgaaaatattactggctcacactaaaattaggagcatcaggtgtccagagttttcctgtttgggttcagatataaaatctaagc

SEQ ID NO: 267664 - DNA, 647 bp, Homo Sapiens
  misc_feature (273)..(286): n is a, c, g, or t
tccataagccatagggaacttatgtacttcatagtatttttagtttctatatacaagcataccattgtgcttgtgcacactgtacaataaaatcaggcaaggaattaaagttagcagccttactcttagcttgttctaagtggatgcattggaaagtaataaatagcctcataaaattaatagtgataaactctacctgtcacaggtgaatactatgtagttttcataaagtgtaggcagtgtttctagaaatcccatgaaggaaaacccaannnnnnnnnnnnnnggcataaaaagtgcacaagtttgtcctatgtgttaaaacatcttaatttggatgtattttttatccaaaatgatgcatacttggatgcattaaaagcacaccaacaaaaatacacacactaacaataaaaggaatgatttcaaatgagactgggaatgggaacaagaataggttaaaggagagacttccatatttccaaagtcaagagaattcccttttaaaacataaattatatagccatacagaattaatttgaaaatatgaaagctataggaaggacaaacaccaatttgaacaactgttgcaaagtttcataactcaagaaaagatagcttcctggctaggcgctcatgcctgcaat

SEQ ID NO: 267665 - DNA, 556 bp, Homo Sapiens
aaaggaaaatatctataagcacaatatattcccatttagatgatgggggagaaatggtttatcaccattctgagatggcagaattaaagcttggattgactcttctacgctgggtggcttttccaactcattaattatttccaaatatagatattataggattcctttggtttacaaaaggctaccttaaccctcccagagaagatctatggacacaagtagcttgctgcaggaaagcattttacaagcctactagaaagccagtctttttctctgctcaaactagatttcggttctggtaacatctctccattcttgcctttttcccccatttcaagttgcctcaggtttctgattgttccagaacacaccttctagccatttttccttaacctccatttccccttcctttaaacctcgtccctcctttcttttcaccacatttatttcccaaagggctccgaacactgcagtctttacgtctcacttagagggtgagcaaccacttcatgaaaatgtgtggagagcctcagcctgcataatcccagcaccactc

SEQ ID NO: 267666 - DNA, 696 bp, Homo Sapiens
  misc_feature (516)..(516): n is a, c, g, or t
gactctaaagagggcgtaagcatgagaggcacctgcagccctccttcctcagcaggaaatcaatgtggagccccagaggacattttatctcagagagagcatgctggccacaggacccagtgcagccctgcttcctgcaccgtgggtctttcctgatagctgcaggcttgagattgcagcctcaggataggacacgttcagatgccttccagactacacacactatgcttagattcgagagtctttcctgaccttaaaatttgtcccttgcttactttcacactgcagaagatttatatatatattcatcattatttttgcagcagtacaagtggaaacttcaaaaaaatcattccctttcatgtcctgggtctttttaagtctttgatatgtaaaccattttcataaatatccaaacagagattgtcattccccttaaaaacagaaacaaaacacaaaactagtgcttgtgaaaacacacagcgcaaagacaattatcctattgcattaaaaaanaaatcagtctgcctagagacatttcattggctgcattgtcttaattccctaacgaaactgcatcaaaatgtcagttgtaatttagcctctgatcagctgttaaatattatttaaatatttacaggtcctgtggggtatctcccattacccatgtcgccctcaaattacataagcgatcat

SEQ ID NO: 267667 - DNA, 1044 bp, Homo Sapiens
  misc_feature (409)..(409): n is a, c, g, or t
  misc_feature (471)..(503): n is a, c, g, or t
atacaaaattaacttgctattgagaaagtttaacaaattgtttaacctgaaagacaaatttcctggtaaacaaccatttaacatcccctgtgtctttgcctcaaatccattaccaacaaggcagtcatcctttcaaaatgcaaatctgattatatcacacttgactagtttaaaatttgtcaacccttcctattaattttatgttgaggagcaaacttcttaacatgacccatttatcatgtatcatccaaactgggacactctgagagtgaaaagagagtgattaatttttataccagtaaaccaggggcagcccctaggaaaagaggttaggtgtgggctatcccacccacaaggccctacctcttcaaattccttcacattctccctcactgtttcccctccagcntccctccagcaggcatctttgttaggaaaaaaataatatagctgggcacagtggcttatgcnnnnnnnnnnnnnnnnnnnnnnnnnnnnnnnnnagtatcgcttgagcccaggagttcgagaccagcccgggccacaaaggtgacgccccatctctacaaaacattttttaaaagctggacatggtgttgcatgcctttggtttcagcctacatgggaggctgaaagaaggaagattgtttgagctcaggagctcaaggctacagtgagcccatgtttgcaccactgcgctcccaacccgggtgacaatgaaaccctgccctcaaaaatatataaatatgtatctcccatattcaaaacctgcaaatggccaaaagaacacatgtccattgaatgacatgatgaaacactgtttaactgactcacctgaggattatctaattctctagaataggtatctttattttgttttatttgctattgattaggctttaatcaggagtctgcaaaccatggtctgtgggccaacttgggataggagagtgtttttatatagtccatgagcataaggatacgtaacagagaacttacatggcccacaaagcctaaaaaatttactcctttacaaaaaaagtt

SEQ ID NO: 267668 - DNA, 665 bp, Homo Sapiens
taggggacattgccttggacttttctctacaaatgccctcagatgtaagaccagaaatgattctgcttgtggaactcgtggctttctgtcctattttccttttatgtgagccctgcaggttgcctttggcgcccacaccagttctgtcttcatgtcgctgcaccgtgaaaccccaattgccctttagcccctgctttgtgtgccttcaactcccaacacccagtggtgcccctcagggcatactttgctggtgaaagggctgtagagtcttgagtatgttattggccctaagtgggcatgaggccccagcatccgactcccatcctgcccaggctgcagggcacagcagcactggcatagacaggcacgctctgtcttccaacgtgcaccagccttttcttacatattttgcctgtttttaaaaaatacgaggagagggtgcagatggatactgtgccctcaccctcctaagccaggtaatatattgatgtgcagacttttaagaaatcttagtcttatcacaaatatcaagtaatttattttttccattttcaaatgcaaaagttagcctaggaagcctcccagtcatcctgaaggaccttttgactttgcttttataattctgttaaaaattgaggaggggattaatgagtacaatgaaaaca

SEQ ID NO: 267669 - DNA, 691 bp, Homo Sapiens
gcggtgacttcccccagagtcacacagctaactggggcaaccagcgccattatctcatgactcccaggcttcagtactggaaaaataatcgtgtcatgctttcctttctagatggtagaaactttggaatgtgtgattttgaatactgagaacagcccaaaaatgtcacatagtccctatgctaaagcacatgcattttatcagtagggacaagattgagggccatcacttaatttaaaacaaattgtaacccatctagtgatctggactcttggcctgtagatgagatacaggaaagcggatgtaagtgtgaaggcaacagcccagtgttgctgagtgccgggcacagcatgtgccatcatttcacagcaactaaaatgctgaccttacaggttcatggtttcatttttggtcttcatgaaaagcttgaattctctttagcttcagtttgcaacacaaataaagaatatatttgagactgattgtcacagaattttctaattacccacatgtggagcgatttcctaatgtgaaatacttttcttgatggtatgagatcagtaccattggacatacacagtttattcagttggccttttggtaaaaagaagttctttggtatgcaaaaattttccaagtcacttcttgcaatattataaaatgtattacttgaataaaatgttgaactcga

SEQ ID NO: 267670 - DNA, 510 bp, Homo Sapiens
aatgcccagtcactgggtttctggaactttgtggaataaaacgctaggtatattcactctctacctcttcactaagtggctctttaggttgttggttgacttagtgcctcgtcaggggccaatgaaagggaaggaggtgagggcgccctgacctgggaaaggggtaggaccccatgttttagggaagggttcctagcagtaacttctgccacgggcacttccttttctaggcctcaatcttcccagccctaaaacaggggtctggagagtatcagcacattcccatcacaggcagattccccgggccgggaaagtttctggagaaggcttttgcaataaacctctaagctgcttttctaatgacaagtttgatttacttaaactttgacttagctcagtgtggtcagtgtcattgtccttaataacaatgtaattgcttttattgaaaaataatttcctaaccatgcatgtgtgctgtagacaagtctttcccaatctgagatctgtgaa

SEQ ID NO: 267671 - DNA, 391 bp, Homo Sapiens
  misc_feature (103)..(125): n is a, c, g, or t
  misc_feature (346)..(346): n is a, c, g, or t
attcggcacagaaaatttcatgtaaaaatgattatgtagatcaagaaaagttgcaattttctggattcctgatattttaaataaaagtagtttccaaaggtgnnnnnnnnnnnnnnnnnnnnnnnaatggaaattttcacaatataaccatcctacataattttatttttcaactattatttttgtcaactcattatttattaagaaacaatgatttttagatactaatttataattcttatgttataattaaaaatcagagttcgttgaataaaatatctgatttatgactccttaagtcaacattaaattattttattgctatatccatgttttttggatgttncataactctagggtttatatagtactttccactccgtctccggat

SEQ ID NO: 267672 - DNA, 559 bp, Homo Sapiens
  misc_feature (437)..(490): n is a, c, g, or t
tggccagaggcccaggggcttctgcattatcagtccagagctggggctctccaggcagtgggaaagacaggagcaaacaagaggccagcagctgaggagctcactgattgtgagttttcagagcttctgaggctctctctgtagaatgagatctcagattttccctccagccccctccccactctagccatggattttttgcattttagtccatttgcatgcctcttaacttcaaaaaccccgactcccttccatcccaggcccttctgaggaacttgcctaacttctctccccaaggccaggagaaaatgtgaatgagggttgcttctgaacccttgcaggccacactggatgctggttaaaagtacagattctcagttctaccccagacctacagaatcagaatcttcatttggttgggcatggtggcttacacnnnnnnnnnnnnnnnnnnnnnnnnnnnnnnnnnnnnnnnnnnnnnnnnnnnnnntttcaaggctgtagtaagctatgattgtgtcactgccctttagtttaggcaacagagtgagaccccatc

SEQ ID NO: 267673 - DNA, 968 bp, Homo Sapiens
  misc_feature (898)..(913): n is a, c, g, or t
ggcatgtatttgaccctcctctaccctcaaatttttttgcaacaatgaaaatgctgaggatacagtgttcttcatcttaacctcatccttaggcagccctactctaagtcttataaaccatcccatcccactataattatcgaaataaggaaaaggtataagggatcatcccagacagtgggatctgagcatctgagggatacaccataggctgacttcctgggacaaagctgcagccttggagacccttctgaaaacacaccttgtttgttacataaccagccgggcaggggctgactggatcgtgcagggagcagtacaagagtgattctggcatgcctgtataaacacaaaaaagaaccccttgaaagtgcttacattcaacaatgacactgtattatagcagggagcagcttcgcaatgtgtactgctgaataaagcaactctaaacactgtcaataggttgtatctgaacttggaattagagaaggcctatcaatatgtataaaaagattactaatctaaagaaagaaatataaagcttcacgtctaataaataggtactgagctgctacaaaggaaagatgtatcttaaagcacaatatacaatgaaagtatttagtgacatgttgatctcatttgactttacttaaagaatttactatcaaatatgcttattccaggtaccatccaaggggaactagctaccgcaaagataaaatgatatgcccacaaagtgatctcactaataataaatctcaataatatcatgggtccctaggggcagaattttagagaagctataggatgctgcaaatggatcccattcttagtaagtttcattgattcacgatgacagtttcttaagttcttcagtcaaaaagacaatcattttttnnnnnnnnnnnnnnnngtttagtaaaccatgtgcctaaatatcatatgctagcccacattttcgttaagga

SEQ ID NO: 267674 - DNA, 946 bp, Homo Sapiens
aattctggtatattttgtcttattctttttagctcctgtaacattgcatacaaattatttatattaatagtctttaggacttgggtgaaattcttgaattatgaataattttagggacttatttctataaatcatattgcatcaacaaaaatgcttggtatgtagaaggatgttactggaagagagacaaataattactgaaataaatgttatttctaacaatttctattcaaaatttaagatatttgtattcaagtggtatggctcaggggagatgaaaatgcaaattagtgaaaaatgatctctcatttttggcatgtttacatactcgacttcgcttctttagtcattaccatgaatggaaaattgtggctgatgctgaagataaatagacatcattagtgtttgttctagaaattatatagtagctgactgaaagtggtaagaaaggtattcatgaagctttgtatctcttaacaatttggtttagtacccggagttacaatataaatagaacaaactatttttttcatgaagacctctgaacatatacctgaattttggctatgccttctgaaattgtgatgaaaacatagatagaaagcatcataaatgcatgcccatctgcaactgtttgactataaagctgtcagtgaagtagaatatcggaaatattttcatagaaatgttcgttggaattaatattttctttctggtggtggcaacaagaggacttgtcttaggaatgctgggaaacgggctcattggactggtaaactgcattgagtgggccaagagttggaaggtctcatcagctgatttcatcctcaccagcttggctatagtcagaatcattcgactgtatttaatactatttgattcatttataatggtattgtcccctcatctatataccatccgtaaactagtaaaactgtttactatt

SEQ ID NO: 267675 - DNA, 740 bp, Homo Sapiens
  misc_feature (625)..(693): n is a, c, g, or t
ggccgcttaattaaggaaagcaataaatagtattttagatttttgaccaagaaagtatgtccatcaaattagggtttttaggttgttcagccaaaagaagagactgcaggaagacaaaccaattaaaagaatattccactagtgcaggcatgagccaatgatgacgtggaagaggaagacaacaatgggaatcaaagaggacagagcaagatatattatagtattccatccaccttaactagcacccagaaataggagagaaaaagctaagaggaatatgaaataccaagcctcagaaagaaactaatttgaatgaagagaaatttagatttagacctcagtatgaggtatctataagatgaaattcaaatccaacaggcaagtgtaggtcctaatgttagggtcctggtctctcacaaaaaatatggtaatttctaaatgtttccatagaattttccaaaactattcagaatattatttactgaattggtaaaatttactctctatagtcatctatttccattcactggtataggaaaataccagaattggaaatgtacattttgaggctctggagatacagaaaaataaaaataaatagaacttcgttattacttttaaagannnnnnnnnnnnnnnnnnnnnnnnnnnnnnnnnnnnnnnnnnnnnnnnnnnnnnnnnnnnnnnnnnnnncttgagtccagaagttcaacaccagcctgggcaacatggtaaaaccc

SEQ ID NO: 267676 - DNA, 977 bp, Homo Sapiens
cctgtccagtagtcagtaatctgtataaaatatttcagagcatatatctcctccaattccacacagcacagaaaccaacaaagcagagagagcaaaaggaaaacatgttttcttagcagagactatttcattatgaaacactcattgtaagagctattgccagtagaaaaagtatgttgccatgccttctgatttaagggattcagaggtttcacctgttatcatgacaaccttttgaaatgtcagggctttgagctcaagtagtaagtcaatgaccatgacaatagtgtggactgtgaatgtgcccaagtccttgaatcctacagaccttgctaatggctccgttcacgacacccaactgggtcctgaactcttaggattaacccgtttgcttatggctgaggaacttggggtctacaggacaggtggctcctccaagtcttaagtctcatgaaaggcagaaccagaatgaagatccaggtctcctcctaggtcagctagtgcttaaatgtgagttactgtcactttctagaaacctcctttttactgcacatttttctcaaaagtggtatgtttggaaatcctgtgtgtgtcacacatggtggagaccaataaatatatttttgaagcaaatgggcagtagtggctaataagagaagtggtcacccgacatttttgaagccaaataaatcttctctatcctgccggatattttagaagctaaataaattcccccaattaccctgagttccaataaaaatacttactttaagaacagaatgagccacttataaaatggtgacagctgaggcataccaaattatactcttactgtttcaagaaaatgaaattgaaggatgagtagttatttttgttcattttttccctgagtagtatataattaaccaaaagtataaatatgatgttgattgatcatctctagagtgatttcatgatacctgaatagtggaaaaaaa

SEQ ID NO: 267677 - DNA, 856 bp, Homo Sapiens
  misc_feature (395)..(395): n is a, c, g, or t
  misc_feature (417)..(417): n is a, c, g, or t
  misc_feature (564)..(616): n is a, c, g, or t
  misc_feature (683)..(757): n is a, c, g, or t
  misc_feature (832)..(832): n is a, c, g, or t
ccgtaggatctgatctaaagcataagttaattaggtgggtttttctgtagaccagacattgtaataaaaccaaaatcagttttgttttggtttaatgggtcctggttggaaaaaaactgaatatttcacatgcctggtttttcaacgtcttttcttggctacattccatctttggcaaaatgttggaaaaccatggaagtgaaataattagccatatggcaaatattggttttgttgaaccaagtcagacctttggtcagtttattctagtttatgcaaacagtgtggccaactaccaaggacgttcatgggctgtgcatgaacatgtccaactgtacacacagagtatttgtctgcttaggtcctacccacgttatctcaggtctctttgactnacctatatctaagggtactgtntcaaacactaaattaattgtaattttgcacataggaaaataacaaaaatcttatttacttattatattgtgaacttcaggtttgtctttatggctgagagataaaacttgtgaaacatcttaataactaagattatccttggccgannnnnnnnnnnnnnnnnnnnnnnnnnnnnnnnnnnnnnnnnnnnnnnnnnnnntagtgagactctgtccctaggtggttatgggtgatgtgcacctgtagtctcatctgctttggagttnnnnnnnnnnnnnnnnnnnnnnnnnnnnnnnnnnnnnnnnnnnnnnnnnnnnnnnnnnnnnnnnnnnnnnnnnnngattatcctttttcagtacaaattggaagaaacatgattaaaataattattaagtggtaaaacatggattaaagngattaaaatggtaattaagcggcc

SEQ ID NO: 267678 - DNA, 396 bp, Homo Sapiens
  misc_feature (17)..(17): n is a, c, g, or t
ccaaaaatcggcacgangaaaatggaggtcctggcagttggagatcaggctgtccatagcacactgatgtggcacaggcaaggaatatggctgaggcacccaatttgctgctactgctgtctaacaggcattggaagtcttatgtgttcaaaaataaacttctgatttcctactcccaaacctgctcttcccacatcttccccgtctcagtaggtggcagctctatttgtccggttactgagaccaaatattagagtcctccttaatttcctctctctcatgcttcacattcagtttattaataaatcctgttgacagcctggggcaattatgggcaagaattccattcttcaccaaaattaaattaaaattaaggccagggtgttgggttggtac

SEQ ID NO: 267679 - DNA, 787 bp, Homo Sapiens
ttgccaagatgtgagagggagattctgcaatcatgacttctggagaggccactgcacaaggctctaacgccttcatctgtttatacacaggctcaatctgctagctctataggagattccaggataccaaataatcatcatcataataattattacatttagagacaagttgttccttttttctggtcaaaataatgagactttccagaagagctgaacattcaaatttcaaatcatttcctttagtgtcagtcctaactcctcttaatacaaacctttctttttactcccaaagcaacctcaatccaaagtattaactagagctgcaaattaaaatttcaaactaggagtggattttcctgattaataattgtctgtggaaggtgaaaaaaagcactgcctagagcagaagtcagttcatgggccatttctgaggttgtggccctgagctaacctccctcctccccagaccgcagtaagcatctctgtaaagtgggcagtagtaggctatctactaaatccaccaccccttcgaccccattcttggaggtagcagggattccaactttgcaacacacacccctcctctgctgtcacaaagccactctaacttcacagcctgtaaggcaggggcagggtgccacagcctcactaccaccctcctgtggaaggtgaaagcagtccccttctgaatgtggggtgcttacagacatcaaaactccttatatcattagagggtgcaaggacaaagcccattgtgttgtctctctgcaactaaaccataagc

SEQ ID NO: 267680 - DNA, 406 bp, Homo Sapiens
  misc_feature (271)..(324): n is a, c, g, or t
  misc_feature (335)..(335): n is a, c, g, or t
  misc_feature (358)..(358): n is a, c, g, or t
  misc_feature (368)..(368): n is a, c, g, or t
  misc_feature (380)..(380): n is a, c, g, or t
ggccgcttaattaactggtaacctcaaaattcgtggcctgtcttcccattcaccccgcttttgactattgtgctcctttataattctgaaaactaatcagcactttttaacaatgtttataatcctataagtctagatgtatccaaaggtgaagtatgtaaaaagcagcaaaatatttatttcaaagacttcacttctgtttcctgaatctaaagaaagacaacatgctgctttttaatcataggatggagaattttaaagaactgtttgnnnnnnnnnnnnnnnnnnnnnnnnnnnnnnnnnnnnnnnnnnnnnnnnnnnnnnggcgggtgggntcacaagggtcaggcaggatcgnggaccctccngggcccaacatngggtgaaaaccctggtcttctacctt

SEQ ID NO: 267681 - DNA, 833 bp, Homo Sapiens
  misc_feature (291)..(593): n is a, c, g, or t
  misc_feature (746)..(783): n is a, c, g, or t
  misc_feature (792)..(792): n is a, c, g, or t
tagggagaaagaattatagttaagagtttgtgtaagcagttgtgttctcaggcccaaatcttaaattcacaaaaactaacaaaatttcacttcagtctaactgccaagtctttaatatttctcttcagaattcattttgaagttttttcataacccatatatttaatcatttcatttaggttattaatagaattttcttcttatgataacataccttgtaagcatgaatattttaggtgtcaggagtcattttagatgggcaatgtaaaatttaagtaaatgtgaataatnnnnnnnnnnnnnnnnnnnnnnnnnnnnnnnnnnnnnnnnnnnnnnnnnnnnnnnnnnnnnnnnnnnnnnnnnnnnnnnnnnnnnnnnnnnnnnnnnnnnnnnnnnnnnnnnnnnnnnnnnnnnnnnnnnnnnnnnnnnnnnnnnnnnnnnnnnnnnnnnnnnnnnnnnnnnnnnnnnnnnnnnnnnnnnnnnnnnnnnnnnnnnnnnnnnnnnnnnnnnnnnnnnnnnnnnnnnnnnnnnnnnnnnnnnnnnnnnnnnnnnnnnnnnnnnnnnnnnnnnnnnnnnnnnnnnnnnnnnnnnnncagttaattacatttttcaaaattatagtaatgttttttctgattgcaaaatattacctattttctgttaacaatttaaaagtgtaaagaagaaactgaaaattatatttagcttcactgtataaagataactactcttaaaattccttcacnnnnnnnnnnnnnnnnnnnnnnnnnnnnnnnnnnnnnnccgaatttncatatatatctggatttaatttaaaaaatgagaacctaagt

SEQ ID NO: 267682 - DNA, 782 bp, Homo Sapiens
  misc_feature (49)..(140): n is a, c, g, or t
ctatgcctgtatcccagcactttgtgaggccgattctcctctatccagnnnnnnnnnnnnnnnnnnnnnnnnnnnnnnnnnnnnnnnnnnnnnnnnnnnnnnnnnnnnnnnnnnnnnnnnnnnnnnnnnnnnnnnnnnnngagtgagccaccacacgtagccagtcctggcattttgtagaaggatggccaacgcagcctgttgacccttcctggccatcacatgaaaatcagcgactcttccttcttacaaaactcggagcttctcaggataacttggtgaaacgtcccccgctgtgaacctcagtgagcccacctgtaatatacaggtgagggagaagaccagaaaagctcagtcagagtgacactgacccctgaaatgatgggcacaatggagtgtgtggcttttcctgtaggacagggaggtgcttagctgtaatttgaactttaaaggattccagtcctccgaaaaacaggattagactcaaatcaccttgaaccttatcatctcacggctttgacccacctacatggctccgtgtcccctgcaggcctcgccccggagctctacaatcctgtgtgcagttgtctccgcagctctctgctgggacatcaaacaggcatctccaccttcatgtgtctataagtgacttcctaaacccccaaacacattcccttacagtcctacacatctcagatgagggcgacagtgtacttctgggtgcttagctgagttgacaccatgtattttaaatatggaaaataaattacattatttgtaaa

SEQ ID NO: 267683 - DNA, 962 bp, Homo Sapiens
  misc_feature (179)..(180): n is a, c, g, or t
  misc_feature (314)..(434): n is a, c, g, or t
  misc_feature (448)..(552): n is a, c, g, or t
  misc_feature (883)..(908): n is a, c, g, or t
tgagttacgacagcttatacttgagaaatatttattgattagtatttgtatgtcaaataactagctggatgtgttagccaactcccctcattaaagaaaaactatcccagcatgttcacttcatcatactgtactcttgaattatcgttagcatttagtgctcaagtcgtagcttgganngtgggcaaacggagtagcaaagccaaatacaaaaatacctcatttattgttatataaaattctaagtcagtgagttttccaagtgactaaatgttaagaataaaaactttttgccaggtgtggtggctcatacnnnnnnnnnnnnnnnnnnnnnnnnnnnnnnnnnnnnnnnnnnnnnnnnnnnnnnnnnnnnnnnnnnnnnnnnnnnnnnnnnnnnnnnnnnnnnnnnnnnnnnnnnnnnnnnnnnnnnnnnntaccatggcatgtnnnnnnnnnnnnnnnnnnnnnnnnnnnnnnnnnnnnnnnnnnnnnnnnnnnnnnnnnnnnnnnnnnnnnnnnnnnnnnnnnnnnnnnnnnnnnnnnnnnnnnnnnagacagagactctgtctcaagaaaacaaaacaactttaaaaaattctaactgctttataaaaatgttcctgctttcttagaatattcttaatacttatttactttgttgataaattaattccctatgaatgtccattcttttactgtgtttagtggagtgatgcctgtcggggctaccttacacttaatggtcatattttgagttataatttattcctaccggcagggcacggtggctaacgcctgtaatcccagccatatattttttaagtgttacaaactcccttgcatatcacagtgcctgtacctgtttttgcctttctgttgttgnnnnnnnnnnnnnnnnnnnnnnnnnnaatctgtaaggagcatcctccaggatttataaaaacaaagaggaagtcaaacct

SEQ ID NO: 267684 - DNA, 498 bp, Homo Sapiens
  misc_feature (191)..(191): n is a, c, g, or t
ctgctgctaccacccaccatgggcatgagacggtttggtttcctggcagcagagctgtgtaggaggttcagtctgttcccctaccacacctaaaactctttcaaccaaacctgcctcaggctgggaagatacagaattttcaacagaggggggagattcactcgggctggtcactggagcttagcagtganagatcaaatcaccccaagaccacagacactgtgttccccaggagttgcatggtctttggtccctaaaaatctgagggctggcagactctggacagtttctgcgggtctccagccagcatgacactggcttgtaccccagggcctggagctgctgcctatatatgctctatatagtaggcataggcaggttttagtatcaaaatattgtacctggctgatatttgtgaatttggattggtgaagtggttcttagcattggctgtgctagagtcaaactctcctagacaggaaggagcttgggtatttt

SEQ ID NO: 267685 - DNA, 501 bp, Homo Sapiens
ggccgcttaattaagcagcaccaggagttgattttggaagccaccagcgttccagacatttgcgataagtttaagcagataaccaaagggagtttcgtgatggagtgtcacacgtttatgcagaaaatattttcagaacctggaagcttatccatggccaccgtcgccaagctccgcgagagctgcagggcccggctgctggcacaggggtgagcgtgcctgtcccctgcgttgctcgtctctacactgacgatgcccctttccagagttgacactggaccaactttcactgctttcctttttagtgttgtaaatacttgacatcgctacactttagttgtgaattttttaaaagagcagtttaaaatcaggtcattctaccagcttttgatgattagctatgaagtcatactttttaaagaaaacttatttttacctgagagatcaataatatataaaatgttgagtgtgggtttgtatctaataaagtatgccaacacc

SEQ ID NO: 267686 - DNA, 419 bp, Homo Sapiens
tggagtgtccacacgtttaatgccagaaaaaaattttcaagaaaccctggaagcttaatcccatggcccacccgtcgcccaaagtcccgcgagagactgcagggcccggctgctggcacaggggtgagcgtgcctgtcccctgcgttgctcgtctctacactgacgatgcccctttccagagttgacactggaccaactttcactgctttcctttttagtgttgtaaatacttgacatcgctacactttagttgtgaattttttaaaagagcagtttaaaatcaggtcattctaccagcttttgatgattagctatgaagtcatactttttaaagaaaacttatttttacctgagagatcaataatatataaaatgttgagtgtgggtttgtatctaataaagtatgccaacacctgta

SEQ ID NO: 267687 - DNA, 608 bp, Homo Sapiens
  misc_feature (160)..(160): n is a, c, g, or t
  misc_feature (451)..(453): n is a, c, g, or t
  misc_feature (455)..(455): n is a, c, g, or t
  misc_feature (567)..(568): n is a, c, g, or t
ggtgttggcatactttattagatacaaacccacactcacattttatatattattgatctctcaggtaaaaataagttttcttaaaaaagtatgacttcatagctaatcatcaaaagctcggtagaatgacctgattttaaactgctcttttaaaaaattncacaactaaagtgtagtgatgtcaagtattaacaacactaaaaaggaaagccagtgaaagttggtccagtgtcaactctggaaaggggcatcgtcagtgtagagacgagcaacgcaggggacaggcacgctcacccctgtgccagcagccgggccctgcagctctccgcggaccttggcgacggtgggccatgggataagcctccaggttccgaaaatattttctggaaggcaaacagttagtttgaaaacaaacccaacaacccatttctacgttagctctcccagactnnnanaggcagacagacaggcctcgtgtgaggtgagggaggagcagtccacatccaagggcttctgggtgacccacagattgtcaccatctcactcctccctggggcctaggagctnngctttgctgctcagaaatgttaaatgaatcaaactggtgg

SEQ ID NO: 267688 - DNA, 810 bp, Homo Sapiens
  misc_feature (266)..(266): n is a, c, g, or t
  misc_feature (527)..(527): n is a, c, g, or t
  misc_feature (652)..(652): n is a, c, g, or t
  misc_feature (749)..(749): n is a, c, g, or t
agggaagcagtagcgacatctgggcatcacttgacagcgtggcttaggctgctcagcacgtgcttgctagagaatccctgatggctgttatggcttacacatttaaccacttccctttggtacatgtgtagaggtgctgggtaagcatcttgtcaactttaacacagctgacaaagttatgacaccaagaatgcttagactttgcagttttccccgaactccggctgatcctgttaaaatgtctctccttacagagagctgatttngtgcccccaaattttctcatctcagcaggcaagggtctctttgccagaaaaaagaaaaatctgttgtcatccagatactctgatttagcattatctgagaggaaggcatgtttcctatctggtttgttgctgattttccagttggtttccgtgggacggagccatggagaaggatgcaggaggatagctggagacacttgcatttttaagctcctctcctccaatgcaaagccttaaaatgcgtgggattttccctcttgntaaggctgcagtcttcatgcctcttctcagttggagagtgataaagtttgaacaaatccctttatttatgttggaagtatctgagtgtgaaaatccttttctgcccttaaaattactcgatccgnttttttctcttttttaaatgatcagtttaatacatgcccattatagtgaaattagaaattacaaacaagaaccagaaggaaaagttgctgaagttcnctaccgtgtatccctgcagatgcgttcccatacagatgaacagatataaatctgtattttg

SEQ ID NO: 267689 - DNA, 408 bp, Homo Sapiens
cctgttccctaacacccccaaccccaatgccggaaaagagtaggaatcttaacaactcagcccatgaggtataaaaccaaggaagccagagttcacgtagtatataatatggccacctaaggaaattctacagtggggactacgggtggcaatggttttaaaatagggagcaaccccaaatttgcccaccatcaaggaagagagcttggtctgtcagggcaggaactgactgtggcagtttacattatcggtaggcttgtgattcaacccccaaagataggtcattctcttgctgaaaactctccaatacctccccaaaatatattttatgtgaaataaaatacaaactcttgaccatggcctataatacccagaatgatctggccgcacctcccactctgacctcat

SEQ ID NO: 267690 - DNA, 524 bp, Homo Sapiens
  misc_feature (496)..(496): n is a, c, g, or t
acaggcacaagcaccacaccatcccgctagctggttttgttgttgctgtttcagatccatggtctcacaatgtcctcaggagctgaatgtgacctataggtgggtggggattggcccacagatagatagttttaaaaatacaaatcttgaatttaatgccaacattggagaactggttaattacacataaaaagcaggatttccattttcacttgagttaaacaacacacctggacacactggtgatcgtgtccatcggtagcatcagctggagtggatgtgctgggcctcagcattggcagcgtgcctgggcctttgaaacagttgctcttagctctgcctcgttggccataggatttgaggttgtggcctaaccatgtcatttcagttttgttactagctaataaatcccttgaagtcagagattgtctaataattttcttcattctcccactgcctgggcgtagtaccgggacacatagtaggtggcccaggnaaattaaattggtccaaaaaccttccgg

SEQ ID NO: 267691 - DNA, 451 bp, Homo Sapiens
  misc_feature (30)..(30): n is a, c, g, or t
tgacatctttcaggtgtgggaggggccccngttaaatagggcttgaagtgaatccccagcaaaccacagcagccctacagaagaggtacctgactgtcggaaagaaaaacagaaagcaacaacaacatcaaccaaaaagtccccacgaaaacctcatctaaaggtcagcagcctcaaagatcaaaatgagacaaactcatgaagatgagaaaggaatgaaaaacccctcacaactcaaaaggccagagtggcttgtttactccaaatgatcacaacacctctacagcaagggcacagtcctgggtggaggttgagatggatgaattgacagaagtaggcttcagagggtgggtagtagcaaacttcactgagctaaaggagtacgctctaacccaacacattggaacgaatcccagaacttaaagattggttctctaaaataagacagaca

SEQ ID NO: 267692 - DNA, 675 bp, Homo Sapiens
gttagaatactgatttttctaattacttggcaagggatcacagagatgaaagtttgctcttgctgcattccttggtgtctctaggaaaaactgaaagcctttcctccaagatctggaacatgacaaggatgcctacttttcaccactgttattcaacatggcactaataatgagtacaaaaaaagagcagtcagacaagagaaacaaataaagggcatccaagttggaaaggaggaagtcaaagtacccttgtttgcagataacgtgatcttatatttggaaaaacctagactccaccagaaaactattagaactgatcaacaaattcagtaaagttgcaggatacaaatcaacatacaaaaatcagtagcatttctatatgccaacagaaaacaatctgaaaaagaaatcaggaaaggaattccatttccaattgccacaaataaaataaagtaccctcaaaattaacttaacccaaagaagagaaggatttctacaatgaaaactataaaccactgatgaaagaaattgaagagggcaccaaaaaatggaaagaaattccatgttcatacattagaaaaattaatattgttaaaatgttcacactacctaaagcaatctacagactcaatgcaatccctatcaaaataccaataacattcttcactgaaatag

SEQ ID NO: 267693 - DNA, 516 bp, Homo Sapiens
ggccgcttaattaaggatgtgcacaaacattagcttaaaagatattattacaacattatttataagagctagcaaaaaatatggcaacagcctgaatgtctaacaatagggaataggtcaatcgaaagagccttcgttacgtgtatttgaattccagttctagcaatgactgcataaccccttggacaagttgcttaatcactgtagccctcagtttttctgaggcaaaatgaaggtgataataatgcctacctcatggggttgctgtgagaattgagtgagataaaacgtgtggcacataataaaagtgctgcttattattatggtacgtccttacagtataatattcagcacttaaaatggtgttgcagatgaattttaacatggaaagactcagaatgtattaaattatatatattgagtatatatgctttataatgagaaaaaatgtgagccaccgcgcccggcctgcagcctcctctttctaaaaacaggttgcagggtgctcatggtgct

SEQ ID NO: 267694 - DNA, 489 bp, Homo Sapiens
  misc_feature (33)..(33): n is a, c, g, or t
  misc_feature (46)..(68): n is a, c, g, or t
gtgtttgcttgcttgttttttgcttcttggacnttttgtttgattnnnnnnnnnnnnnnnnnnnnnnntgaaatcagtggctgtttttgccctctacttaaaatgatctttaaatgggctcatagcatttaatctgttctggcttgagaagtctttgtttccttgtaccactagagtgaggcattttaaaaattagtacacatatgcctgaaaatgtacattagcatagaagtcgtatgcagtggttagcgttctggttttaatttcatcttaagaaaccaaaactagtgttctttgtgtgcttttagtgtcatctcagtaaagttctgctaagtaatgaactcaactgttatgtttatattttaggagatgggcagccataagttaaaaagaagacaagctgaagctacacacatggctgatgtcacattgaaaatgtgactgaaaatttgaaaattctctcaataaagtttgagttttctctgaaga

SEQ ID NO: 267695 - DNA, 161 bp, Homo Sapiens
  misc_feature (118)..(118): n is a, c, g, or t
  misc_feature (131)..(131): n is a, c, g, or t
  misc_feature (150)..(150): n is a, c, g, or t
tggtggggaaataaatatttggtcacttctattgtctcaaatttatttccaagcattaatatgaatcttaaggctacaacaaaataatgtatcttgtaagagagatgaatggacaggnaaaaaaattagangtcttcccaaccactcttntacataggggt

SEQ ID NO: 267696 - DNA, 457 bp, Homo Sapiens
  misc_feature (26)..(26): n is a, c, g, or t
  misc_feature (35)..(35): n is a, c, g, or t
  misc_feature (63)..(63): n is a, c, g, or t
acttccattaaaaatccttcccctgncaactccanggactatccaccattttccactttaacngttccaaaatatagaaccctcagagttaagtaacttgccctaacatgcccagaaaattgtaggtccccaagatatacaacgaaagcccatgcgcattccctaggacccatatatcctgcgtactttaatagcaaatgaaaagtcactcaatagactgctaaattgttcaacatgtaatcgtttgctaaatctcagaagatggaaagggattatgtgtgtatgtacttgcacgtaatgttttagaacaggcagatagatattagctgtttccccctggatggtggaaacactcaggacttcagaggagtagcagcagaaaaccattacaacacacttcatatcaagcagattttgcaagtcaagtaattgcttgtaaacataacaccatggaata

SEQ ID NO: 267697 - DNA, 866 bp, Homo Sapiens
  misc_feature (25)..(25): n is a, c, g, or t
catcttcttgaaatgggctccaagnaagcaggtttgtggccagtagagccagctcagaacccaggagtggtacaaaaagcattcagatatcaagattcccctcctggctgcatcttccatgggggaggccatgaaaggggcccctggtgaaccattgagtcatttatagctaatcttagtacactccctgaagtagggaatgacatgggctgcaagaattcttcctaagcaccccagagagaacttcaccgatttaaaatatgagtttctgtaacctgagcaggagcttgcctgggtgcaagggcttatgcagcctgcctgccaggaggccagagggtcgcacttatgagcttgagcaaatggggcttttgggaatcagcagcctccctgagctttcctggagcgagctgaactgaccctgaacttggagggcttgcctggcaggcttttgctgtctcctgatattgcagtttcaacatgagaggggcaggaaatagaagccccatgcgttgaaggactgctgtgcctgcacttatctctggccagggagtccttggacactgttttctttggcagccagctggtctaggtcacttgaattcctttgaagttcagggatacagggagcggtagccactgcctgcattccttactcaggaggcaggcatggggtctgccattgcttacctgccagagaacccaggccttcattagaaaggtcatttttatgtgactatgactgaatagtccagccttttccccttaagtgggattttgtgctgattcagcagtaaagaataagcccataccccccatttttgttgccattgctcacatttgaatttataggtggagaattggtgaag

SEQ ID NO: 267698 - DNA, 783 bp, Homo Sapiens
caaagtgctaggattacaagcgtgagccaccacgcccggcctgtaaagggaattcttaatccagagtcttgggtctctttaaattgtatgcattcttaattttggaatgtgaatatgcacaattttcttgggaggtggtccataggcttttgtcagatactcaaaggagcccatggaccccaaaaaggttaaataaaagctaacgtttaaaaatattttggtatatattcattattttaaaaattaatgtatttcatgttgacagaatttatatatacaaaggcttacttgaacatgtacttttgggacagcttgtatgatagagactacaggtttgtgtggaagccacagtttatgcacatacaggactggtagtttttaagttggtgaaatttgtccttgatacccttctaccatcttaccctttttcataatcctagtaacccggccttgaggcccagagcctcattttactggcccttaaatgctccaaaattacccacttttttcctttgtttccagtctctacccccctaacttcatcccctgtccaaaatattatgctaatcctaatcagtggaaagcagttttattaatttatttaaaatatttgaatggatggtaattacttgatgttacaaaaatagtttggtttcatattttactaaaatagtcacagaaacttcttttaggctcctatctttgaattcctttctgttgtgggtacgactggctggggctggtgttgcaggtagtaaaataatttacccaagacagtcattg

SEQ ID NO: 267699 - DNA, 698 bp, Homo Sapiens
cacaaaaaagtgggccgccgagactctcaaagtagcaatgaatttttaaccatctcagactccaaggagaacattagtgttgcactgactgatgggaaagatagggggaatgtcttacaacctgaggagagcctgttggaccccttcggtgccaagcccttccattctccagacctgtcatggcaccctccacatcagggcctgagcgacatccgtgctgatcacaatactgtcctgccagggcggccaagacaaaattcactacatgggtcattccatagtgcagatgtattgaaaatggatgattttggtgccgtgccctttacagaacttgtggtgcaaagcatcactccacatcagtcccaacagtcccaaccagtcgaattagacccatttggtgctgctccatttccttctaaacagtagatacttctgatggattctcggcattaactcctgtttcaaaaaagtgtgaacagttttatgaatttgaaagaaaatttggtagctctttatagcattcattcttaaagatcagtcagaataggtgatttctaaataaaccaaatagaagaatgaagtatctctacagggtagtaacttgattcctcttcaggagaaaagggagctaaattgcaagctctaactaagggtttctgctactgacatcacaacacagaaatgcaagtgtggtactt

SEQ ID NO: 267700 - DNA, 572 bp, Homo Sapiens
agtacgaacaaggtcctgggtccctacatgtcatactggctagagactgggaaacagattaactgagagaagccatcaagcctgaagagacatcgtgtttgaaatgtgtaaggcacagtgtacccgccgtggatcaaaacaacctgaaggacagacagacagacacaccgaggatcagcagatatcagtggggacaggtgctgatgatggtgcaaatgagagtcatgaaggaaagttaaatgatgaccaaagaccaagtaccttccccacaatgctttgacaagcgcttttataagcaccctgggaatttagacactacccggggagaaaaggaaagggagacaagcatgaattgtctgagaaacccctgaattaatcatgtgtaccccaatgcaacaaggatctagatatagaataattttaattatagaaaacaaaattatattttacccacccatatttgatgcccatgaatttcacatctaccttacgtgcacataaaattcaagcttacatagacggaaaacaaaaaatcaagaagcaatatttgccttctaataacttatctattg

SEQ ID NO: 267701 - DNA, 770 bp, Homo Sapiens
  misc_feature (40)..(40): n is a, c, g, or t
  misc_feature (485)..(485): n is a, c, g, or t
ctcctcaggctggcctgggttatgctgcacgtggtgatgnagggaagctgtggaaagctggtgggtaacagtggtagggtaagtgtaacacagcatgtgtgcacatgagagcaagagccaatcagcaggcaggcaggcgagggagcacaggccgagcactcagggaaggatgatgatttgggagctgaatctgcaaacaggaccattccaacacaaagaggttcaggaacaacagagggacatcaccctcagcctaagcatgccagcaaaagttgatgctgagagccctggtgggatggggtagggggccaaaaagccaacaggaggaagaccaatgctgggaggatgtggaaggggaggtaacggaaccgtgaatgcccaggatgtcggcagccacccggagtgcactgggccaacctcaaagcttaaatgtgggcagaaatggccttgtttcccttaatcaggaggcaaaacagatggtaaanaggagatgctggtggagagcctgcaaaagggggaaatggctgcgggctcatcttactcagctcacacgctgggaaataccacctagatgggcactgcacacactgaggacgccttgcactggaatccaagagggcccttccctactctgcctgatggggcatgccaggctccagcctgattcagaagtgaccctggagaagagcatgcccttcgcacggacgctcgtctagttcccacaaccaccaggtggggcaggaactaatcagaaaattatttttgaaaag

SEQ ID NO: 267702 - DNA, 764 bp, Homo Sapiens
  misc_feature (242)..(242): n is a, c, g, or t
  misc_feature (259)..(259): n is a, c, g, or t
  misc_feature (263)..(263): n is a, c, g, or t
  misc_feature (267)..(267): n is a, c, g, or t
  misc_feature (278)..(278): n is a, c, g, or t
  misc_feature (685)..(685): n is a, c, g, or t
ccttgattgtgggctattgattgttgatagaatcaccaccacacaaatcatgacaaacaaaaatattttggaattgccaaacatctcctgtggggcaaaattacactcccaccccgcctcctgcaaccctccatctcccattgataatcactgtcttagggcactgcagatactgagtgattggtgtgatgggatgccatacacacagaatggggagtccaggacttaggacactgaccttnggcaattcccttaaacnccangggnttcgggttccnagtagaatgaagtagatatgcagaaaaatgagcaataaaggggaaaagttgccaggatagaaatacataaggaggccgctaggacaacgtaggaggtcaggaagctttcatgttgatagtgttgctttgtggagttccccagtcattgcgaacttcatatcttatttatctctaatctggtatttggcacatagtggatgcatagttccagatatttcagtcatggtgtctgcactcaagaccactttttaactaaaagaattcacccatagcccctgctgaatgcatagcctctctgaatgtgaaagtccctccacctctgccatagttgactggactaaaggtggtgcctgtgacgagggcaaccactctactgggatggcagcaactgtgagaaggggtgagtnggggccaatcaggttattctcccttagggaggatggaacttcaaaaacacaacccaggggtgagccagcagtagtaggg

SEQ ID NO: 267703 - DNA, 563 bp, Homo Sapiens
  misc_feature (196)..(196): n is a, c, g, or t
  misc_feature (317)..(317): n is a, c, g, or t
ccctttagacctactgcttccaagaatgtttattatctagcatgtgactattggggatctataaaaattgctataaaactgcattataattagaataacacttgtggtaaagaatgaaaagaaaatatttgtaaaagcattgttataattcagctgatagactaaaaaaagaccacagagtaaggtttttgcttangactttttaaatcgctctaaatattgtgctcttaaggtgatactgtgtttgagagtcttacatatttataagtttgtcagatatgtcttacagtgttttctactaaaatatatgtaaattntaatagactggttcctattaaactgagtgaaaacctaaccatgagtactggttattttcagaaactcactaagaaaggaacaaaatttagtgaagacgttgcatacttaggctactgcgtataaaaatagcaattaagagcaaagactttggagttatccagacccaagttataccaactcagagtccaataatataattatcaatgtctaggttgttgtctacttctatataaaatctattttat

SEQ ID NO: 267704 - DNA, 640 bp, Homo Sapiens
  misc_feature (548)..(548): n is a, c, g, or t
  misc_feature (580)..(580): n is a, c, g, or t
ggatacaatccctagaacttgcgcaaatttctcaggtaaaaccacatgtgcatttgtgtgtatatacaactgcacagtcactgccgggctccttcatgctgctgtgtgtagctgcaccctgacccctggcaaccatgaatgtatttgaatttccaggaatctgttctccctccctatgattttgtcatttcaagaatgttatgtaaatggaattatacaatatgtaaccttttgagtttatctttttttcactcagcataatgcccttgagtttgcacctgacatttgatagttcattttattgctaaatagaattccttggtatagatgtgtcacagttggttaaactagtcacctgttgaagaacatttgggtaatttccagtttttggcttttatgaataaagctgctatgaacattcatgtacaagtttctacatgaacataagtttccatctctcttggatcactgcccaagagtacacttgctgggtgatttggtaagttcatttttagtttaaaaggtactgccaagcttttccccagagntgtccatactgttttacattcctaccagcaangtccgaataatctggtttcttcatacccttgctagccattggatgttgtcatttttttat

SEQ ID NO: 267705 - DNA, 820 bp, Homo Sapiens
  misc_feature (48)..(48): n is a, c, g, or t
tgtcttatgctagagttggtagaagaatacagactgacagtgaaaganagctactgcatttttgaatctggaacctgaccgatgctatcaagtgtgggtgatggctgtgaacttcactggatgtagcctgcccagtgaaagggccatctttaggacaggtaaggagatggatgctaagggtgcattagaagacaacgctcagttcttcacagactcttgagatcagccagtaagtgtttattaagcacctattgtgtgttgagtgttgtgcaaagtgctggttatacaacgatgacttaagcctgggggtcctgttctcaagaagctcatgctcaggtggggagatggaaaaacagaggatcatagaaaatgtgttggtaagggccatatccagatatacacaggttattatgagaacactccagaggggcacccaagttgccccggggcaggggcaggatcggaactgcttccctagaactgatgcctgcagaaaatgctttaaaggatcaataggaagtaatgcgttaaaggaggatattccacttgaaaaagacatgagcagaggcatcaaggcaagaaacagtatggagtgtgcaggacactggaagaagtttggtattatttcttagacttaaacaaaggaaagacaagataagaaaggctaacatagagaggccgtgtttgcaaggtaagaagcttgggctgcgtgtgggtgctgggaacccccaaaaggttttaagcagtggtatttaactggaaatgcattctcacgatgaaatcttttcacagggtattgaagctcatgctgtgccgaatc

SEQ ID NO: 267706 - DNA, 782 bp, Homo Sapiens
  misc_feature (727)..(739): n is a, c, g, or t
  misc_feature (752)..(752): n is a, c, g, or t
attcggcacaggtcttctcagaattagataaccacatccatgtttctacaactaactgttgcacctgctacctgaaggatgaccaaaccagagcttctctgtgtacagactgctgactttaagagtttattctctaaggtgatctagagtttcctgtcatttgactctgttccctgtatttattgctttcttccttttctctgaaatgctattcctttaccttctcttacctttttaaaccctaaaagcaagaaagaactttacttataggaagaaagagctagaggaaggaagtgatgtttggagggtaaataaatggaagtttgggcagctttaacgttccagggctttgagctaggcattgagcgttaactcttacaataacctggggagaatagacagtcatttctttttgtagataagaacagagaatcagaggacagtttcattattttcgtacaaaacaaaaagtgcattaagactagtaatgttttaaaaaatcatttgctgtcttttaaactcacagcatagaacggcacttcccaaactccaatgtgcatgggaattgcttgggatcctgtcaaatgtaggttctgattcagcaagtccagcacagatgggtccccaggacactgcatttccgtcacactcccaggtgattctgctgctgctgattcagggagcacactttgaataccaaggacatggactgtgcatttgctagcannnnnnnnnnnnngaagctacaaganggaaaaatatttagatcaaggaaatcagaa

SEQ ID NO: 267707 - DNA, 752 bp, Homo Sapiens
  misc_feature (647)..(699): n is a, c, g, or t
  misc_feature (702)..(702): n is a, c, g, or t
  misc_feature (728)..(728): n is a, c, g, or t
cttaaaagcttagagcaaatcctgttaaatgggacaaagtctcaattcttttttaataagacaaaaacactttatgtagtctcttttctttttcagtgtttctcgaaatttcaattttattccatgctgctacagaatacaaacttacccaataaaaatagcagctccattgaaagagctttcccacaaattgaaatatttaaagcacagttacaggcttgtgtactgttggtgcatacattgtttgatttgttcagttcctcagttttgcagggaaagatgtcaacattatctgatttttcaagctatctattcaatgattctaattctctaaaagacttggaagctgggttgttttttgttctggcccctcagtttgttgagagcctattttaaagatttccggtggatttaacaaaatgaacaaaatttagagggactcatttatttcccccaaccaagtcagtgccatagtgggacccttacataaatttgtcactgtgtttaaatttgatgtagtgaatgaaaataatcatctgaagccagtataaaataggcattaaacattgttgtccaagctagagtgcagtggctctccaccagcatgatcatttaacacacaaaaacctgaaacacctgggcttaannnnnnnnnnnnnnnnnnnnnnnnnnnnnnnnnnnnnnnnnnnnnnnnnnnnntgntaaattaagatttgtagctcttcttnccattccctgcacccttctgagag

SEQ ID NO: 267708 - DNA, 716 bp, Homo Sapiens
  misc_feature (92)..(452): n is a, c, g, or t
ctatatcctttgaaaccaagaatctattacaaataagcttggcctaagagctagagttgggaatgtcccattttcaccctgggttggtgacnnnnnnnnnnnnnnnnnnnnnnnnnnnnnnnnnnnnnnnnnnnnnnnnnnnnnnnnnnnnnnnnnnnnnnnnnnnnnnnnnnnnnnnnnnnnnnnnnnnnnnnnnnnnnnnnnnnnnnnnnnnnnnnnnnnnnnnnnnnnnnnnnnnnnnnnnnnnnnnnnnnnnnnnnnnnnnnnnnnnnnnnnnnnnnnnnnnnnnnnnnnnnnnnnnnnnnnnnnnnnnnnnnnnnnnnnnnnnnnnnnnnnnnnnnnnnnnnnnnnnnnnnnnnnnnnnnnnnnnnnnnnnnnnnnnnnnnnnnnnnnnnnnnnnnnnnnnnnnnnnnnnnnnnnnnnnnnnnnnnnnnnnnnnnnnnnnnnnnnnngtggttcgaaaacaacagatggggcagatgaggatgaggtgatggcagtactgctggtaggaaccagctgaggccagactccaattctagcagggtagaagagtgcatgacaaggcgtgttatagaaagtcatgatacacttacacagactgaatctcactccttgaggatgtgttgaatcatgagaatagtaaccttgaaactgcctttgaaaaattatgacagtaagataaattggacataattgactccatcttgcttctg

SEQ ID NO: 267709 - DNA, 969 bp, Homo Sapiens
  misc_feature (475)..(485): n is a, c, g, or t
  misc_feature (659)..(668): n is a, c, g, or t
agctcagctagatccgagttattgtctcatgaccaggaaaaattaggcacgggaacatcaaagagtgagtggaatagaatttattaagcgaaaaggaatgatctcagcaaaaagagcggtcctgaaagcaggttgctggttgtcttccttcatagttgaacacaagggcttctatatccgctgatggggctgggttccctatttgcatagggcatcaattcttggttggctccaccccatctttccagtgcgcgtgcgggtccttagtctgagccactccacattgatttatttccttactgcgcatgtgttaagggacggaatttttcattgcgggcatgtttgggcaagccttctgtgcacaatgagcttggcgagtcgggggttctccagggaccctcccctatctgcctaggagagttctctgcctcctgcctctatcagtattctcatgtcaatgccaggctgcaatcannnnnnnnnnnatgtgctaaatatacaagtagaaaattatagaatcaatttaactgtaaacatgtaatgtcattatgtacatgatcttaaattatccttttggaagataagtctttttcttttttagtagaaatattaggtcctctgttttcattgttaaccacatcagaatctgtattattacnnnnnnnnnnggaaatcaattgcagtacagcaggcttaccatatggtggcacccaaaagcccagaaaccaacatcatgcggcccagtattagacatgtgttcaaaaatgtaggcagtcagctttcctagtaggtagcaacaggaaataaagcgtcgtaagacgagtcatcttaagagggtgctggaaatgttctacatttttatctgggtggtgattacataggtgtatatgtaaaaattcataaagctgtatttttatttgttcattttattatttgtatgttgcacaacaataaaaaaatttaggctga

SEQ ID NO: 267710 - DNA, 671 bp, Homo Sapiens
  misc_feature (129)..(140): n is a, c, g, or t
ctggatattacatataattctggcatatcaaaaatatttacattgcagccaacacatatggtcaatgaatacaaaaattatttataaatgcacatatatttacaatgacatccctgggcaatagggacnnnnnnnnnnnnttcacaagaatacaaaaatctttgacctggtaccagtgggtcaaaccctgggaatcttgccaaagaccttgaatatcaaagccccagtctcaactatctgcctgaaaccactgaagaatcccaggcacacttcccagaaggctccaaagttatttttgctccttggaaagcaaagtagaacatcgaagtagtgatgttttctcaggaccattctgaagactagggcaatccagcatgttaagcagcaatgtgactcttcctgacaagcagatgcacaccagggcacatccccatggaagcatcaggaagcacatttgccccgtatcttccctctgccggtgctgcacatttttgatgagctgtacccatttctgtcagctgttgccatttcttcatcaggtataagaccaaacaacgcatggcccaccttggtgcggtcagatgcaatcataaagaaagagtaaagcaaatgctgacttcggagtttcttctgagctctgaggtagtaaatgcaaaattaattaagcggcc

SEQ ID NO: 267711 - DNA, 775 bp, Homo Sapiens
acttgcactcgacctacttataatgtttttaatccttgcaatggctctacatgggttatcatgcatgttttatagatacagaaacaaatgcagaggtggtgatatgatcaaggttcacacagttaacaaactgtagtgaggattcaactcatcaccaaagccctcattttttcttctccatcaagttaagagctgaatagtcctatattgtacaggaagggagaggagatcttagagaagttgcgagggatttgcttttgattgagatcattgctatccctggatcagaatgcagagcactcagggagtaggtattttttggcctatggctaccttcattttccattcttgatgcgttaatggtctatggccagtgagagaaacttggaaggagtatatacatgggcttttggagatccctcgaaaggtatacatgggcgagaaatttaaaaactaagttaacaagaaaaagaacactgatatattacccgagatgcattcctggcccctccttcccattaatgccacagctggtcactgattttgtataagtcacagggaagcaaccttctctcattaggcatagatgttaatagagagatgtaagctgaggtcctctggataaaaaaatagatggaaaaccctaggctatcttgtaaacaagtggcatatacaaatcataagaaactaaagacatgttcattgtaacatgaagaccaccaagcataaatgcagtcatctctttcaaataggagttagttagatttatgaaaac

SEQ ID NO: 267712 - DNA, 688 bp, Homo Sapiens
  misc_feature (291)..(291): n is a, c, g, or t
  misc_feature (677)..(677): n is a, c, g, or t
cagactagctgaggtgtcaagtcctgcctttcctttcatcatcccaaatttcccctgccatgtgtgctgatcctgctggcaggaccacatttctttgccactgatctcaatggccagtgatgtaagtcttttgcctgtcttcttgagactcgttgagatctttgttgagaaccactactatcattcactagctcatatctgccggcagcaattgaagagatccaatatttgaagattgggccttcatttctcgatgtttctttccatggatggggatggaggtgttcagtngccaccgtggctgttactttttcaaagtagttgaagtattgaaaattgagtaatgtttgggtaaagtgaattcaaaatcctagtatgctaaagggatggtacaagtctaacacaaattgtacgtaatgatacatctactagaaacatacattattcatcaaaagaaatgttacatgtgtactccacaggcatagtctttgttatgatgattggtgtggctttatgtctttgttataaactcctatttttcaggggcttatgattctgctctaaaacattgctctgggttatacagttttgatcccaaaagcttttttgttacaaatcgggagaaaaatccattttagttctatggatggaaatatttcatgcttttaaaaagatgnttgtgttcctg

SEQ ID NO: 267713 - DNA, 723 bp, Homo Sapiens
  misc_feature (297)..(297): n is a, c, g, or t
cttaatacgaggaaaagcaatcagtatgctccgaaaggttaactattctggtcattaccatcatccaattctctgctctcaacaatcacattagctttcttcaacagctgccttctgcagctgataaaaactgcactatctgtaatatctttgagagaggaagtaaaaaatacaaatcactgcttaaagtcctcactgctaataccagaaactaaggcagaaaagggaaagctaatcttattaaaacccttgcagttctggtctctaattacaaacacacatttattagaaggtagncacattgactgggcacaacactatgaccttccaggtatttctttaacccagaacaataataaaagtgttacaaggtgccttccatattgtcctgcagcagtcagaaatcatgtgtgggtgggcacagagacaccagaaaggctaacaggagtgggtgagagaggaaacacccacccactcactgttcccagttgccatcacatgggaccacaccacactgagcaagcctggcctatctctcttcgggagaaattttgtgatgacagtttacacaagtgagtactcaagctggaaaaaattaagcgaagttccattacatggaaaacagaattcagaaatcccaaagtgtaaccattttgcttataaaacaagactgatggataaaaattaagaaccgcccagaagatttatctggaagaaaggaag

SEQ ID NO: 267714 - DNA, 424 bp, Homo Sapiens
  misc_feature (97)..(97): n is a, c, g, or t
acccaactccactgtcccccagttgcccatccaccatgggaccccacacccacacctgagcaagcccggccctatcctcccctcgggagaaattttngtgattgaccagtttaccacaagtgagtacctcaagcgggaaaaaattaagcgaagttcccattacacggaaaacagaattcagaaatcccaaagtgtaaccattttgcttataaaacaagactgatggataaaaattaagaaccgcccagaagatttatctggaagaaaggaagaggttgtctttttctttagagtttattgcttatgacataatcttataaagataaagccataatcctctcattatactatgggtccacggaagctgccatatgtctctgattaggatatacatacaaatatctatgccttgttaaaaaggatt

SEQ ID NO: 267715 - DNA, 463 bp, Homo Sapiens
atttgggaattgacctcggaaattaggggcaggtaagacataaggatgagaaaagtcaataaggaaggatattattgaaaaagttactcctgtgggcaactgcactcagtcctgctgggaccctctcagagcccatgaaacacaccttagaattgtcccatgcaggatcaaggaaactgggatgtctgtctcccaattactgccctttgttgcttgagggttttacttggagaattacctccctggcactccagcccatcccatactcaggctgaacatgcttctctggccagagaagagattcaggcagagaaactcaggaacttgaggtagaaagacctcaaaccatatgagaactgtccaccaaagctgccatagaactttggcttgggctaagaagttacaaaccttatgtgcataacattagtagcaacaaaaaaaagcactgacatctcagatcaga

SEQ ID NO: 267716 - DNA, 641 bp, Homo Sapiens
  misc_feature (11)..(11): n is a, c, g, or t
  misc_feature (340)..(340): n is a, c, g, or t
ctaaacccctnttttcggcacgaggtctcatggtattcgggaaggcatttgtgggaagaaacactctgagcaagtcccagatatattacaactcaatgcaatctttaacatgttgaataccaagaactgcccaagtttgaaggacaaaccgaaggtgatcatcatccaggcctgccgtggtgacagccctggtgtggtgtggtttaaagattcagtaggagtttctggaaacctatctttaccaactacagaagagtttgaggatgatgctattaagaaagcccacatagagaaggattttatcgctttctgctcttccacaccagataatgttttcttnggagacatcccacaaggggctctgtttttattggaagactcattgaacatatgcaagaatatgcctgtccctgtgatgtggaggaaattttccgcaaggttcgattttcatttgagcagccagatggtagagcgcagatgcccaccactgaaagagtgacttttgacaagatgtttctacctcttcccaggacattaaaataaggaaactgtatgaatgtctgtgggcaggaagtgaagagatccttctgtaaaggtttttggaattatgtctgctgaataataaacttttttgaaataat

SEQ ID NO: 267717 - DNA, 549 bp, Homo Sapiens
agacttaccactgggtggcatataccgaggcaaagattcaaatagcatcacaaaggctttgaaacagaattgatattgaaccttcaacccacagaagactgaccagaacttctcacttgaacccagccaggttgattgctttcgaaaacaaaacaaaaatcaacattcttcataggatttaaacaagaccagagtcccataacataataaacaaatgtccacgatataattctaaattacttggcaatacaaagaaccaggaaaacctcaattccatatggaaaaagacaatcaacagatgccaatgcccaagatgacacagttgttggaattatcagattgtaaagcagctataataaaataacccaagattagccaggcatggtggtatacccctgcagtcccagctaatcaggaggctgaagcgggaggattactggagcccaggagttcaaggttacagtgagtgatgagctaccttctgctatccagcccatccatttttattttggaatactacgttcttatggttctaagattttcatttgc

SEQ ID NO: 267718 - DNA, 768 bp, Homo Sapiens
cacatttgtctgcattagaaactactgaagaaataaaagttctttttctttgctacacactttggtacctatgaacctagaacttgaagtgactcctacttatcacgtaaatttttatgtctgatatcaaacacatcttagactccccagaatggaatttaaagatgttcagtgttgggtaacagattgccctaagcattgccacatattctgtctaggtcactgctgattttctatgtctttgctccatactgctggggggaggggagagccacagtgtgtttcttttgtgcacttcgcaactgacttcttgtcctggggttaaaagttgaagatattttctgatgatattaaaagttgaagatatttctgcacttgggccctcctctgggagccgcacccacatgactgccctgcctctgaccagtctgttccggggccccctcaggccaggttgggaatgacggacacgtactatccaagtgtatggggattaactaatcattgaaggcattcatccgtccatcattggaaagatttacagtgattctgaaggacaggccgtggagttttaggtttcaggggcaagagcagttttcaaaagtctttgagtccagtgtgcacgagtcgacaagcagtacctggcatgcaggagcactcatgggtgagtccgtctcaggtctcgacaattagcagttgtgtgacagtcattctggttccttctgcctgaccctgggagacatatcagtaatggatgtacaaaagcca

SEQ ID NO: 267719 - DNA, 726 bp, Homo Sapiens
gagaccttgggcaaattacctaatctttcacccttggttttctcatatgatgacagtgcctttctgatggagccgttatgaaggtaaacattaggttccaacgcatgggaactacagttgtgttaaaatgagaatttcccaggagttcgtgtgtttcattgtgaggtgctattcagctctgtctatttccctcacatctgtcctttctctttctcatcccccactcacttagtaaacatgtctgcttggaccaatgattgggagtatggcgtgctgagccctggtaacgggaagtaagccagcattttcaacaagttgctaattataccacttttaaacacaataagagaagaaggaatgaaccccatgagctggggccacttggcaagtcccgatggtcttcttaggccagtcaggatgtttcttagactcacatcagccttgatgacgatctcctcccacatcgactgagtcaggggtcgctgtgtgctgagtaatgcagtcctttgctgggcgggaagtgggcagcactctgaagggacatgagagtggatgacggtgaagctgtgggaaactgcgggggagctgcacacgcctgatgcctgtgtcagagccacgcagtctctgagtcgtgttcccaagcacaactcacatctgtgaagtacatcagggaaaattaaataagtccaagtaggaaacaagttcagatatatttggaagatatta

SEQ ID NO: 267720 - DNA, 557 bp, Homo Sapiens
ggttagtcacccatcgctaccgtatttctaactgtcattttggggaatgttctgagtgcgtttatgcttcacgattactttttatcactgcccacaggtcagaatctgagaggcagggagtttttattcctctttctgaggcctggataaaactgtaataatccttatttacaacttaaggggccaaatcttggttgcctcagtgtgtgagattttatctaatcctctttcagtccttataactacacccggcctccagtcttttttttcttatgtgtagactttacctagttgtaagcagacatttcagaaccaatgtctttgcctaagggaacataaatgtggatgtattaaacggctaagttttaaaaaacaattatatgctagatattaattactagaattctttctcatgtgctgaatacaatattgtattgcactgtaaacacagaaaggtactgccaattcagttatcagggttgtcatttattagaaatgcaatagtaaaattgtaaaataaggctgggcatggtggctcatgcctgtaatctttcctg

SEQ ID NO: 267721 - DNA, 265 bp, Homo Sapiens
ggcatgagcactgcacccggccaatttttttgtatttttaatggaaatgggggttttgccatgttggcaaggctggggttttgccatgttgggccaggtctcgaactcctgcactcaagcagtccacctgcctcaagccaaccaaagtgctgggattacaagtgttgaggcactgcaaccggcctccagtcttttttttcttatgtgtagactttacctagttgtaagcagacatttcagaaccaatgtctttggcctaagggga

SEQ ID NO: 267722 - DNA, 557 bp, Homo Sapiens
agacattatggctccccaccagtaaggggagagacggggaaagagaagtgtccccaaagttaacccacgttccctgggacccacctccctccccactgccacttcccaccagcctcacgcacgggccaggcccttccctttgcagctcacagcccagcagatgttaggtcagaatgcgtcccctcacttgactaaaggtttacagccagcagggtggaaatgaaccagatattaacaccccctcctccatgccctgcccaccttctggccagtaccagtgaagcagaagccactctcccacccccaggctgtcccaaagccctgaagacccaagaaagcagagccaagtggagtgaccctgataccagggccagctgcccagtcccctgtagctggggaggaccccctcttcttgtgaggcagacactgggagtgacccctccctgcaagggagatttctcatcccccagggttcccagagggttcccagaggaaatacaggatacccaatacatttgaatttcagataaaaaataaataacgttctgatacaaaaa

SEQ ID NO: 267723 - DNA, 449 bp, Homo Sapiens
  misc_feature (287)..(287): n is a, c, g, or t
  misc_feature (307)..(307): n is a, c, g, or t
  misc_feature (381)..(381): n is a, c, g, or t
  misc_feature (390)..(390): n is a, c, g, or t
  misc_feature (402)..(402): n is a, c, g, or t
agacattatggctccccaccagaaggggagagacggggaaagagaagtgtccccaaagttaacccacgttccctgggacccacctccctccccactgccacttcccaccagcctcacgcacgggccaggccttaccctttgcagctcacagcccagcagatgttaggtcagaatgcgtcccctcacttgacttaaaggtttacagccagcagggtgggaaatgaaccagatatttaacaccccctcctccatggccctgcccaccttcttgggccagttaccagtgnaaggcaggaagccacttttncccacccccaggcttgtttccccaaaggccctggaaggaccccaaggaaaggcaggagccaagttggggagttngaccttganttaccagggggnccagtttggcccagtttcccttgtttagttggggggagggaaccctt

SEQ ID NO: 267724 - DNA, 450 bp, Homo Sapiens
tacctctcctctcccagccagtcgtggccgcgtttcaaagtgtgcagttgtctcctccctgtccagccccatcgtcgcccaggaccagctgggcgcggtctgacctgaggctgctgctcagcgccgggctgacggtttctccattcgagcaccttccagcataccgctcggctccgggagccttctgcaaagttgggcagctcagagcgcaattttgcctctcgacttctccctccttgggtccccggcgcccccgcttcccacgatccctttcactaggagcagccagtcccagcgggctggcaacttgcaccccttcctagtcatcctccctgaaacgcgaccatgctgttaaggggcgtcctcctggcgttgcaagccctgcagctcgccggtgccctcgacctgcccgctgggtcctgtgcctttgaagagagcacttgcggcttt

SEQ ID NO: 267725 - DNA, 873 bp, Homo Sapiens
agcggccgtttcctagtagctcgttggtaattgaggggaactgactggggccactctctggtatcctctgaaggccaaggagtgaacagggatggctgccctgcccagaaagggaaaagactcatttctgtccttttcagttataatccctgatccctatgtgtgatgcagttagcagcagcagctcgtccagggcaaactcacaggtttcaggtgacttatgctgcttttatttatgctaaattcttcccttctcccacccaactgggcaaaggacagaaaacccacctagctatgcacaaaagggttacacaagtcagagggtccgggcatgtggtctgtgtggtgcatggtggtggagggaattcatgaaaaggaatttattattgcctaagttgagagcgttaaagggttgttttaagtgagatagaaaaactttaagtcaggtcctcagtgatggagggaaccattccaaagtggtgccagcacccatctaaggtcagagatgtctgacagactaagttggggccctaaaggggggatgccccaggtaaaatttgggtcacctaatgagccctccacttttcaaagtcctcttctcttttccaaaccactatgggcaactctccacctattccacctgattccacacttggctacatcctcaaccatggaaatcaatttgaccctgacactctaaagataaaatgtaaaattttttttgcactattgtctgcccccattatgaactgcccagcctggaacaatgggcagtcttggtagccttaattatgacaccatcctgccattagacctattttgcaagaggcagggcaaatggtcagaaatcccatatgcacaggattttatgac

SEQ ID NO: 267726 - DNA, 683 bp, Homo Sapiens
  misc_feature (377)..(377): n is a, c, g, or t
agataaattagttgagtttggccctttgtaaatatgtaccaatggaatatatgagctattattaaaaccagatactgttacttctcctttgctatgactaactttttatttctgcagtatatgttgctctttggtttaggggactaacaactttttaaaaaaataaaatgttatctgtgtcttgcagggctgttacagggggttacgagcaaaatggcacctggccgggagggaggtgggggctgaaccagccccaattcaaccaggaaggggcatcttagtgttcacaccaaaaccaccttcaactggttgtgaagctaggggtgccgcctatggcccagtgggggaggccctttaattcctaagtccttacgttnctgagtgtgccctctttcctaattccaaaggtacaatataaatagactgtgtgacctgcatgaaaacattcctgtttgcaatggcacatctcacagaaagttaccatttttcaaaccacctataatgagaatggatgtcaaaatgggattctaacattttgtaagaccctaaatttatcaaataaagagtcaaatatgtgcaatgaactcttcctgagacaggaagaaggggcactttttagaaagatattcaacagaagggttttctagttgactgactatcaaggtagagaaaaccctataact

SEQ ID NO: 267727 - DNA, 440 bp, Homo Sapiens
  misc_feature (20)..(20): n is a, c, g, or t
  misc_feature (319)..(319): n is a, c, g, or t
  misc_feature (346)..(346): n is a, c, g, or t
aaaggaagctgaccaggagncaagatctgggcaagcagagagtacctgggacaggactgtgacctggtggacaggggcctagcatgtagcctctgttcctcctggacataggaaggtcccaagcttagtatcccacgtggcctttacaaatcctatggctggccttctcattccacaagggccctggaaagggatgacagccagccttggcattatggctgggagtcccttagcaaggccaaccctgaagaggccctttgaggcattccctatggctttagagttgtagacttacactcaaccctcatgtgagcgtggnagtgagggtggcggtcccttgccaagntggtagcacgtgacccagtgattcactgccatcccaggccttaactagcaaaactacggagcgtgccaagggacctggtgcctgtgggaagtgg

SEQ ID NO: 267728 - DNA, 979 bp, Homo Sapiens
  misc_feature (62)..(72): n is a, c, g, or t
  misc_feature (85)..(319): n is a, c, g, or t
attttatgaaaagatgacatgttgggctgcatgataaaagttaattataaaaattaaaagannnnnnnnnnngagatggaatatnnnnnnnnnnnnnnnnnnnnnnnnnnnnnnnnnnnnnnnnnnnnnnnnnnnnnnnnnnnnnnnnnnnnnnnnnnnnnnnnnnnnnnnnnnnnnnnnnnnnnnnnnnnnnnnnnnnnnnnnnnnnnnnnnnnnnnnnnnnnnnnnnnnnnnnnnnnnnnnnnnnnnnnnnnnnnnnnnnnnnnnnnnnnnnnnnnnnnnnnnnnnnnnnnnnnnnnnnnnnnnnnnnnnnnnnnnntaagccaccatgcctggccaaaaattaaaagattttatgaaacgaaatggcttcccattctttctattcagcttctaagtgggctattcatttgtgctctcctcttttttgttttgttttgcactttgtcaatcatttggggaaatagcctggaggtctttcctgaatctgtttgtagacataataaaatttgtgtgctgtgtacaccaaaaacataatgtatcttatgaaagcattacccaacctgtttgagttgagaatgcatttgtcccacctttgatttgaggctttagtttgctgatttccttaaatgctaccctttgatcatttcctggccaccatcacaatactaaggggctcagatgtgtcttgtgcccacctcttcctgagaagagatggaagtggagctgtgactagtacaagcagcccaagaaactctgaacggggcccaatggaggcaaacttgagcaaataattgggatgataagaaacaaaaataatcccaactgtttgaaagttcgaaagaggggcattcttttctggtacatggtgagagttcaggctccagagactcaaaacggaatggttttccttggcattttgtaaatgctctcacatctgtagcaataaagctgttattttctgcagtgttaaaaaaaa

SEQ ID NO: 267729 - DNA, 428 bp, Homo Sapiens
  misc_feature (110)..(344): n is a, c, g, or t
  misc_feature (357)..(367): n is a, c, g, or t
gaggagagcacaaatgaaatagccccacttaagaagctgaaatagaaagaatgggaagcccatttcgtttcataaaatcttttaatttttggccaggccatgcgtgttannnnnnnnnnnnnnnnnnnnnnnnnnnnnnnnnnnnnnnnnnnnnnnnnnnnnnnnnnnnnnnnnnnnnnnnnnnnnnnnnnnnnnnnnnnnnnnnnnnnnnnnnnnnnnnnnnnnnnnnnnnnnnnnnnnnnnnnnnnnnnnnnnnnnnnnnnnnnnnnnnnnnnnnnnnnnnnnnnnnnnnnnnnnnnnnnnnnnnnnnnnnnnnnnnnnnnnnnnnnnnnnnnnnnnnnnnnatattccatctcnnnnnnnnnnntcttttaatttttataattaacttttatcatgcagcccaacatgtcatcttttcataaaat

SEQ ID NO: 267730 - DNA, 459 bp, Homo Sapiens
  misc_feature (260)..(349): n is a, c, g, or t
aataaggtaaactaaaatttctggtactacagtaccagacttagtaaatgttaatctcttctttcactttcctcaggtcagtttggttgccctgttcttggaatgctccatgttttcctacacttttgccatcacccttctgaacggtttttcactcccagcacttctgacaccaaatgcggagggtggagggactccctccacaccaaccaattttccagtaccaactgagtgtcctagaattcatttcaattctgatnnnnnnnnnnnnnnnnnnnnnnnnnnnnnnnnnnnnnnnnnnnnnnnnnnnnnnnnnnnnnnnnnnnnnnnnnnnnnnnnnnnnnnnnnnagcaggtttccaaggttacccacaccttccgtcccacttggactacaaagtttgggaattcccatgactctctactcaggttctataatttgctagcacgtctcacagaa

SEQ ID NO: 267731 - DNA, 656 bp, Homo Sapiens
  misc_feature (42)..(42): n is a, c, g, or t
tgggactctgaaagggaatgaaggagaaggaaagatggggancaaaaagtagaataccttatttggataaagctattaataaaacagaagtgttaaaaaatgaacaaattttgtaccctttaatacagaaaaaaaaccatgacctagattttataacataattacttagaaagtttcttctagaatcttcattttgcacatacaaaggcaagagaggaggccaaaaaaattgagctttttagagggcttaggaaaacaaacttaaactatctagaactcaggattttttctttcaccaagggttgttaaaatatttatttctgttgggaagataatcaacagtctccagtgtctctggaaagttaaaggcagaaactgggaataagaaaatatcagtgattcccttttcattgacctcttagtgacagcttaaaaagccaattattaactaaaggtgatacacatgactatatgtttccgaatgtttttctagtagaaattaaaaatgccaataaatactgtccaaaaccattcatcacgactcagacaggaacaatgtgcagttttacatgccgtgacccttctgtattgcattgtggttcacttgtatcctaaaaggccagggtctcatgcaaaaataagtaagtaattttctt

SEQ ID NO: 267732 - DNA, 955 bp, Homo Sapiens
  misc_feature (79)..(79): n is a, c, g, or t
gggtcctctccttccttggctccactcctccagtccctcagacctcaacaggatattgaagcctgcccatatgggcatngcactcattaaatgtttccttctgactccattcctggcctgacagaggaagaagaagagacccataagattggcagtctggctgagaacgcattctcagaccctggcaggcagtgccaaccctttgggaacccagccagggatgaggaagagcatccccttgatctggggtgctgtgctcctgggtaggtctgctggtgggcagcggtggtgctgttttgctgtgatgggccaagagggaaacaagggaacaggcttggtgtctgtggccgattcctgagcagcagagtttcaggcatgaatccctcctcagtggtccaccacgtcagtgactctggaccggctgctgaattgcctttggatgtaccacacattaggcttgactcaccaccttcatttgacaataccacctacaccagcctacctcttgattccccatcaggaaaaccttcactcccagctccatcctcattgccccctctacctcctaaggtcctggtctgctccaagcctgtgacatatgccacagtaatcttcccgggagggaacaagggtggagggacctcgtgtgggccagcccagaatccacctaacaatcagactccatccagctaagctgctcatcacactttaaactcatgaggaccatccctaggggttctgtgcatccatccagccagctcatgccctaggatccttaggatatctgagcaaccagggactttaagatctaatccaatgtcctaactttactagggaaagtgacgctcagacatgactgagatgtcttggggaagacctcccctgcaccctaacttcccccactggttcttctaccattacacactgggctaaataaaccctaataatgatgtgc

SEQ ID NO: 267733 - DNA, 946 bp, Homo Sapiens
  misc_feature (281)..(281): n is a, c, g, or t
aagtaaaattttgttggtatgattcttgggtgttggtggcaacaatattacctagcatatcataacatacagaatatctcattgtggttttaatttgctttttcctgcttactaatgagactgcacatcttctgacgtttggtctgggcatttttttatttcataaaatgtcggtttatttgtttgtttaaaccatctttcaatgggtttctttgtctttctcttattgatttctagaagttctttagacattttggattctcatcttgtgtcagctttgnttcaattccattacacaatttttggtttttcttttaatggttcttaaataaaactttttatcttagaaaatttcaagcatacaaaatagaatattctaataagcctccatgtagccatacccagcttctataattatggactcatagtcaatcttttttgcatctgtaatctctacccattcctcccacccctggattattttgaagaaaatgccagacatcctatagtttcatctgtgtatctctaaaggtaagaactctttgcaatttggaggtcccagtgttatgtgagggtctctgttccaatcccccaacctgtataggctgaaagctttccctcttccccctcaaacctcagctgtaggcttccagggagagtttgtgtctcagctaatcagatggctaaacacacttaaaaactatttttccattatattatgctaaaagcactagaagtaatttagtttagcatgtattcatgttgtttagacatgtactactaagtatgtattatgtgtgcatgatttttacatatgcgtgtttaccactatccatttaatctataagcttctaagaggtatgaactatttctattcgccatgttttaagtaatacccagcccaatgtgattcaaaagtaaatgtataataaattctatttgatga

SEQ ID NO: 267734 - DNA, 798 bp, Homo Sapiens
  misc_feature (655)..(664): n is a, c, g, or t
ggagtctcttggaggtcttgataaaacagatttttagtgcccctcctccctcccccagagtgtctgctttggtaggtcggtagtgaggcctaagcattagaattttcagcaggttcccaggtgatgctgatgcctttgctctgggaccaaacttggagaaccagtagacctcgacacatgctgctccctctgccaagtccccaccccctacaccatcagtgggcatcctccctgtgcgtccccagcactgtgcagtgagcaccaatcatacatccggtcgtgactgctctgggatctcgccctgccttggacacccagcaatgctcaagaaatgttgcggaaagcaagcaggggaggcccagattcccgtctaaccagctgtccctaacatttgtttgagaacctggcgtgttcaatgagcaccgcattggacaaggtctaagcacctgcggccttccctaagcctggcaggcccatggagagagggaaggcgagaagagcaaaacagtggccaccaaagcaaggtgaatccccagctggggaagccaggcactgggaggaggaagtcataaaaatagcaaacacaagttagaaggtttaaagggaagacgttaggaaccactacagagaggtctggaaagagaagtggcttacnnnnnnnnnngtttgaaaagttagaaggccatgatggaggggtttggaagttgccacaaggttgggttgatgagagaattctaaactgatgtgtacaggatacacaagcatttgatggtacataaataacctcctttaatcgtc

SEQ ID NO: 267735 - DNA, 693 bp, Homo Sapiens
  misc_feature (43)..(51): n is a, c, g, or t
ctcagagactctgagatcggattggctaatagggagacggggnnnnnnnnngagatgatgggtttttcaataatcctcatccctgaccccacatctgtgtcccctctggacaaactgcagcacaaaagattgaggtcagattgcagaagggactttcaagagatggcaaagatggtggagtgagtttcccagggtaaaatggggaaaggtgtggctctctgctcaccaacatggtgagtgaactagctcactgagctagcaaagtatacctttcagatcaccctggctggctgggtagggggtccccaagaaatatgaatagggaggggttgttacacagacaccccaagcaaacacttttcaggaggcccagcctccggagatgtgtctgtgtgagaggagtcctggacccggctgattgggacccagactcccagtgaatgagtttgtagaaagcggctgccaagcggaggatgcaaatgatatgcaaatgagttcattcagatcccacctccccagtcccagaccttacttcactctccctggctccttcccttcctcatagggtcctggggggctgtagggggatattccagctagatactgtaatactcgcgtgcgggtagagatactgtgaaatactgtaaggtcttttgagaggtggaggggagcaatggcccacagagccgcccc

SEQ ID NO: 267736 - DNA, 900 bp, Homo Sapiens
cgtgaatggagtactattcacgacattctaaagctactggagcacgggacacgtgtctgtacgctcctctcacaccccttactcggcagctgcccactcccgccgttgccgttgccctgagtcttccccactgttctgctgtgccagtgtgagcatctccccggcactcaagtccatgttctctccctcccgctcttcctcctgtctcttccatgctccctgttgcacggggacatcatgtggggcttgatgccgtacacagtccctgaccatggccccctactcttctccagaagtgtcacactagacaggagctgctgagtcaccaactcacctttccctagaatgtgggtttgttttttctcccccatcacttgcagaggtcttttttcaattatatgatcaagaatgagtctacaagaataccagcaccagacatagtgccaaatggccttttgtaagctgtttcgtgcccttgaggctcgcacttgtgccgggtgagccccaggaccgttagccttttcttttcctaggtctggacactccggggttggttaggctagccactggggagaatacagctctggccttttttcatattttgctgcttctctttgtacagatctttccccctccacataccaaaaggaatcctaacctagttgaaatgctagttgcaattcagtttcatgagaatgctgaagtaggctgctgatttaaaattttcctcttccctgaaaatacacacacctagagaatttagggaaaggctcttagggcttgggaatcttatcttttcattccccacaaaatacctacaaagaaatgtctagtattccctcagtattcctcctcgtataggctctgaaagcaacctcattcccacgccgagccctatgg

SEQ ID NO: 267737 - DNA, 746 bp, Homo Sapiens
tacagagaaaaattatgtaataactggaatttagtaataatacagcaggagagaaaaaagtggaaaatgatacacacaaacaagatcggccatatagttattataggtaaagtggggatggatttcattactctccctatgtttgtatatgttaggcaacacaaatgtcaaacaagacagaggaagaaaggcggcaaaatcctttgcatacctgggggttttctttctttgccttaattactaactttctgcattaggttaccttcacatgctaagaacagttgaattttcaatttcctaaggcatcagcttgcccttttctttacaagaggggctggggacataaaaaaagcaaaggtgcttcctcaaaagcttcagtgcctggcagctttattcccactgacttccccttcctcccctggacctttccttctctattctgccctcacagccatcttccttcaagtcaaacccagtgctgtgtggttaggctcatttagactcagttgtattggttttcctaggaagagagaagatttccactacgcagcattccccagtgcccatgtccccaccggaatcggtctttctctttcaatcctcacccgggatatttgaccccttccatgaaggtaaattggttctaatggttttaatgcattatacaattccattggtttcgtttttcttaaaggtaaccacaggttatttaagggctggtgtacactcagaaaaatattcattgg

SEQ ID NO: 267738 - DNA, 395 bp, Homo Sapiens
  misc_feature (16)..(16): n is a, c, g, or t
  misc_feature (53)..(53): n is a, c, g, or t
  misc_feature (61)..(131): n is a, c, g, or t
ttttgaggatggaagnccttggcctatgttgccccaagctgggtccttgaacnccctgagnnnnnnnnnnnnnnnnnnnnnnnnnnnnnnnnnnnnnnnnnnnnnnnnnnnnnnnnnnnnnnnnnnnnnnnaacttaaaaaacaggttttgaaagcaagtttgataaagcaatttattacaattttctcttcttcaacaagctattatttcagctctaactctggtcatatacttgtttttggatctctgcttctttttctggcaacatattcaagaatttaaatattcactaggctttatggagcagtaaattcggaataatgtttaaacaaatactcctaaaatatttttcaacaaatgtttgtaaatggatgttgaaagtaagcctgtttta

SEQ ID NO: 267739 - DNA, 418 bp, Homo Sapiens
  misc_feature (29)..(29): n is a, c, g, or t
  misc_feature (32)..(32): n is a, c, g, or t
aaacctaactccccaattcctttaacaangangctcccttttgccttttttcctcccccatcaagctccgtatcctgccctcctagtttcccacgcctatcctatgtgcaagccttcctcaattccatagcccataaatctgatacaaagcttggagaaggcatcagacagaccctgtaatctgtgctaatccctaaaatcaggagctaaaccccaggacacaaatggatttgcaaaaataaggattttagaaactcagatggcattagcaggcctcagagataaatgtacacaactgaacacgatccatcagtacagaaacagatatagtatgttccttctactccatatgaactatctggaaaaataaagtactgaatgggaaaaggctgttacacctccagggatgagagcaaaa

SEQ ID NO: 267740 - DNA, 483 bp, Homo Sapiens
ctttcagctaactccaaatgtacaaacaattagtacagcaaatgttgacagctatggagttcacttctttgaaaggcagacaattagaagttattccatgggtgttggggtggtggaagtcaaggtgtcttgggctgctggcagaaaagctttgtaagggggagtctgagagaggagaattgaaatgtcactgaataactacagctggtaatcaccttcatcctaagtcctgctgaaataacaaggcacaattaactctcaggaattgccctgtgttgggtacaaggcacctggttgagctgaagggagacataaattgcagaagccctggtgcagatttcagaagcagagttatagaatatgcataacgctccctgctgagggctcctgccagccctccacaagcatcttcagttttaagtgtcaacaactgacttttaactccaaagaaagaatacatagttttaaaatgactaatgtgtg

SEQ ID NO: 267741 - DNA, 584 bp, Homo Sapiens
tgtcaggggctcagcgctgaatcatcagagcctaaagtgtctgataaatactacttattcattcatccattcatttactcaatcattcattccacagataatccctgagtgcttattctgtgctgggtaccatgctagttgctgaggatacaacagtgagcaaagccaagtacctgctgtcagaccagccactcattctgtgtgtgttcaataagtgatcaacaggaagaggaatgcctattcattctcacatatacttttaatgatgagcattgccagccaatagactggctgcctcatgtggaggtgagctccccatcacaggaagtattcaataagatcctggataagaaagagcccattgtcatgatgctgcaagtggaggctcctgaaggtccctcttacctccacgattctctggttctctggaggatgccatcgggtggctgctgttgtgtggctgtcagagtccggcagcagcatgcaaggtagacatctttgttttttcctgatggaaccaactggcttctcttgaaaaccagagctaaacacttgcctttgatataaaataaattttacattta

SEQ ID NO: 267742 - DNA, 880 bp, Homo Sapiens
  misc_feature (14)..(14): n is a, c, g, or t
tccatcatcctagnagagtcttcaaatgtggtagtgacagaaagagtaatccaaccaacttccggcatgataggtagtctgagcatgcaccccgagttagccaatgcccacaatgtcattgtgacagagagggttgtttctggtgctggcgtaactggaattagtggcaccactgggatcagcagtggcataggcagcagtggcctgggttggcaccagcatgggtgctggggagtggtgccctgagtggagctggcataagtggtggtggcattggcctgagcagcttgggagggacagccagcattggccacatgaggagttcctctgaccatcactttaaccaaaccattgggtccgcctcccctagcacagctcgaagtcgaatcacaaagtatagtaccgtgcaatatagcaagtagtcaggaccccagctcactttttcatagtcattgtggtttagatccaattcccaccactaaaaaactaacaatgtgatttataacgcacaacttcgtgctcaggtcatctaggagcaaggtgagaaatcacaatgaggaaaaataaatggaaacacccactgctaggggagagctctccttagcattcataaacttttctcttatattaggactaaggaactaaaacttgaggcagagtcttctttgtgcctgagtggcctgtagtccatctccagcatgtaactggccttacgatggcaattggcatcattctccttgctctgttttgcttttccatatagctcgagcaaaattcaaaaagaactaaatatgcaatatatgttcatgtctatgggaaaaatctaaaatgtgtgccagatgccctgttggtttcacagataacataaataaaaattcaa

SEQ ID NO: 267743 - DNA, 270 bp, Homo Sapiens
gagacagagtcttgctctgtcgcccaggctggagtgccagtggcgcgaatttcagctcactcaggagtgagccaccacacctggcctgtgattggctctattttgagtgattacgtgtaaatcatctagaaccagctctgagcaatggcgttgcggtgtccctccctccccgctggggccataccagcccctctccactgggagcccaagttgccaatgactgtggccaaactcccccatttttgtctgtatcctgctctctttaggtta

SEQ ID NO: 267744 - DNA, 480 bp, Homo Sapiens
  misc_feature (423)..(432): n is a, c, g, or t
taggcaagagtattactcagatattgaaatggatctcagctgtgcccctcgccttttctcccacgactcgtcatctgtgatgtttccaccagctttatttgcagagacagaccacagggagccagtgtcttgggttagggttgtcttcacctgccctcgtctccaggcacgagaggcctgagaggctgctcaggagctaaaacattgtgaatgtccattcttgtaaaggatcaggtaccttagtattcggcagtttacatgattcaaaggcacctgtgcatgttttcctctttctctagttacttggcacacttgtctgggaaagaccttgtggggtgtagaacacaacagtgttcatagctaggccagtctcagcagtgtcctagcccattcagaggccatctggtgatagacccagcatgnnnnnnnnnnatggcagcagaaagattgaatagcctttctgctggattctagaccccc

SEQ ID NO: 267745 - DNA, 1006 bp, Homo Sapiens
  misc_feature (22)..(22): n is a, c, g, or t
  misc_feature (45)..(87): n is a, c, g, or t
  misc_feature (532)..(586): n is a, c, g, or t
  misc_feature (600)..(612): n is a, c, g, or t
ggtctccctatgttgcctaggntggtcttgaactcctgggctaannnnnnnnnnnnnnnnnnnnnnnnnnnnnnnnnnnnnnnnnnnccgaccaggccaagaatattttccattgtaaatgtataaactagtaaatgaagtttacctcaatcccatgtgagttttagttggtgtgagctgtaccttgcatgcttaccctctggctacttgcaagaggcaggctggagacagtggtgtgctggtaaacgaccagctggggaaggggaggtggtttgatttatagcatttgcagatttccatggatgcaaatactcccgccacattgggatttcaaaccatccaggtgatgccaagtagcttcctggaaatttaaccatctgctctcggtaactgctgccagcagctccagcacacaccactggttctagcccttcaaagcaagtttagctagcattcttctcatcacagacttttgagtttcacaagctaagtaaaagaatttttaaaaattagagaaagactttctgaaatnnnnnnnnnnnnnnnnnnnnnnnnnnnnnnnnnnnnnnnnnnnnnnnnnnnnnnntaccaaagacactnnnnnnnnnnnnnttacaatctacaaataccgtcatttcataaaagaaaggatattttaattttttaaaagtgggaataacataatttcagaacaaagattagtcctttaaatttaatgaatccagatctatgaaaattttattaccttacttatttttctaattttattatgaactagggaaagttttgtgtctgcattggaatgtttttggctacaggtgaaagaaacctggcagaggttaagtaacctggagttatttttcttacctagcaagaggtctagaggtgagtggttgctggcagtagttcaactgtgtagtaatgctgtcagactcctactttttccctagctttcctttccaccagctttagcttgtaaacttgtttcctcatgtttgtagccctc

SEQ ID NO: 267746 - DNA, 416 bp, Homo Sapiens
aatgaacccctcagccctgaaaatcaaacatcccctaataaacctgcccttttcaagtcccagtttcccaaaatggccctctgctcctagcacagcgttcattatgaacttgactagtctatcatgactgccctccagcacttgatagaaacacagactgcaagattctgattcagtagattggggtggggctcagggattctgtgtataagaaagaccttagatgattctcctgatccagcaatatggggagacggcactggcccagtggttttcagtgttcaggatgggcagtcctaaggctcggtcgaggtgcctcaatggtcactttagaagagggtagcagttgaagcaaggggagctcagaatctcaaaaatcatccctgtcatgggttgaactgacaggttgaataaaa

SEQ ID NO: 267747 - DNA, 1006 bp, Homo Sapiens
agtacagtacttgcctatagttctttttgtttttagccttatcgtatctagtcaaaacactgttctccaaagctaggttactatagtatagttaatatattttcttcctcaatccatttagtgtggtttcctcattcatttgtaatacagctatgcttatttattagtgcttatatttcattttggattctgcacacatgttgattgattttgattatttattgggagaacgtgaaatattactgattataagagtgaaagctgttatacaaaaaggcattctacttggtttaacaagtccaaaagagaattcctgattttcttccccaaacctgctttttcacctaaccttctttatctcagtaagtaacactctcccaaagcaacatgcagcccattaataagttctgtttgttctattccaaaatgcattcaaagtaggattggcttgttggacatctcagctggctacagcttcagctgctagtgtaggctgtgattttctggcctagactgctgtagcagcctccttaactggtttctccatgttcctccctatccgtcctttcttcacacaacagtcagagtgatcttttaaacatgtaaatcaggttgcccctgtgggcttggtttgtgaggaagagcctggctcagcctgtcaggaccactgaggcttgtttcttgccatcctttccacctcagttttacacacttctcacctccagctggctgggtgtggggaagacctgccagagccacattggacaaggtggttcccattgccaagtagatggacaagatggtgcagaagaatacagctggagcattggatttgccaaaggagcttaaaaatattcccatgaccatggaattattacagcccccagaagaatcagaatatcagttaatgctaatggcaagcagcataaagatgaagaagttacatctttaacagtctgtcatgaaatctgggaaaaagttactatcaaccgagaaagaccctgaa

SEQ ID NO: 267748 - DNA, 344 bp, Homo Sapiens
agcaatagaagcctcgcccccgcccttccctttcgcaggattcgccgagtctgtagcctccccgatccaagttcctagacctcatggctgtcccctcccaccagtcacctccactgcacaactcgggcgggggtgtgacacctctcccccacccccgactccgtggtttccgtatcgtcaacccttcagccgccgacccgggaggggtctggcctacactggtcttccccttcccatcaactctttctgcttgacaatgtagcaacccaggccccccacccacggtcctcccctttttcctctccctgacaataaagtctgaatttgttctgccctccgaaaaa

SEQ ID NO: 267749 - DNA, 423 bp, Homo Sapiens
aggccacaagcatgcaagaagtgtgttggagccacagattgccagacctggctgtggagttgcatttttcaactaagaagtagaaggttcaggtgcctttgatggttaaccaggcccagcgttggtgagtgtaccagaaagtttggaaaacaggtcgaagtggtagagataaaaatctactgcagttgaatttgttgaaaagcccaggacatgcctcagggacctgcgtttatccatttgctccaatctctttcccagcaatcacttaacatttgggggagttggaggatagctgggagtgggcatgcaacagcttgtaaggagggagaggcctgtggactgtggactggacagggtgtccactctttgaatccagcctcggcagtctgcaaaaataaattcaaaaatgctctttgtcatctt

SEQ ID NO: 267750 - DNA, 428 bp, Homo Sapiens
  misc_feature (154)..(216): n is a, c, g, or t
  misc_feature (322)..(374): n is a, c, g, or t
aacagacagtgtgtatcactatgttgctcaagctggtctcgaactcttggcctgacctcaagtgatcttcctgtctcagcctctcgagcctactgcttcttttaaaaattatcttggatcaggccaggaaccaccaggcaaggtggctcatacnnnnnnnnnnnnnnnnnnnnnnnnnnnnnnnnnnnnnnnnnnnnnnnnnnnnnnnnnnnnnnngtggtctctaaaaaaaagaaatgttaaagatcaactgggcatggtggtacatgcctgtagtcttagctgcctgggagggtgaggtggagggatcacttgagcccannnnnnnnnnnnnnnnnnnnnnnnnnnnnnnnnnnnnnnnnnnnnnnnnnnnngatggagtgagaccctgtctctacaaaataaacaaataaaaataaatttataat

SEQ ID NO: 267751 - DNA, 722 bp, Homo Sapiens
attcggcatacacctcccctccaacataataaagatgaactcctttttccaatatgccgcctggtgttttcaatagtggaattccggttaacattggagagcagcccaaggcagaaacggttcttattgttggaaggatcagtgaaaccatccaccaacacacttgtggaggaggcatggaacgcttcacccacacgattgttgagctcatagtagacaatagagcaccagtgttttggttcctcataagcaaccgcctgaacatctcctctgttgatttctgagggcaggggaggcgccatcatgtttgtgtccatcggctgagagccatcctgggtcatggggtcttcaggaggcaggtaagcaggtgggggcgtatcagctggcatctggaaagggcttcctgggtctgagctggtgggagagtgagggtaggtgctgctgctgctcccaggagagtttgggtaactgctattgggagagtgaggaaacgggtggctgttgggttgcctggaaagaatctggaaaagtggcgttgagtggcatgtgaggctcattttgtcctaagttacggaactgagctaagaggctgtgctgaggattatattcgctgtgtcttggaaccagcacaggaggaagtacagggctttctactctcttatagtggtagggattgatgcagacctccttctgcttggaaccaaaaggaaactcacagcatt

SEQ ID NO: 267752 - DNA, 830 bp, Homo Sapiens
  misc_feature (748)..(748): n is a, c, g, or t
  misc_feature (750)..(750): n is a, c, g, or t
  misc_feature (752)..(753): n is a, c, g, or t
  misc_feature (765)..(765): n is a, c, g, or t
agcaggatcatcgtgcacccacagttctacaccgcccagatcggagcggacatcgccctgctggagctggaggagccggtgaaggtctccagccacgtccacacggtcaccctgccccctgcctcagagaccttccccccggggattgccgtgctgggtcactggctggggcgatgtggacaatgatgagcgcctcccaccgccatttcctctgaagcaggtgaaggtccccataatgggaaaaccacatttgtgacgcaaaataccaccttgggcgccttacacggggagacgacgtccgcattcgtccgtggacgacatgctgtgttgccggggaacacccggagggactcatgccagggcgactccggagggcccctggtgtgcaaggtgaatggcacctggctgcaggcgggcgtggtcagctggggcgagggctgtgcccagcccaaccggcctggcatctacacccgtgtcacctactacttggactggatccaccactatgtccccaaaaagccgtgagtcaggcctgggttggccacctgggtcactggaggaccaacccctgctgtccaaaacaccactgcttcctacccaggtggcgactgccccccaaaccttccctgccccgtcctgagtgccccttcctgtcctaagccccctgctctcttctgagccccttcccctggcctgaggacccttccccatcctgagcccccttccctgtcctaagcctgacgcctgncnannctccggccctcnccctcccaggcagctggtggtgggcgctaatcctcctgagtgctggacctcattaaagtgcatga

SEQ ID NO: 267753 - DNA, 697 bp, Homo Sapiens
  misc_feature (170)..(195): n is a, c, g, or t
  misc_feature (220)..(278): n is a, c, g, or t
tgggggtagaaaatgatgttataattctgaaagcaaatctagcacatctaaggatttacctaaggaactaataggggaagatcctaaaatacagtggtataaggtggcaaaaatatattgagtacctgatctttgcacgagctttgttggtgaaaagcaagcttactttnnnnnnnnnnnnnnnnnnnnnnnnnncaaccaaaatgttcatctatagccnnnnnnnnnnnnnnnnnnnnnnnnnnnnnnnnnnnnnnnnnnnnnnnnnnnnnnnnnnntatctaacatgtctaatgtaaaatattgccaagatacattgttcatggtaaaaagaatataaaagaatatgaaaataataccagatacataaaaatatgtactaccctgtcaaacatgtttatccctgggtaatgaaatttgacaaatgataggtccttacacctatggaactcaatgaaaggcgatcacaataattgattgtatgtccactgatctgtgtcagttttgagtggatgggtaggtgggaaggatacccatgaggacatggtatttgccctctagagacctctgaaaaacctcagctttggtggttttctgctatgtgccaagcataggctaggtgcgtaagccagtgcactatcccatgtaacccctcatcagcctataaggtaaagattcttttctacatttaacacat

SEQ ID NO: 267754 - DNA, 578 bp, Homo Sapiens
agaagcaatcccatataacggcgcccaggatgagggagtcaacggttttaggttaggcacagttatcctcattttttgaagaaagcttaattgttgcagtgtttatctatgagtctggactaaatcctaggtgtcttaattccttaatgagtcgaggcgttctcaggttgtatggattttgtgaagtaatggagaatgctactgacgtctccaaagatgcgttttctaaggaaatcaccccgcccccgctgtcgtcattgacatagttttaaattacaaaaagttaaataaagtaattgggtaccaagttaatatctacaaataaatagccttctcaatttacaaatattcagttagaatacatagttgaagaaaactaatatttacaatagcagtaaaaagataaagtattgtggaagaaaccttaaaggttcagaactattaggaaagaactttaaaatactactaaggggcataacaatgtgaacaaataaatataccatgtgacattaagaagtgtgcgcaaacttaagtgaatgtattaatttactgtgatcttggtcgggtgcggtgctcat

SEQ ID NO: 267755 - DNA, 321 bp, Homo Sapiens
  misc_feature (28)..(28): n is a, c, g, or t
  misc_feature (53)..(53): n is a, c, g, or t
cccaccccataagtgggagttgaaccantgagaacccatggacacagattggnaaaaccttcagcggttggatgacaccctcttttggtgatgccgtgggggaacgcaacatgattcaaccccaatgaaagagaagttgcaataaccgctaagactgcagatgcatttgactcagcaaacccccttcaagaaatgcatatgaaaaaaactcatgtttcaggttattcattacaacattgtttgtaatagcaaaatgtggattagaaatagtccagatgtctgtccgtaggggactgtttaataaactattgtcagtccctt

SEQ ID NO: 267756 - DNA, 628 bp, Homo Sapiens
catcacctgaggcagagatgctactaccctcttctggggctcaactaccgatgggcatcagtaatccatcccagtataacattttaaggatgtgctggagacaatacatggactttctctttcaatggtgaggaatgaaacaagatacaagaaccacagcatggaatatgttttcttttacatccaatggccaggtcataaaggatgccttgagacctccaccctggcccccacagcgctttgggacaggatgactaacgcagtccagcttcatgtgcaatcaagtcccgggaagaaatttacatttcaaactctgaaaaatcagtgtctaggttggcagcagtactctggaaactgataaaaccaaattcggtcctatatttcaatttccccttctaagttaatacatgattgctgcccatcatacagtacttcaaccctaaactacagcaatttctgtcaacatttctgttgtataaaagttccatgctttgaagagcctatgggagtagaaaaagtttctctagaaatgtcactgaactatatttgcaacctagttgctctatgtgataaatatatctgactatactagggattatgtgctttaaaaaaataattttgttcactg

SEQ ID NO: 267757 - DNA, 724 bp, Homo Sapiens
  misc_feature (75)..(75): n is a, c, g, or t
gccccatgcagggaacgtgcctaccctgctcaaagagcagcccagcctgctgcttcctgggcaaaggctcaccantgctttggttgagtgacactgcggtggctgaactgacactttcagctctgtgtttctctagcaggcagtgaggaaacatgagggctgcgctgggggtggcacttctgtcctagctccccagctatgcgtacgtggagacagtctatctcctcttgtccctccttctggttcttgatcatgggcatgaaggaatatccaggccccatggctcagtgaatgtgcgtggtttccactcttgctgtcgccctattacctcaagcaggtccatccacatgcccagagcaggtacttaaggcagcaggtgaaagagccgcctaatcctctcctcaaagggggccaagaaacctcaactaccatttctggaagcatctttggtccagggattcaagaaggtgtctttcaagaagggagaggaggaggagtccctgactgagaagccccatgggacataagagactggatgctaggaggcaggggtgggtttggagtcgtggctccaccattacccagctgtgagtctttggacaaattgcttaacttctcttagcctgtgtcttcagatattaatgagacaatcatctcaaccatcttatctatttgggaagataaaatagcacagatgaacattcctggcatgtggtagacactc

SEQ ID NO: 267758 - DNA, 920 bp, Homo Sapiens
  misc_feature (106)..(106): n is a, c, g, or t
atgagcacaagtgcccggtgttttgttttgttctttaaataacaaagatgtatttaaagaatttaacaggagagtgcctgaccaaatgttgcaagttaaataaganctattttatggaaactctgggatccataggctgttctttaattgctcatagaggaaacctctgagatggtgaaaattccaggcatgcaaaatattttgaactgaagtcagcaatgagcaggactgcctctgggctgcccttcccattgtgctgtcttttgttggtgtatgtttatattccctcttgcaattaaaaaggtagttttcaaacactaagaagagtggcaacttaaatctctagacactaaaaatgtataaggtctcccactggagtaaaggggccctggatcaaggtgggtcatcaagcagattcagtccactatcagtgctttggagactcttaccagtaccttttcttcccctcccccacaagacatgaaggctagcgctcaggccacagctgacctgtgaagtttcaacctcagtcatgctccagccaattgaacaaggcttcacaaatacccagccctgacagctcgcggcattcataaacactaaggaacgtctttgctgattatgcccgatttatgtacaggactcagggataagctgtcacacggactattgcatcttggccttttcggcaggatatcaaagggcacaattcggtatgatacatgtcttttccactggtgtggaaaatatcctgtggcccaagtttcacaggacaatgagtggcaagcatggagcgctggcttctaggactcttctgcatagctcagtgggcgctgaggttccagttcatttgtttaaaagctttgactccccaagaaggcaactttttgcagctcagggattctggcataattaaaatt

SEQ ID NO: 267759 - DNA, 652 bp, Homo Sapiens
gtcagtttctgtaaatgaaggacagttctggtcaaaggttttgccaaccttccttcctggccccacttcaaggtctccgcctgtaagaggatgtaggaaattgacctccagaatgtctcctcctaacttcaggctcacagaaaacgtgcctgccagaatgtgccgctcctcaaaggttcccaaggattctaccttcagtctgtttttttctcccacatactccccacccccgtccaaactactgccaccttccaagacccctgtgatccctttcaccctctgcccactttctctctccagcctgccccaggccctctacccagcagtctgagggaccatccttctcaggtgacaggtcaaattgtcactccagtgatttgcccagctgggtgaccatcgcagccacagcagctcacagcaggccctcaccaattccctcaccagggacatgagatgcgttctggaaggcacccaagaggaaaaacagacaaaggtcctttccaattatggaagagaacatgaactgagataaaaaagtcaagacctccagtgacttgacaatcaagtcccaatggtcaggcccaacctgctgctgactgtgggggaacagttggcggtgtgtgcgcagaacaaaacacacaagtcctggagg

SEQ ID NO: 267760 - DNA, 949 bp, Homo Sapiens
  misc_feature (898)..(898): n is a, c, g, or t
ataggactaggagttaccaatgccacaggaactggaatagcaggtttgtccccttccctgtcctactatcatacactcttaaaggatctctcagacagcctacaagacatagcaaaatccacccttactctccaatcccaaatagactccttagcagcagtaactctgcagaaccaccgtggcttagacctcctaaccgtcgaaaaaggtgggctatgcacctttttaggggaagattgtttttccaccaaccagtctggactagtacgagatgctgcctcgcagttaaatgaaaaggcttctaaaatctgacaatgtctttcagacttttaacaccaatctttggagctgggcgttgtggcttctccctatagctgggcccctcatttccatcattctccttctcctatttggaccctgcctcttccgtctagcctctcagttcctacaaaatctcattcaagctattaccaatcaatctatgcgacaaatgctactcctaactgcccctcaatgtcacccccaccccaagatctctctcccaattaggagtccatgccgccccaagtcccgctcgaagaatccctgagaaacatcaccccgtccacttcttttcttattaaaacaaaaagacaggaatgtcatatcccacaaatatggctgcattattgccagcaggccattattgacggtgggccattaagaactctgtgaccggcacatatgcctccagacttcctggaaccagaaaacctgcaacaaccaaaaaccacaaaagaagaacaatgggtttctgttccaactggttgatcaacttcttgagtcaacaagtcccaaaaccatgttgtaattttccacccgccactttgccctgtaaagactgctctccctcaacacntccgggctgactcccttttccgattcagcccactaacacccaagtgaataa

SEQ ID NO: 267761 - DNA, 415 bp, Homo Sapiens
aaaaatgatggaaaatgagggcccccacctaaagggaaaaagcccacaaagccccagctcccaaagaatggtgttaaaaagtcctgaaaaagacattgtcaagaattttaagaacccttttccatttaaacgcgaggcagcatctcgtactagtcccagactggttggtggaaaaacaatcttcccctaaaaaggtgcatagcccacctttttcgacggttaggaggtctaagcccacggtggttctgcagagttactgctgctaaggagtctatttgggattggagagtaagggtggattttgctatgtcttgtaggctgtctgagagatcctttaagagtgtatgatagtaggacagggaaggggacaaacctgctattccagttcctgtggcattggtaactcctagtccta

SEQ ID NO: 267762 - DNA, 945 bp, Homo Sapiens
aggtggtctgattgagcaactttactctccacatggatgtctaacggctatttaatcttcctagagatgcttccagttttccaaattagtttagattacatgaatctctaattagtggaatttactgtaacaagataaaatggaaaaaaaggtgatgagagatattttggggcaagtactctcactgattctgactttttttcagattctccccctaggattaataatctagattattctggatttttataactttttgggtcttttaaagatccctccctgcttctttttttcccacaactaccgccataagcctggttgagaaggggctatctgagtgagcacagccataggcgcaggcctacagagtgggcccttcattgactttcccgatttgcctcagcaagtgtgcacctttaatctgaccctgcctttggtgacacttgaaccaagcccaacaccaaaatgtggtcagcactcaaaaaacaagaaccaggaaaatttaagggattttctcactggacagtctggggatttccattccaacatttgtattctctttaattatatgttattcaaatggacttcaattcatctaccacaaagaactctagccaggggatttctgcttttgtagctgtaggaaagaaattagattagaaaagattaaagcgatccttgcccaaggtcacacagctagttagaagagagctcatctcctggttccaaatcctatgttcttttgataaaaacgtaatgcttcgtattatttaaaatataaggtttggccaaataagttgaagattagcttttccctcttgagtcagaggaaaataataaatctatttctgcagtattcttctattggcctgagctagcatttctgaaagtatgttgttccactgaatactatttttaaaatcagccaggcacagtggctcattc

SEQ ID NO: 267763 - DNA, 425 bp, Homo Sapiens
  misc_feature (356)..(356): n is a, c, g, or t
  misc_feature (390)..(390): n is a, c, g, or t
aggaaggtggtctgattgagcaactttactctccacatggatgtctaacggctatttaatcttcctagagatgcttccagttttccaaattagtttagattacatgaatctctaattagtggaatttactgtaacaagataaaatggaaaaaaaggtgatgagagatattttggggcaagtactctcactgattctgactttttttcagattctccccctagggattaataatctaggattattctgggatttttataactttttggggtcttttaaagatccctccctggctttctttttttcccacaactacccgccataagcctgggttgaggaaggggggctatctgaggtnaggcacagccataggggccagggcttacagggtngggccctttcattggacttttccccgatttgcctc

SEQ ID NO: 267764 - DNA, 965 bp, Homo Sapiens
  misc_feature (344)..(344): n is a, c, g, or t
  misc_feature (408)..(408): n is a, c, g, or t
  misc_feature (947)..(947): n is a, c, g, or t
ttgcattccttccttggcttcctcactagactgaattcctgagagtggagaggatgtgtcttgtttccactcccagcactgtccggtccaaccagcgagaagtgattgctggttttgggagactccttgctctccttccttcttcgcccgggtcttgggtgctgaccttatgaaagggcagcctggggtttttcttggcatcaccagcacatagctgggttatgcacacagcacgttgcccagttcctggcttggagggagtgtgctcatgtttgatggttacaacaatggatgggaacccatagccaagtggcttccgatgcctctgtcctgatgggaagctngagaaggaatttgacggtacccttctttcttttgggtcactaaccgtcctgcagcttcagcgtnttctttgtgctggagcaagtgcagttgccaagaccgcagaggaagggggtggaggaatggcctcagccatctcagaggacggcacttgttgcccccagtgccactggccaaagaccttttcaattacaccagacgcattggctctaggcagcctcagcttcctgtcaccacggactctgtttaatgtctcagctggacttggctgcatcagagattgcagggaatatggctggtccacttgggtggatttgcacatggccatcctgtacatgtgcccttctgccagcctggcagcctctcccttcgtctgccttttccttggaagtgcatcagcagggggagctggatctatcctcaacctaatggaaagcagacgtccccgcacgcagaggagcaggctgccttgcagggtttttctggaatagctcagatggttgttattttattcattggaatggagatgaattgctaaatgtaccagttaaatgtgatttaaattgtatatctttgtcaagtttttcacataaattcactcattnaaaaaaaattctttgcac

SEQ ID NO: 267765 - DNA, 428 bp, Homo Sapiens
  misc_feature (256)..(256): n is a, c, g, or t
  misc_feature (310)..(310): n is a, c, g, or t
  misc_feature (341)..(341): n is a, c, g, or t
  misc_feature (367)..(367): n is a, c, g, or t
  misc_feature (378)..(378): n is a, c, g, or t
  misc_feature (411)..(411): n is a, c, g, or t
tgcattccttccttggcttcctcactagactgaattcctgagagtggagaggatgtgtcttgtttccactcccagcactgtccggtccaaccagcgagaagtgattgctggttttgggagactccttgctctccttccttcttcgcccgggtcttgggtgctgaccttatgaaagggcagcctgggggtttttcttggcatcaccagcacatagctggggttatgcacacagcacgttgcccagttcctgggcttnggagggagtgtgctcatgtttgatgggttacaacaatgggatggggaacccatnagccagtggttttcgatgcctctgttcctgnatggggaagctgaagaaaggaatttnaccgttacccnttcttttctttttggggtcaattaaccttcctncaagtttcagctttttt

SEQ ID NO: 267766 - DNA, 294 bp, Homo Sapiens
  misc_feature (33)..(33): n is a, c, g, or t
accttacccgaacatcagagaattccacccccnggtatcaaacccttacgaatgtagagagtgtgggcaggcatttattcttggctcacaactcattgaacactacagaattcatactggttagaaagccttgagtgtaagggataaagataagcctttatgtggagttcacatctggctcagtactaggtaatttttaatgtagtgtaattaatgtcagaaaacacctgtcacttccatcatagaacatcagaaaactcacacccaaagaaaattaaataaatgtgggaattc

SEQ ID NO: 267767 - DNA, 1041 bp, Homo Sapiens
agagaattcacacgggtgagaaaccttatgactgtaaggactgtgggaaggcctttggtcgtacatcagaacttattctacatcagagacttcatactggtgtcaaaccttatgaatgtaaagaatgtgggaagacctttaggcagcattcacagctgattctgcatcaaagaactcacacaggcgagaaaccctacgtatgtaaagactgtggcaaggctttcattcgtggctcccaactcactgtgcatcggagaatccacacaggggccagaccctatggagtgttaaaggaatgcggggaaagcctttaggacagcactcacagctgactgttacaccaggcgaatccacactggttgagaaaccctacgagtgtaaggaatgcggaaagggctttattcacagctcagaagttactcgacatcaaagaattcattctggggagaaaccctatgagtgtaagaaatgtgggaaggccttcagacagcacgcacagcttcacacgacatcagagagtccatactggcgacagaccctatgaatgtaaggactgcgggaaggcatttagtcgtagctcatacctcattcaacatcaaagaattcatacaggtgacaaaccctacgaatgtaaggaatgtgggaaggcctttattcgtgtttcacaactgactcatcatcagcgaattcacacttgtgagaaaccctatgaatgcagggagtgtggaatggcctttattcgtagttcacaacttaccgaacatcagagaattcatcctggtatcaaaccttacgaatgtagagagtgtgggcaggcatttattcttggctcacaactcattgaacactacagaattcatactggttagaaagccttgagtgtaagggataaagataagcctttatgtggagttcacatctggctcagtactaggtaatttttaatgtagtgtaattaatgtcagaaaacacctgtcacttccatcatagaacatcagaaaactcacacccaaagaaaattaaataaatgtgggacttctt

SEQ ID NO: 267768 - DNA, 717 bp, Homo Sapiens
  misc_feature (496)..(496): n is a, c, g, or t
aattcggcacgagcggcacgagcttgtattataagtcaaggatgagcctgatctggggagagggccggggctcgggactggccaccactgttcagcacatgacctaactacgtaagcctctttggcaagggtcctggtgcccagcacccaggctaaaatatcctgtctggcagagtgttttggtagctatgcaggcctcccttcagtgtacctctttttccaacttctcactcctccttactaggcttggccttgaacatgcttcttcgagggttggcagcacaccgggagggaatgcttggacaagtttctgggcctacatttcttgactaggccctctcatttcctccctccttggggcttctgccaagggcttccagggatcagggatattaatttcttcaacccgcacttcttcctctaattgaacccactgggcatcacctgatgccacttaatttgtggaacaacaagaaatcattttccccattggttnggagtatttccctcagcctatagcatcaaagcagaccagtggccaacagccccaaggggagcccaattaaatacctgggttcagtatcctaacctgttatgtcctgacagcaatggtaaccccagtaattctgtaatgttgtaatttccgcatggccctgagctcccttttcctcaactcagtgaggccaggatttgctctccaaaaggctttgctagtgt

SEQ ID NO: 267769 - DNA, 576 bp, Homo Sapiens
ataaactgtatttcccaggagtgttctaaatatccatgcaagaaaagactggggtttaatgagtccctgctttctgtaggtacagatgacatgtcaggctaattttgtcccttggggattatgaaggcctggaccttcccatgagcttggttcagggccttcccagcaggtcagagctcatgacatcaaacaaatcagagttgatacctgagcttttgaggctggtataaagaagatccagtcttgagagcagactttggcattagatgttggctgcagtctcttcctagtagggtacaggctttgtaggagttcctgaaaggggaacggggactatagccttatcttgaaaatcaaaacaaacaacccaaatgacaacaaactaacatttctagagcacttaatatgtgccaatcactctgcagagtatttctgagagaagtcatttattcttaagtcttgtttccttagcatgatgtatataccctgaggcctacacatggttttttaggatgccaggaatatgtgtggaaggagaagagggggagggagaaaatgaaataaagatggagtcta

SEQ ID NO: 267770 - DNA, 667 bp, Homo Sapiens
  misc_feature (243)..(279): n is a, c, g, or t
  misc_feature (281)..(397): n is a, c, g, or t
  misc_feature (424)..(424): n is a, c, g, or t
tcggtacctctgggagcccgcgtcccacagccggctctctaggaatggaggccttcaactcttaaggtcatagctgggagaagagggtgagaggcatgtcccccttagtgtttggcagttttgcttttttagtttgtaggcccttctgtttccaccctttctggcctgaccggctgctggaaatttctaggaactcctaggcttcccccctttaggcctttgcctacgttgttccctctgccnnnnnnnnnnnnnnnnnnnnnnnnnnnnnnnnnnnnnannnnnnnnnnnnnnnnnnnnnnnnnnnnnnnnnnnnnnnnnnnnnnnnnnnnnnnnnnnnnnnnnnnnnnnnnnnnnnnnnnnnnnnnnnnnnnnnnnnnnnnnnnnnnnnnnnnnnccccctccttcccttaatcagctgcancctcattccttcccagccttagttcagttggcacctccttcaggaagccctcactgactttccctggctgggtcaggcacccccttttgagctctgtcatcccatccctgaggaccctgggtcatcatgggcgatggatctgtgtcctttatgcactgggagctccatgaggcagagccagcattgtcctggtcaactgctgttcccagcaccatagagcatgtctcattccatgaaagtggg

SEQ ID NO: 267771 - DNA, 927 bp, Homo Sapiens
  misc_feature (398)..(406): n is a, c, g, or t
  misc_feature (511)..(524): n is a, c, g, or t
catcgttaacattgtgcatgtgatccaggataacctcatccgtaagaaggtttacatcctcctaaattggataggctatgtcaattctggtttcaatccccttatctactgccggagcccagatttcaggattgccttccaggagcttctgtgcctgcgcaggtcttctttgaaggcctatggaaatggctactccagcaacggcaacacaggggagcagagtggatatcacgtggaacaggagaaagaaaataaactgctgtgtgaagacctcccaggcacggaagactttgtgggccatcaaggtactgtgcctagcgataacattgattcacaagggaggaattgtagtacaaatgactcactggctataaagcagtttttctacttttaaagannnnnnnnngcccaacagaacactaaacagactatttaacttgagggtaataaacttagaataaaattgtaaaattgtatagagatatgcagaaggaagggcatccttctgccnnnnnnnnnnnnnnaagctgtaaaaagagagaaaacttatttgagtgattatttgttatttggacagttcagttcctctttgcatggaatttgtaagtttatgtctaaagagctttagtcctagaggacctgagtctgctatattttcatgacttttccatgtatctacctcactattcaagtattaggggtaatatattgctgctggtaatttgtatctgaaggagattttccttcctacacccttggacttgaggattttgagtatctcggacctttcagctgtgaacatggactcttcccccactcctcttatttgctcacacggggtattttaggcagggatttgaggagcagcttcagttgttttcccgagcaaagtctaaagtttacagtgaaataaattgtttgaccatg

SEQ ID NO: 267772 - DNA, 709 bp, Homo Sapiens
  misc_feature (537)..(537): n is a, c, g, or t
cacgatttcaaaaattttgtgaataaaagaagacacactgtatttataaagcttctaggggctgtaatagatacataattttggatgtggtataggttggcctatatatacaaaaatacgtcactaaaattaagtggagtcacaataactttttatgtaactttgttttaagttcctaatttggtaaacagtgaactcaaaataaatagaatcatattttaaggtggaaactcgatgatccatgtaagtaagcggggctggagttctgtgctgtctgggcagagaaagcacttggactgaatgatgggcacagctctctctgtgaagtcctgcagagtcactaaccttgagttcatgtgctctaagcttcactgtccctccaacccaagatcccaatttcttttattccatcttgtttcctcttgtaaacagaagagcacaatatgacctgttttcaaagaagccggcaggaatctggttctgataacaaagtccctgtcactcctgtgtctattagttctcctaggtagtttcttncaggtgcgccaacttcacttcacagtagatgaaggaatagtgccatggagaatggcatccagaagaggtatactggaaagctaatgccccaggatctctgaagaacatatcagcctgaggcttggggtcatggatggttttcaaagagcagaatcttccataaccttacata

SEQ ID NO: 267773 - DNA, 614 bp, Homo Sapiens
agtacatagaacagttatggagccatgtgaaaaaaaatagtagttatacaaatgtaaaatgctacacatgaagtatattgcattacctttttgtggcctatggaaagaagtctcagagcacagtaagattcaagtaccatctcccagaattggggtcagcaacaccattttatattttggcaaatgctacccactgtctcccaaacggcagatatctgcatataagttagtccatgtggacacacccttcctctgctacattgcattgcccatattagtagtagaattttagtgttgatttaaaagacagtctgccttaaagcagattgcatagtttgcacactgtgaattgtaattaaagtgtaaggggggcttattatgtcaacaactggcatgagaacccccgagcagcaggtgaccctgaccatgtgacgtttgtgacagctaggatccccttttcactggcttagcgatctgaaagtccaaattgaaagaagcccagaggctgtatatttcattagatcccaggggaagtacaggatacagcttccttctgttttcctgggaggtcgccagaaagtttgtagagctctgtttctgtcagagactcaaaa

SEQ ID NO: 267774 - DNA, 681 bp, Homo Sapiens
taaggtgaataccggaaaatgtcagttggatgaggtcattggtgacctcagctagagctttttaagtggaatgattgccgattaactttggaatgaggattgactaggaggcaagatgttggagacaataggcataagacttttagaagacccttggctgggaaagggaagggaaggagagggatcaggagctggaagagtccttagaatgtgaacgtgaggagctatgcaggagaaagaggttcaggctctaggagagggagagtgattgttgaagtgaaatctaggggatttgagggaagagttaggagaagctttgatgtacccacttaggcctaatggaagagaaagtttagtaaggaaacgagattcccagggtacatgagccctgggagatggagaatgtgtggaggaaccaaatgtgtgttgtgtaatttccctttaggcatattcagcagagcaggtgttggagcagaaggggcagattatgggatgtgtggtcgtatgacgtaggccagaaaactggaatttaggctttttatccttttgaaaatactatctgtttattatagcaaattttcaaaatacagaaagatagtaagaaggaaaaatcactttagtcaaactacctatatgtaagtaccattatcattttggatgttttctagtctttctgagcat

SEQ ID NO: 267775 - DNA, 660 bp, Homo Sapiens
ggtggcacgtggggtgatggtgctaatatcgctatacaagccatgcagggccctttcttcattttgcccgtctttaaagggtggaagttctggagagagtcactacatagataatgtgaggaggatctctgattcccgccatgacagagtaactggaaatgaactttccttctcaccataaacagctataaaactgggagaaaatatccacgacacatatgtctcacaagagacttgtatccagaattcttaaagaatgctttcaataataaaatggacaaaaatcccaattttaaaaatgccataaaatacttgaaaagaatccatggttaccaggggctggggtggttgacagggggttggggaaatgttggtcaaaggacataaaatttggttgaataggagggataagttcaagagctctattttacaatctggtgactgtagttagcaatatattgtatttttgaaaaatgctaggagaatggatgtaaagtgttctcaccatacaaatgaaaacgatgtgaggtaatgcatgtgttaatttgctatatttagtcattccacaatgcatatatacttcaaaacaatatgttgtacaaagtaaaggcataaaattttatctgtcaatttaaagtaaataaatgaatgaacaaatga

SEQ ID NO: 267776 - DNA, 440 bp, Homo Sapiens
gagatgtaagaaacatggtggctgagctggtgaagtttctcagcatctctgtttcttgcatgtgtctcacacccttgtctaaaatgccttgctctcatctaacccagagttctctctcaactaaggcagcagggttggcgtgaggggggcaaaggagggaggaggaaggcaaccagcctcacaagtgggggccactcctcacagccacgagcagctgggccacatgcagcactggcagcccaggtggcctgttacggcgggcagtacttccctttgcctcccttcggaatctgtcagcacttttatgtggagtcttcatcccatgttcaaccctgggggttttaaggtgtttctcctttgctttgggatttcaaacatgggcagcttcataagcactgtaactgttcatttcttctgggatgctaagggatgcctggtta

SEQ ID NO: 267777 - DNA, 742 bp, Homo Sapiens
cacctatgttagtaatagtcctgagaacacatacaggaatgagcttttagatttttaaaatccaggttttcttgcattgatttggtcacatctctgatttcacacatgaaggacctgataagtaactgcaataggttgtttacctagtaagtgtcagagttaagacgaaacccccggactcatactttcttgaccagtgcaaagcagcctctccctgatggtgctggcttggaacagcaagaacattctagtatttcttgcagcaaaactgcaaatgtaaatcactagatttcgttaagcagtaaagggaaagagttatggctgttttccatcccaaaaggtcagagatacaagttctagctatagtgcagcagctgcctacaaagacaggacacagaggtggttttcttggtctctgatcttctgtttcacctgctgatgaatttgccccatgttccttacctgtgctcagtgggcaccactgaggtctctgacttcaggtgggacgaaggtcttgcacctcaggtagctccagactcagctttggctttctcagtccaggaatacagagcatcctcctttgtgctcttctgattatgaatgcaggggatgcatatagtgacaagtggcaagtaactacttgtgtcttctgaagcagaacaaatggagactgatgtgaacagactgcttaagggccgagggaagtgctgggcacggggatggatgagattgacctggggta

SEQ ID NO: 267778 - DNA, 1227 bp, Homo Sapiens
  misc_feature (29)..(29): n is a, c, g, or t
  misc_feature (456)..(504): n is a, c, g, or t
caaaacgccattggggcagcccccgtggnatggagaatatgctgtggagtgtgccaaccttaacgtcatgccggatgtcaccttcaccattaacggagtcccctataccctcagcccaactgcctacaccctactggacttcgtggatggaatgcagttctgcagcagtggctttcaaggacttgacatccaccctccagctgggcccctctggatcctgggggatgtcttcattcgacagttttactcagtctttgaccgtgggaataaccgtgtgggactggccccagcagtcccctaaggaggggccttgtgtctgtgcctgcctgtctggacagaccttgaatatgttaggctgggggcattctttaacacctacaaaaagttatttttccagagaatgtagctgtttccagggttgcaacttgaattaagaccaaacagaacatgagcatnnnnnnnnnnnnnnnnnnnnnnnnnnnnnnnnnnnnnnnnnnnnnnnnncactcccaccaccgtcatgatggaggaattacgttatacattcatattttgtattgatttttgattatgaaaatcaaaaattttcacatttgattatgaaaatctccaaacatatgcacaagcagagatcatggtataataaatccctttgcaactccactcagccctgacaacccatccacacacggccaggcctgtttatctacactgctgcccactcctctctccagctccacatgctgtacctggatcattctgaagcaaattccgagcattacatcattttgtccataaatatttctaacatccttaaatatacaatcggaattcaagcatctcccattgtcccacaaatgtttggctgtttttgtagttggattgtttgtattaggattcaagcaaggcccatatattgcatttatttgaaatgtctgtaagtctctttccatctacagagtttagcacatttgaacgttgctggttgaaatcccgaggtgtcatttgacatggttctctgaacttatctttcctataaaatggtagttagatctggaggtctgattttgtggcaaaaatacttcctaggtggtgctgggtacttcttgttgcatcctgtcaggaggcagataatgctggtgcctctctattggtaatgttaagactgctgggtgggtttggagttcttggctttaatcattcattacaaagttcagcattttaaaa

SEQ ID NO: 267779 - DNA, 807 bp, Homo Sapiens
  misc_feature (11)..(11): n is a, c, g, or t
  misc_feature (34)..(34): n is a, c, g, or t
  misc_feature (567)..(567): n is a, c, g, or t
agccagaagcncaaaaggtagggtagcaaaaatncaagtggtagtgcaggcaaaacgtagtatgaagtcagaaaatagaatagcctggacatgatgaccgaacccacgaaaatgggtcatccaggaatgcaatggtgcagacatcgaaaggtgacaggcagaccgtctgctggggcaagcaggaccccacctgtggggcaggtattaagaagcaggctctcctgagtggatggggaatggctaagcacaggaccctcgtttccagggttctcagccagggaaacaagacagcagtttaaggctcaaaaacaaggtaggaacctggttaccagtctggacaatcaacagaaagaactgagactcaaggtcaagactggactaggtgatgaggattctgggatcaaactccttgaacaatacctcaggtcaggatgagtcccaaagccctgggcaggccccacccctcagggaaggtggtgcagggaggagagatgccatgttctggagctcggacccagccatgccagaggtgagcaaggagcaggttgggtacaccattgccccagnctgccgtaggctcacagctggaaggtcggggcgacagcagggccaggtgggccacgagctgattgttattagctgactgagacgcttagtgcatctcgtgtgacccactcacatttgggcacacttaggcttcttaatatgaaacttcttctgatttaccccctcgcattcttgcccaccctttctggaaagcacagcgctgccaaagaaaagtttggaaacaaagtcataggactgttt

SEQ ID NO: 267780 - DNA, 501 bp, Homo Sapiens
  misc_feature (155)..(155): n is a, c, g, or t
taaacattttgaggctaaatgacagcagtcattgtgggctgataatacctgccagacaaattatctcagcatcatttcttgttcctaggagttgaagcagccaaagttggctgactgtgtgcctagctctctttcagagatcctgagcaggctgnaagaccctgttgtactgggtagttctgaagcacaaaagaccacggaagagttttttaatcaaaaaatatttgaggtaatctctgaaatgcttacagaagactgcaatttggtctgtagtttacattcagaataattgcctttgaagatttaaaaaaagaaggagctttgaagaataccccatttgcaacatcattgcctctcaaccagttaaacattttcgattctttcagtccactcagtagggtcctagttaatgcactggttactaacaatttagcaattagtttcaatttcctccaccaaacattttataaatggtaaaactgactaactcagatacccact

SEQ ID NO: 267781 - DNA, 733 bp, Homo Sapiens
tccactacagtgctgagtcaccaagttacatgtgaactcaacgtgatgggagaactcagggcagaaagaacaggccacagggtgggttcggcgctgttctccctggggcaggaaggagagatgagtggtgacagaggcattgaccccgactgtggcactaaactgtagagcgggttcctgttcagccaaagccctgtagaggagaagggtggaaatgagaagataccatggtaacattagaaatcagcttgattttctagaaaataacttcattacttctatgagaccaccaagaataaaaccaactatatgctttctatctaggcttttggcagtgccacaatgggctttcttagtaatctagatatcatggcatatgtatcatgggagtggaggggataacatctgcccatcagagtgactctgaggatgacccactgtcctgtcaatgctcttaagtcaaggaccacaggaaccaactctagttgaacaagctgggtttactgctcattgcaattaaggaaaatatacaccatggggaaccatagtacatctcagtgagaagtatcagaaagggcttatcagcattggacttgtgttagctgacttgagtgagggcttaaaggagcagggctttgctctggattgattttattaaagaatcttatctagacggagggaatactagagtaaagctaaagctataactggctcgtgccgctcgtgccgaatt

SEQ ID NO: 267782 - DNA, 651 bp, Homo Sapiens
ccaaacccctaccccctgtaatttggtctacaatatttaagacagagagaaaagtaacgggttgatgtttgactctctcagcattttgagtctggcttcccaattcctgacttgactttttgtctcatttgaggtcccaattctaagccaccaaaccacctgactaaagaaacttttttcttcagagtgctcccacctccctggcttcatcctcaaataggtcatcagtagcagtcccacagtcaacagcaatggctgcacgaccttcccccatcccttgtgtagcagccccccaagtcctctgctaaagggcaaagcaaagtgagaaacagttaccctggcaatcagatgcccagataactgccccgattctgctcgtccttggtggcattttcctgcttcccctactctaaatgggcaccctgaattaggggcaccagcttccttcaatgcctttaatataggtgactgtcaccgaatacaggcttaaatatttcagtgggggattcaggctgtagttcaaagaggttaaatgatcatttttaaaacaataggaagtggcaacataatttttcaaaaccaagaataaccagtcctatgttgtgttccccctttgcggatatgatttttcagtgatttaattaagcggcc

SEQ ID NO: 267783 - DNA, 929 bp, Homo Sapiens
gatggagcggggctccctaaaggacaaggagcacagtgtctgctttctttgcaagcacagtgctgacaaggaacagaatacccacagcgactgcttccaggaaacggctgcagggcgggcgggacttctggcgagacacccccttcccagcaagccggcctgcagagttgggattttctgtctccattcggtggtataccaagtgcctgcctcccacacccagctgcccctaatccctgcctgaaaacgtgctcctgggtcacggaattcatgctgagacacgagccacacacagccaggctccaggggtccaccctccagggaacaccaccccgctacagggccacgatcacacacacaccccgcggagcatctccgggccggacaggacccacgccctccacagcccggaaaggcgggttaactggtcagcatgcagagacccaccaagtggagaccccgctcccaggcacagacgcacagctgtggatgcacgtcctcggtgacaagctcccaggtggaaactccagagcaagcgtgtcattcatacaccccgggcccagagatgtggacgtgtccagcacgcctgttctctccaagtgaccaggaggagacaatccctaggagctgacacaggtgacgaaggcccgaggtggcccgccttttcccccggccccattcccatgtgtccttccccaggcagggatttgaagtgggcagagtcttccatgttctcccaggagaggttttctgggtgcccctctcccccctcctacggttcccctgccccgccaccctggcacccctgggctgcctgccgcaccctgcagccgccacctggggaagccggcttttatctcctgagccctgctttgtaaacctcctgcagagttggatgtttataataaaggcccgtttattaatcctaa

SEQ ID NO: 267784 - DNA, 915 bp, Homo Sapiens
ctgatgcagacaggtggagagttcagtcacagaagttactggtatgacggctatgaataaaaaccccttatctcttctcttcatgatcaatgctgaagagtaaaaacggtctctgtagttacaacagaggctgtgtgacagagcgctatgaactcaagaagtgtcaagagcagctctcgggatgactacagcctcagcccctttgaatatgcatggccccagaggaaatggatctacttttaagtattaacacaagacaaaagtcaccaaggccactgagttatgattgcagaaaaaaccatcactctcaacgtgctgctctaagggaaaaggaagcaataaaatttgatcgattcaacttttaagtacacgtgaggtccaggaaatataattcttaagccataatgttgaattaacatatttcattgcacttaattttcttagaatggtgcaacttgggatgttccagacacagaagcaagacaactgcatgacgtggcagggggacactgaaataaacacagcaggaaagccagctctcctctcacagatgtcaacagtcaccggattcataaaagcagtaaattttgccttgctcagtcataaaaatgccttaacatttcagtatggggaaaatcaagtcagtcacacaagagacaggcagtgcttccaagtacttacaagaaagccatttctataacattaggacactctggggaccctaggagattgttaggtgtttacgttccaaacacaaaaattccttccttaggttttaaaagtgattttacattcttagagagaaaatgaaacctgagatgtttctcaagcagtgcaactttctaatcccttggtttcatttccaaagagaggggggaaaaagcaacgctatagaaaaactgcaagaacatccct

SEQ ID NO: 267785 - DNA, 698 bp, Homo Sapiens
  misc_feature (24)..(24): n is a, c, g, or t
gtaacagtgatgctaccaatttanctggtacggaaatcagatttttaggtcctataacgtggcttttaaaatatttccttttattctggaacaaaaactggagaaaggacaatgattccttcagaaagcaatgactcaattcaggttgttactttacatttaagtaccactcaaaaagtggacataaaagcaagtgattcctgtttgcccatcactatatcagctacatagctgagagttcagatcttaattacacaacactttctctgttaccagaagctaagactgctctgcgacaaataggacaggtagaattctcagataaccagcgatcgatgcagtggacatggtactcatgggaacaaggtagtttacgaagtttgttgccttctgtatattctgtaatgcaaacactacaggtttttaatgcatcattttcaccaaaacttctcattgccaagttgtcaatctgttctttggtgaagtcctcctaggttggtcatcatcatcctcatttaaagaggaaaaactgagccaggctaaggaagggcaaagagccactttcatcaaatgtgactggggccctatgtcgaccctctcgcctggcacctgatgagcctgatgatgagcttccttcattactgccttcaaataaatctgagctagtttctgaactttcaccaccggaactggaacta

SEQ ID NO: 267786 - DNA, 740 bp, Homo Sapiens
  misc_feature (335)..(574): n is a, c, g, or t
gaccgtaaccgcctccgtgcgtggcatatggtccctgcatgctgttcgctctgtatagtacttagtattcgctgaggctaagaggcctcaggtgcctgggcttctgcccttggactcctggatatccagcctagtgctaattgaatgctaagcagtggtaattcaaaatgagagggtcccctgcctctagagtcatcatctaattgggggacagggcagacctagataaggaaaagcagagaacttactttgggaaaacagtttatctgctgtaattgaacattcagctaccctataacccagttaatccaatactggggataaatcctagagannnnnnnnnnnnnnnnnnnnnnnnnnnnnnnnnnnnnnnnnnnnnnnnnnnnnnnnnnnnnnnnnnnnnnnnnnnnnnnnnnnnnnnnnnnnnnnnnnnnnnnnnnnnnnnnnnnnnnnnnnnnnnnnnnnnnnnnnnnnnnnnnnnnnnnnnnnnnnnnnnnnnnnnnnnnnnnnnnnnnnnnnnnnnnnnnnnnnnnnnnnnnnnnnnnnnnnnnnnnnnnnnnnnnnnnnnnnnnnntgtagcatgatgccctttctaaatgaaaggttttttcttttctatggagttattctttacatacaatatagttcataaattttaaatatattgtttaataaattttgataattgtatataatagtatagtcaccatcaagatgtagaaaatagaaaataggctagg

SEQ ID NO: 267787 - DNA, 938 bp, Homo Sapiens
ggcctgagtcaatgagtttataaactggagacagcgcatcatatgaactgtctagcagtattatgctattagctatgtttacaatttgtcctgaaggggtctagatgtgtacaccccagaaagtggtgattcctgatgacgaattggacgccactgcactgtaaccccaggtggatggcatgtagagtggggaggaaattgggggtatgacaaagtcccctgaggaaaccccagcatttaacaagcaatgactctgagctaaacattgtattaggtgctttacatacacagtgttatctaatccttacatacaacaacccaggggcactaacgttctctgaggggagcaaccatgtctacttcgtttaccaaagtgcacagcatgatgcctggcactcagaagacagtccatgaatatgctgcatgcatctccactttaaaaataagtgaaagctcgaagatgctgagtaccttgcctaactaataaatagcagtgcttagaaacccacaccttccctgcttttaaaagttctacaataccgtgctctcttctctggttctctggctttacaaaagggtaaaaagccatactctgtgcagactcagactgagaaaagtgcttgtgagaaccaaggcaagtccaaggattttcagtggccacagttcttgggagacaggtggctgagaaaggaatagttttaacctgaaaccaagggaggaggcctgaagctgggaccgaagcaatccaaccaaccaatctgacagatccacacttacgctggctttggggactgatgggagctcctcaagagcagggtgttttgtctatcatggtctccacgcctagcattatgcctgaaacatagaaggctctcaaaatgaaataaacacaggcctcattcattaaggcatgaatggaaacaacaggaaaggagtgt

SEQ ID NO: 267788 - DNA, 521 bp, Homo Sapiens
  misc_feature (104)..(104): n is a, c, g, or t
aacagcatgtgctcacttcttgcctctatatcacactttggtagttcttgcaatatttcaagctttgtaaattattgttatatctgttatggtgatctgtgaancagtgacctttgatgttaactaatgtaattattttagggcaccacaaactgcgcccataataagacaacagacttaattgataagtgttacgtgtgttctgactgctccaccaactggctgttttccagtctctctccctctgttcggcccccccatctcctaagacacaaaaatattcaagttacaccaataataaccctccagtggcctctgagtgttcaagagtaaggaggagtcgcatgtctcactttaaatcaaaagctagaaatgattgagcttagtgaggaaggcatgtcaaaatgcaagactggctgaaggctaggtctcttgtgctaaacacttagtcacattgtgaatgcaaaggtaaagttcttgaaggaaattgaaagtgctgggctgtgcgtggtggctcttac

SEQ ID NO: 267789 - DNA, 530 bp, Homo Sapiens
  misc_feature (51)..(111): n is a, c, g, or t
  misc_feature (430)..(450): n is a, c, g, or t
tgtattacaatatatttcagtttatgtgctacagagtatcatcaatattannnnnnnnnnnnnnnnnnnnnnnnnnnnnnnnnnnnnnnnnnnnnnnnnnnnnnnnnnnnnttacaggcatgagctgctgcacccagccattttttaaatgagtgagaaattaactacttttggtatgaaacatgctttggctagaaaagagtcatattaaaatgtattattaatacttgattttattactgaaaattacatgcatcaatcattaataaaaacttttatagtgactgcatatgagcatgaggaatttctctcgggcgttgaaaattttctaaaattggactgtggtgatggccacacaactgtgaatttacaaaaatcttgagttgtaaacccaaagcaggtaaactgtatggttgtaaattacatctgnnnnnnnnnnnnnnnnnnnnncctatcagcctggtgttgtggcttgcacttataatcccagctacttggaaggctgagggaggacgactgcttgagcccaa

SEQ ID NO: 267790 - DNA, 606 bp, Homo Sapiens
cctgcagtgccaaccaaatcctaatatcaatccacaggatataaagcctgctgcctccccagaggacacccctgagctcagcgcctttttgcgaaactctactattcctcatcttgtcaggaagagggatgtacatgtggtcgaattccacagacagagccctgcaaaaatactgaattgtacaaatatcgagtgtttacaaatctcctgtgcagtgggacgactcgaaggaggagaaagcgcagtcctgaaagtcaggtcacgattatgggcccacaccttcctccagagaaaaaatgatccctatgctcttgcatccctggtgtcctttgaagttaagaagatgccttatacagatcagccagcaaaactcccagaaggaagcatagcaattaagacatcagttatttgggcaactccgaatgtttccttctcaatcccattatgggtaataatactagcaatacttcttggattgttggttctcgccattttaaccttagctttatggaagtgtggattctttgacagagccagacctcctcaggaggacatgaccgacagggaacagctgacaaatgacaagacccctgaggcatgacaaga

SEQ ID NO: 267791 - DNA, 429 bp, Homo Sapiens
tcatgcctcaggggtcttgtcatttgtcagctgttccctgtcggtcatgtcctcctgaggaggtctggctctgtcaaagaatccacacttccataaagctaaggttaaaatggcgagaaccaacaatccaagaagtattgctagtattattacccataatgggattgagaaggaaacattcggagttgcccaaataactgatgtcttaattgctatgcttccttctgggagttttgctgggctgatctgtataagggcatcttcttaacttcaaaggacaccaggggatgcaagagcataggggatccattttttctctgggagggaagggtgtggggccccattaatccgtgaccctggacttttcagggacttgcggctttttctccctccttcggagtcgtccccctggcacagggaggatttttt

SEQ ID NO: 267792 - DNA, 985 bp, Homo Sapiens
attcggcacaggcattttgtcctcacaaaaagacctgtcacatggggattctattatgcccacttcccaaatgtgagaggtaaaatggtactactttgggttagtagagggcatccaggaccccaggatctctgactagtagccctcccattgtgggtggtgttcccccgactgttccatcattccccttaccacccccatattttggaagggaacccaggctcagtacccagctgtcctctcctctgtttggctgggcttgctatactaaaccagttcttcctgtccagctgggagcattccctgatctgccttcctgccactccctctcaggccaattaaaggcagccttgttttgggagtccccttccacccaaaggtgtttcctacccaggggcacagcctactgacttggccccgggcccaggcggttgtggggaagtgtcccccacctatcacctatcaagtgtactttagcttaaggacatttctggtcttctacagcgtcctcttcttgattacatgggagtaggggtgggggcggaagcctaggggcttctaggacccttgagtgaacagtgagagctcttgggacttcttgagcccagggagttatcaaacacccacgaaaatatttgggccatgatttggagggttccatgaggttggggggaggcctctttccccgctgggctgacatcccccaccttaaaatgaaaggtttgaacagggtagcctccagagtcctttccatctctcaatttgattaataacttaagtacctactattcaaaagaggtctctctcttgaaggaattaacttgagggaattaacatactccaccaaatgctgaatccctccctctctccccccgcacaccgagggcaggaactctgctctatttgtttttgtgaaatacctgtcccctagtttgtactcaggaaatgcttgtatgaatgaataaattcgtgcatgtaactttaa

SEQ ID NO: 267793 - DNA, 553 bp, Homo Sapiens
cttcgtgagaatgccgccaagttatccaaaaccaaaggatgagagaggcttccaagagagggaagactgtccaagttcaaggagaaggggtttggttccctgtctgccagggacagaaagttctttccacatgtgtctcctggtcccgagagctttcaaaaggggatgtattctgctccaagaaagaatcacctcccagtaaagtagccatgaagggctcctgtataaaatatgcacacttcccctgccctgagtttgtggagggaaaggctgtcggaagtagggactcttagggagagcccgtgtgccctgtttggttcagctgtcaggcgtgtgccacacacatcccaccttcatcttctggtcccataattctccatggatgggctgcttttagctccagttttccagtagaatgcttgagttttccttttttccgtacgtcctggaggatgaaactcataacctgtcatcatcagtactcactgtgttttccactttgacttgaagtcaaatgaagttaccaaagttaaacatggacttctcaaattag

SEQ ID NO: 267794 - DNA, 453 bp, Homo Sapiens
  misc_feature (21)..(21): n is a, c, g, or t
  misc_feature (31)..(31): n is a, c, g, or t
  misc_feature (53)..(53): n is a, c, g, or t
  misc_feature (86)..(86): n is a, c, g, or t
  misc_feature (132)..(132): n is a, c, g, or t
aaaaggaaaaactgaaagcantcctaatggnaaaactggcagctaaaaagcancccccatcccatggaagaattaatgggaaccanaaagatgaggtgggaatgtgtgtggcaacaacgcctgaacagctgnaaccaaacagggcaacacgggctctccctaaagagtcccctacttccgacagcctttccctccacaaactcagggcaggggaagtgtgcatattttatacaggagcccttcatggctactttactgggaggtgattctttcttggagcagaatacatccccttttgaaagctctcgggaccaggagacacatgtggaaagaactttctgtccctggcagacagggaaccaaaccccttctccttgaacttggacagtcttccctctcttggaagcctctctcatcctttggttttggataacttggcggcattctcacgaa

SEQ ID NO: 267795 - DNA, 717 bp, Homo Sapiens
accaggcctgaggctctggagctagagctgctcttgagcagtgggcggcctaaagctgtgctccaagctgtcgggcagctggtgcaaaaggaacaatgggatcgggctctggatgctggcctggccctcggcccctccagtcccctgcttcgaagtgaaatcttcaaactgctgctggccgagtttgcccagcaccgccggcttgatgctcacctccccctcctttgccgcctgtgcccaccagaactggctccagctgagctcctgcttctactgaggacatacctcccagatgaggtggggcccccaaccccattccctgagcctggagcagagccccctctcactgtgggcttgctcaaagccctgctggagcagactggggctcaaggatggctgtcgggcccagttctaagcccatatgaggacatcctatgggaccccagcactccacccccgactccacctcgggacctatgactacccttcaggcatcagaacactcagggcctggaggcttgcttgggactggaggcttgcttggacagttcctctgtgtcactgacacaggaaatcatttctaggacacagtgatcagggaagggtgcctgggacttggagggtcccatgtatggacctgtgtatgcaatactgttctgtcatctggagctatttttaagatgtgtgtgttaaatatatacatagtttaatatataa

SEQ ID NO: 267796 - DNA, 419 bp, Homo Sapiens
gttgaaagaagggcctttcaaggccacaaagtcccttcaaagacccttcccttcaagtctctgtacagaatgtccacaataagctaaatcctatagttcctaaaagaaagatacaaatattcaatctttcacaattaccagaggggcaaagagatggctttaaatattgtgtagaaattgcttaaatatagcaaaaagtcttcaaaatctcttataacatcttactatataactattggaggtcattttgatagtactcatcaacactttataagtacataccttctgaaccaactattttggggaatctaatccagagaaacatttccatatgtaccccaaaatacatagagatgtccatgcgccttgtttataacagagaaaaataaaaaagaatgcaagtgtccatcaacatcgaa

SEQ ID NO: 267797 - DNA, 712 bp, Homo Sapiens
catgcagaggaccactcattcagtcttgcctcttcctactcttgtcccaagcaggaattctgtctggttttctatagcaacagtgacctgatctgaaatggaaaggttaagggtagcctgggcccaatgaatcgcataaaccctaaaaggtaagaaggaaatctatcagaacttgtacaatctgaaactacagaaaatcccaggctaatccaaatccctggaaacaggccaatgccaatctgaattaaggatattccaaaggtggctagattccacgttagaaaaagaagaaaagctgtccctctttaaacatggacatacgtttggacatatagctgccctagttaggtatacacttgtcctcagtcattttactacttttagaggaactatgaaatacgcaccaaatctacaacttcctgaactctcaaaaagcagcctctttcctatcaagaggtatagaggaaataaagtaacttatcagcagtgtttcactgtcaggatgaacaactgtctaccctgtataaatagaataaattgctatgatttgtgaggctgccctaaagcagtcagttctatctatcctcattctacttatgtaaattacagttggcgtcattattcatattattccatgaaacatttgtggaaattagcaaagaagtacatacctatacttacatctattaaaaaaatacaggttaggcctgta

SEQ ID NO: 267798 - DNA, 976 bp, Homo Sapiens
  misc_feature (779)..(779): n is a, c, g, or t
  misc_feature (783)..(830): n is a, c, g, or t
  misc_feature (859)..(860): n is a, c, g, or t
  misc_feature (958)..(958): n is a, c, g, or t
acatggccatctgctttttctaatgattaagacagaaagataatgatgcaatgaagtaaatgcatgctcatctgctcctcatattagctaggcagaggtgtgatctccactttatggttggaaaaaaactgatgttcggagaagttaaataatttacaagactcgtagttcgttattcttattccaagtccactgctcatgttcccaagctgccctaggccagagcctgcttcacatttagcagactaagggtcctttttcaagtgccattttggtcaaggttaaataaatatggttttctccaatgcggataggaaattgataatgagatgatttgtaacaaatgattaaacggctatcacttgggagtctcctccctctccccttcatgtgcttcaaaagttaaaaggtgctggttgaaggtgggagcgacatcactttccttgaagagaaagaagctttatccccacacccctcaccatccagtccttctgcaaaaggagaaaggatccctctccctaccacccagttactctgaagggatgataaccagccattggggggttaaaaagaggcagtgaaccccccagttaatgagtaggaattcagcaggcagtgtaagataaatggagctctctctgcttctgctagagtcagcatgaactgccgccctgcggcttgtttgtggcaaatggagtgcgcgaaatatcaaagggcagtgatccagaagaagaccgactttgacaaattttaaattggccagaaagaaaaccagcaanaagnnnnnnnnnnnnnnnnnnnnnnnnnnnnnnnnnnnnnnnnnnnnnnnntgatgcaatttgctgtgtcctgcaatttnngcattgctgcctttgtatggaattagtggtaaacacagcggcaacaattgggggatgctgggagcaattatgagccatctaagtgagatgcttatcangtggtgaagcttttagag

SEQ ID NO: 267799 - DNA, 492 bp, Homo Sapiens
  misc_feature (376)..(376): n is a, c, g, or t
  misc_feature (438)..(438): n is a, c, g, or t
  misc_feature (444)..(444): n is a, c, g, or t
  misc_feature (472)..(472): n is a, c, g, or t
catggccatctgctttttctaatgattaagacagaaagataatgatgcaatgaagtaaatgcatgctcatctgctcctcatattagctaggcagaggtgtgatctccactttatggttggaaaaaaactgatgttcggagaagttaaataatttacaagactcgtagttcgttattcttattccaagtccactgctcatgttcccaagctgccctaggccagagcctgcttcacatttagcagactaagggtcctttttcaagtgccattttggtcaaggttaaataaatatggttttctccaatggcggatagggaattgataatgaggatgatttgtaacaaatggattaaacgggctattcacttggggagtnctcctccctcttcccctttcatgtggctttcaaaaggttaaaaggtgtctgggttgaaggtngggagncgacattcacttttccttgtaggggganaggaggcttttttccccaca

SEQ ID NO: 267800 - DNA, 480 bp, Homo Sapiens
cccatatcttgttcatgtaggctctttcatgactgtttttttcttgtgtgttttattatttcaacaataggttcatctttagtaacagtgattttctctagtattcctacatagggtctttaaggcaaccttatgcagtcatctatattttctttgctgggcctttcatggatgctgggccatttttaagttaattcctcactccatggaggaatatctttgggaccccactcttacaagcttcatgtttctttttgtttcttgtccccaggccagtgagcagagatactctgagcctgttttcaagatatgtgtcttctgggctgctggttttatgcagggagctctgtgagagtttccttgaccagggcttgtggccatagtggctactctctcaaggccttgtcacagtggttctcaggacaggctgtacactggaatcaaatggaagctccagtgccctgatacctggaccccact

SEQ ID NO: 267801 - DNA, 794 bp, Homo Sapiens
  misc_feature (93)..(141): n is a, c, g, or t
  misc_feature (513)..(513): n is a, c, g, or t
gaaggaggaaggcttataaactggggttgggagaaaggaattgagtgaaattgctgctctgggacttggtgcccccgtcctactctgggcagnnnnnnnnnnnnnnnnnnnnnnnnnnnnnnnnnnnnnnnnnnnnnnnnnggactggactggggtcgtcctccggtccccaggtatctgcgggatggtggccatctcctggtacgccttcaacatcacccgggacttcttcgaccccttgtaccccggaaccaagtacgagctgggccccgccctctacctggggtggagcgcctcactgatctccatcctgggtggcctctgcctctgctccgcctgctgctgcggctctgacgaggacccagccgccagcgcccggcggccctaccaggctcccgtgtccgtgatgcccgtcgccacctcggaccaagaaggcgacagcagctttggcaaatacggcagaaacgcctacgtgtagcagctctggcccgtgggccccgctgtcttcccaantgccccaaagaaaaggggacctggccggggcccattcccctatagtaacctcaggggccggccacgccccgctcccgtagccccgcccccgccacggccccgtgtcttgcactctcatggcccctcccaggccaagaactgctcttgggaagtcgcatatctcccctctgaggctggatccctcatcttctgaccctgggttctgggctgtgaaagggacggtgtccccgcacgtttgtattgtgtataaatacattcattaataaatgcatattgtgacc

SEQ ID NO: 267802 - DNA, 654 bp, Homo Sapiens
  misc_feature (454)..(462): n is a, c, g, or t
agggagagttgtctctgcaagccgactgtcggagagcgctttcctgagaagtctgtacttgtaacgcacccctttaggctttcatttgctacataccagtgagagcctgaaataaatgtcttatgggatcaaattcatttccaatttccatcagccagcagctacaagtcagagaggacactgggaacttgttctctttagttctgtctcaagcttctttttcgccttatgcatcactttgttcacaacatagctaatgtgaatgacggaaaatctaaaagagctgtccggttctaaatgatgagctgagctgtcttttgccaataatgtgctgcttgggaccacacacctaaaggttaaattataattgacataaatgagaaagaggattttcttctcttggaagggaaggaatccataagcttcaaagtaaaaaacaaatatattaatccannnnnnnnnaccatgctcatgatcctgaggcgtttactcagtcagcaggagcagcctcccctgtccttacacaccccacaggcacaaggtgctgtgactcttgtgggttcctgcactctgaattgttcccttgacatcttttcctacaatacctgctcagctccctcccacagaatctccttatgattaggtggatgctgt

SEQ ID NO: 267803 - DNA, 696 bp, Homo Sapiens
gactggaagggcctcagaggtcatctagatagtccagcttttccatcccattttatagatgaggaaatttgaggcccaaagacgaggggagaacttgtccaaggtctcagagctcagtggtggaccctggccagcacctgagtgtcctgctgcctctctccctggacccatgcatcgtctacctggggggatctgcatgggtcccaaatgaagggggcagagagagtcgggtcagctctcttgcccagtctaggggccgtgcctgagcgaggccctgcagggtagaggatgaggcagcttccctctccttttcagatgaagacttccggggcaggcgtcaggaggcacccaaggtggaggaaggcctgcgagaaggacagtaagagatgccagcagctcttccttgccagagatgatctgacccggtgggggcagctggaaagcaacactggcccccagctgaagggcccagctgcagccagacagatggtgcttgagaaccgaggcccggtgatcctccagccacagtccagcccaaccactgccactttccatgggacttagaacttcggagttgctgccttgcaattggaggaaggacctggggcccctataggcagcagccaattacagccccttttgtagccaggcgttcctatggtcaaagagtggaaatgcaggaaccaacctcccttt

SEQ ID NO: 267804 - DNA, 624 bp, Homo Sapiens
accatggtttcttcacatgtaaaacccggtggcacaacagtgtagccccattgtaagctagtttgtgggacacagtgcctgacataggtcaggctatttgaatattaattattctcatcgtcgatatgtcaaagtgggattcctagaaacaagtaccttcaatactctggtatactatttggcatatgtatcaccctgagaatccaagcaacccactcctaggaattggaccctagagaaacaatctggaacaggaacaaaagtccgtgctcgggaaagtagatggtaatgcagtcctaaaatgaaaaattgaagagagagagcaatcctaaatgttcccatatttgggcattggttatgtcaattatgatacccccatatgacccagtattatgcagttagggaaggggtgcacgtgaacttagcaacaggaagaaatgcttagggtattgatgttaagtgaagaaaaagggaccctctaaatagaaatgatgaaaaatattccacaaaaaccttaaaacaaagcgatgaaaagaaatacgcttcaaatgttaagtaccggcttttaagaagtagacgggttaggagtggttttgtttacttctaacatatggctgtctgtat

SEQ ID NO: 267805 - DNA, 561 bp, Homo Sapiens
  misc_feature (40)..(40): n is a, c, g, or t
  misc_feature (51)..(51): n is a, c, g, or t
  misc_feature (129)..(129): n is a, c, g, or t
  misc_feature (162)..(162): n is a, c, g, or t
  misc_feature (288)..(288): n is a, c, g, or t
  misc_feature (397)..(397): n is a, c, g, or t
  misc_feature (419)..(419): n is a, c, g, or t
  misc_feature (526)..(526): n is a, c, g, or t
acccgtaagcattcctcccctggtggcctaaggtccacgngcacccccctnccccctaactgccataaatactgggtccatatggggggtatccataaattggaccataaacccaatgcccccaaatanggaaacatttaagattggctcctcctcctcctncaaatttttccattttaagactgccattacccatcctactttccccgagcacgggacttttggttccctgttccccagattggtttcctcctagggatcaattccctagaagtggattgccttgantcctcagggtgatacatatgcccaaatagtatacccagagtattgaaggtacttgtttcctaggaatcccactttgacatatcgacgatgagaataattaatattcaanaataactgacctatgtcaggcnactgtgtaccacaaactagcttacaatggggctacactgttgtgccaccgggttttacatgtgaagaaaccatggtttgcagtgagccaagattgcgccattgcacntccagcctgggcaacagagcaaaaacttcatcctt

SEQ ID NO: 267806 - DNA, 770 bp, Homo Sapiens
  misc_feature (41)..(90): n is a, c, g, or t
  misc_feature (369)..(369): n is a, c, g, or t
  misc_feature (600)..(643): n is a, c, g, or t
gtgtgagccaccatgcctggcctttttacatcccttttaannnnnnnnnnnnnnnnnnnnnnnnnnnnnnnnnnnnnnnnnnnnnnnnnnaaattctactttctgaaatatattgatactaattagtggtttttagaagttagtatttaattaggatgggattatgggggattccagtaaatctggatcaatatgcactatcttccatgcaactgcaaataatttccttcagttgtgttttgtgtgtgggagggcgttgaaggataagggggtggcatggggatggctatctttactattttcaaaatagttttgtttctagtttgaaattattttttaaatgttaactgtgttgctgagacaattcangcggggaaagaatagtcgtttcaacaagtggtcctcagacaattagatattagcatgcaaaatattgaagtttgatgtctacctcaggtttgacctctgcctcacaccatatacaaaattaattcaaaatagatcaaagacctaagtttacctgctaaaactagaaaactcttagaagaaaacataagcataaactgtattgaccttggattaggcataatcttagatacnnnnnnnnnnnnnnnnnnnnnnnnnnnnnnnnnnnnnnnnnnnncttctgtgctacaaattatactatcaagaaagtaaatacacaaccacagaatgggagaaaatttttgcaaacatgtatctgagaatggatttgtatctagaatataaagaactcttacaactataat

SEQ ID NO: 267807 - DNA, 561 bp, Homo Sapiens
caactatttgccccagacaactgtttttcccccttccttctatggattgaccagccagttctgctttagatggtattggatggagccctggaatggctgaaaagtccaaactggcctgacttgctcagccagcaatgcggtgcaggctcctagctggggccttagttctcctgcacctgcggctctccatatggctgcttggacttcctcatagcatggcagatggattacgagaaggagcattcccaaataaaggaccacataagctagatctctggagggctagcctcagaagtcacccagtgtcacatgggccacattttattggttacagggccagccagtttgaaggggaagagaaatatgtcgctgtttatgctgtgtccagtgctagcttgctacctgctctcccagttccagtgctcagggcagcactggcagaacagatgtacttactgagttaaaaacagcaacatccaagacaattgttaacttttaaaactgtctcccatcccagaaggtataactaaaaaactaacaataaaaataatagtaataaat

SEQ ID NO: 267808 - DNA, 491 bp, Homo Sapiens
aagagccagcatgctctttgttcaggtagtaatactgattcaccagatacaaactcattcaccagatacaaacccagattgtctcatgcaaaactttgacatatgttaccttctctgtgtcttaacagaagactagactcttccagctggttgttttcaggtgagaatctgggcccctaataatcaaatagtatttttttaagtgggttttcatattaaatccttagaatttttaaaaacagcattcaagagctgagtttatcctctagactgctagtgtaaaacttttagatagatttgaattttagctctaaatgtaaatactgtttaatgtaggattgtttcattaagcttatttcttgaactggcacattataaaaaaatccatctttttgtgacatcttaattttggaacaaaattttatagattttaacctgaggtcaggagttcaagaccagcatgccaacatggcaaaaccacttctctacta

SEQ ID NO: 267809 - DNA, 801 bp, Homo Sapiens
aagagacttgaatacagagtaggaagcttttattaggaatgtcaaagtagtggagcgggaataacaaaaaccagaagaagcttcacttgattataattaatttgcagtggttggtaaaggcaggcaccaagccagattcaccactttataaataataaatctgtgggggtgatgttgtgaaagatgcatggtaaggttgcatcagcaaggtgaatcactgagtgggtgggaccgtctagaaaagcatctgtgtttggaaagggatcattctacagcttagtccagaacaccttgaacacacagcatagcagaatcttgactgtaatacttggagcaaatgtcactggcaaaaatggcatatatgctgggatgttcataacaaatagttaaatattgttggtcctttcgcatatagaatctcggtattagaggaaaatagtaaactgaaactctatttctgttctgcaagagccaatttcacctattgtaattacttcgttaccaattgcagctgtgtagtcagtcatccataggattctttttgttagacacaaagtagaaaccagctgttggccgttgagacaagtaggaatcttaggaaatgttagcctgccagttcctacttttcctaactacctgcctcaccacccccatcaaatggtggtcatgttttttgtcacccaccattcaggggagatgctatcaacgaaccacgctggctacacacaaataccttttcctcagatgatattaatcatctttgccttaaaaactgaagctctaccaagttttcactatgag

SEQ ID NO: 267810 - DNA, 775 bp, Homo Sapiens
  misc_feature (362)..(362): n is a, c, g, or t
  misc_feature (384)..(384): n is a, c, g, or t
  misc_feature (447)..(447): n is a, c, g, or t
ttcggcacagcagacatttaggatctaatgcttgaaagtgttgcttcgcttgttagatgttggatgccatctgttcaaatccaaatgctctccttctctgatgttgattattatttactgtggggagagcgtaataaaatagactcttcccctggctgcctttggacaagccccaagagtggcacctggtaccgtttttgatttttcattttccttgatggagctgtcacatctgggagatcatggatagattgcacatatttatcaaacgtgtggaagatggctgtaattttacaagaaaatttatctgtctccagaaagttcccattctaaaagactatttttatcccaacaaggaatgntcctgcattgatcttgttcttnctcttggtgtttgcacacgctgccttttcctatgtccctttctcatctattctgttttaaaantgggtcagttgggatcagtcttctgcatctgaaaatgcacattttccctgtctcagtgtgaaggaaaagcagatttcagtgagatatttcatttcctttcaagaatattgttttaagtgccaagtgaaattacgcatgctgagaatattagaacctagcaaggctggtcagaaaatgatgtcagaggcctttggtggaaattagagaagggggaagtggtgcatttggttgattagttagaagaataacaatgactaaaacctactatcaggttggggggcgggtcaccaaacaagactaggaagagacaaaacctccactgtgactg

SEQ ID NO: 267811 - DNA, 651 bp, Homo Sapiens
  misc_feature (35)..(35): n is a, c, g, or t
  misc_feature (221)..(261): n is a, c, g, or t
aattgtaagatagatagaaaactagtggcagaatnaagagtaaaactcaggtctgatgcttctcagatctttccataagttagcacttgtttcccatgcctcttagttatctcaaagaatgacccccatccgtataaacatcacagataatgcccaggtatctgggactttcaatcctgttttcatcaactcctaaagagatgttagctcttcagttcaannnnnnnnnnnnnnnnnnnnnnnnnnnnnnnnnnnnnnnnnccaggaaaaggaggactgggttttaaccactgcacgaccatctggctctccccaaaagcaggatcatctctcctcggtagtgcctgggcatccctggaacttatgcaaagaaagtccaacatggtgctgggtcttgtttagtaaacttgttacttggggttactttttttattttgtgatatattttgttattccttgtgacatactttcttacatgtttccatttttaaatatgcctgtattttctatataaaaattatattaaatagatgctgctctaccctcacaaaatgtacatattctgctgtctattgggaaagttcctggtacacatttttattcagttacttaaaatgatttttccattaaagtatattttgctactaaata

SEQ ID NO: 267812 - DNA, 752 bp, Homo Sapiens
  misc_feature (243)..(244): n is a, c, g, or t
  misc_feature (247)..(247): n is a, c, g, or t
  misc_feature (254)..(254): n is a, c, g, or t
  misc_feature (258)..(258): n is a, c, g, or t
  misc_feature (574)..(574): n is a, c, g, or t
  misc_feature (614)..(614): n is a, c, g, or t
  misc_feature (641)..(641): n is a, c, g, or t
aaatgtgaaaaaatctcatgtggtccaccagctcacgtagaaaatgcaattgctcgaggcgtacattatcaatatggagacatgatcacctactcatgttacagtggatacatgttggagggtttcctgaggagtgtttgtttagaaaatggaacatggacatcacctcctatttgcagagctgtctgtccgatttccatgtcagaatgggggcatctgccaacgcccaaatgcttgttcctnntgncaagagngctngatggggcgcctctgtgaagaaccaatctgcattcttccctgtctgaacggaggtcgctgtgtggccccttatcagtgtgactgcccgcctggctggacggggtctcgctgtcatacagctgtttgccagtctccctgcttaaatggtggaaaatgtgtaagaccaaaccgatgtcactgtctttcttcttggacgggacataactgttccaggaaaaggaggactgggttttaaccactgcacgaccatctggctctcccaaaagcaggatcatctctcctcggtagtgcctgggcatcctggaacttatgcaangaaagtccaacatggtgctgggtcttgtttagtaaacttnatacttggggttactttttttactttntgatatctcttgttattccttgtgacatactttcttacatgtttccatttttaaatatgcctgtattttctatataaaaattatattaaatagatgctgctacaaaatgta

SEQ ID NO: 267813 - DNA, 800 bp, Homo Sapiens
  misc_feature (20)..(20): n is a, c, g, or t
  misc_feature (703)..(703): n is a, c, g, or t
  misc_feature (728)..(728): n is a, c, g, or t
acagaacacagattccgagnaagcacttgagattctgttcaggttttcaaagacgcgtgtgtgcgtgccctggcggcgcagcagatcccacttctgaccgaggcagggtgtgtgtttacacagatgagcctgggcagagggagcccagaggccctggcatggcgcccccctccttccagcacacggagaaggcctccatccctcatatgccacgctgtgacacggtttgggactggcagaagatttagggcccagtgcacaggctcctgggcaggcgggaaaccatctcccgaaagcagaaaacgttggccacacggtggcaggcagtcccttcaggcgtcctggtcgtttctggttgttcgcaagtggactcctcttcctttgggaggctggatctgtcttcctcctctcactgtgagcagagggagggagagctagcagagcctgagctagggccgggatctaatgaccgccctctgcctgtccttgggccctgaaaccaggggctcttcacacacatgcagctgtgatttcagagccggtctcacttcctattggcggtgccgggccaggacagagttggacagagctgtggaaaatgggtctccaatactatcttgttttgattccagcgttccatcagctgccttcatgacacttgtacagccgcattctgagctcaaccctgaccttgcagctctgnttttcctttttggttacctatctgnttttcaagaacaacattgtggatataaataaaatgctaagggaaatgaaagtggcaagaaaggggttttttt

SEQ ID NO: 267814 - DNA, 646 bp, Homo Sapiens
  misc_feature (312)..(312): n is a, c, g, or t
ctctttaataatttttaaaataccctaaaggcttgtgaatatacaagtctactgataaattatgtattgtctgggggaatttgatagtcattgttttagataactggattttacgctgtggtagacaggctgtgacactagtgttgcacaggtgtaattggtcatcctatgccttcaccagaataacttgggagtggtgccagaaactagagtctacaattctcactgtttagagagtgttaatgacatactgtgtatgcataatagccgcatgtactataatagcccttaaaattaaactattgggattgnctgtaaatattttaaaagtactggaggtgccttttacctgtttattagattttgaaaaggtttaaattatttcatgagcaatcttttaaatttcatttaacataaagctgaaaattcaataacaggataaaaaagctttttaacaaggctgccatttaacttaaatgtgttcatcttagctttcacttgtataaaatttgattctttgaactgcagcaataaaaccctcagctcctaagaagtcttaagagggtattctatatattctgctttgttttattttctgtaaattttgtaggtaaatatgtgcattaaaaataaatactttatatat

SEQ ID NO: 267815 - DNA, 445 bp, Homo Sapiens
  misc_feature (84)..(210): n is a, c, g, or t
  misc_feature (214)..(214): n is a, c, g, or t
  misc_feature (216)..(216): n is a, c, g, or t
  misc_feature (218)..(218): n is a, c, g, or t
ggtctatttgtgcctatttttttactttcagtctattcttgtgcctctgccacctgagtagctgggattacaggcatgagcacnnnnnnnnnnnnnnnnnnnnnnnnnnnnnnnnnnnnnnnnnnnnnnnnnnnnnnnnnnnnnnnnnnnnnnnnnnnnnnnnnnnnnnnnnnnnnnnnnnnnnnnnnnnnnnnnnnnnnnnnnnnnnnntgcncncnacacctggccaatccttcagtgctttaagtactttaatttgaaagcacagaagtcagaccattagcctaaggaaaatcttggctttatacttaaacagctcctgagaggttttctatattaaggtattataaaatagctgatgttcataataaagagcttaagccaatgaacaatggttacatgtatgttcaagcagcagaaaagtctacttagaaaagcagggaaa

SEQ ID NO: 267816 - DNA, 740 bp, Homo Sapiens
  misc_feature (115)..(127): n is a, c, g, or t
  misc_feature (388)..(388): n is a, c, g, or t
gttgtaagagaggtagaaaatatgtggcattttcccatagacaacttacctttgcctctttcttatgagggtaataagtgtgtgtcagattaattactctctaaaattgatggcnnnnnnnnnnnnncccaacattctcatacttggttttcgcttagcaccagaaatcttatctacgcgacgaaagcagatttagcctagtagcagtcagccaagtgcttattcatttcttttaaatgtaactcgatttaatatgaaagaccactttcacaatgaaaacacctcccttccagggcacatttagcaactgaatagacatcaactgaacaccattcctccatcggggggaggcagagattagcatttcagtcactctttattttgttcnttcctttggggaccctcctacctcggggagtaaagggaatccccacagaatatgccctcatccaggtttttcccaggccgattgcaaaattcccaacatgtgtatgccttgtgtgaaacaagcacatgatattcaacagatgacccattcaactccgataacatcctcacatttcccatacttgcgtatgaacaggtttataatgcgattaaaaaagagattattcttgtgcagatttctttaaaggttcctataaagcacgaggcagggaaaagctggatgactgcagtgtataaactcttaaagaaaaatactttggaaaaaattcaaacaaaagaaaccaccaatttcc

SEQ ID NO: 267817 - DNA, 1125 bp, Homo Sapiens
agtttgtgcttgacttcatcttgactaagacagatgagaatatttcctagaatttgtttttagtcttatttggatcctgtcacactgcagcattttattgtcctcagctgtctgtgatcctggaaacatacgtgtgactgaagctcccaaacacccaatctctgaagaactggaaactcccataaaagacagccacctgatccctacgcctcaagcccccagtattgcctttccactcgccaacccccctgtggctccgcaccctagagaaaagattataacgatagaggagactcatgaagaattaaaaaaacagtacatatttcagttatcatctctgaatcctcaagaacgtattgactattgtcatctgattgagaaactaggtggattggtgatagaaaagcagtgctttgatcccacctgtacacacattgttgtgggacatccacttcgaaacgagaagtatttagcctcagtggcagctgggaagtgggtgcttcatcgctcctaccttgaagcctgcaggactgctggacacttcgtgcaggaagaagactatgaatggggaagtagttccatacttgatgttctgactggaatcaatgtacagcaacgaagactagcacttgcagcaatgagatggagaaaaaaaatccagcaaagacaagaatctggcattgttgagggagcatttagtgggtggaaggttattttacatgtggatcagtctcgagaagcaggcttcaaacgccttcttcagtcaggaggagcaaaggtgctacctggtcattctgtacctttatttaaagaggccacacatcttttttctgacttgaataaactgaaaccagatgactcaggagttaatatagcagaagctgctgcccagaacgtgtactgcttgagaacagaatacattgctgattatctcatgcaggaatcacctcctcatgtagaaaattactgtctaccagaagctatttcatttattcagaataataaggaacttgggactggattatcacaaaagaggaaagctcctacagaaaaaaataaaatcaaacgacctagagtacactaatcgcatctaccctttagttaccaaacattaaatgtttttaa

SEQ ID NO: 267818 - DNA, 705 bp, Homo Sapiens
cacccatctgtgagcctggtgttctatgggggagaaataacaggctatcaacccaagatttacctgcaaaagctttagaactgcaatttcaagccctccagatatagctttatctttcatttaaagaaccttttgtttccatctaagaaactataagcaataggtaaagttgaaccccaagtttcataaggaatataactctgagaaataacatgtgacttaaaatcacacaactgaaagtattagaattaccttaagtctgttctgaaagcatgacctagtcatcatactttataaagcaagatatttaaatacaaaatatcatgacattagtaatcctattcaaatgtttgccatgagttataattttatgaagttatgaattaatagatccaataattaatttttgatacaaataacataaatgtttaacataaatcttggggctggtctcatctggctttgcgggtaagccatggaagttatgcagagaatgagggagagggcaaaggggaggttggttaaatgagcctgggaagggcgtagaagccaggatagaaagactatttctgaggacggattagaggactagagaggagaaaatatctttggtcttagacctcagtcttgttctccatcccacaattcactagatgtgcaacctttaacaagtttcgtagaattcatgaccttcagtctcctcgt

SEQ ID NO: 267819 - DNA, 767 bp, Homo Sapiens
gcccaaggcaagagtgcagatgtaccacaggcctcatccttaattgttatacttcaagctaacaaacaattaagtacaatatgtcctatcagctgatcttgacaagtataccttcgtggccactgggaaggccagtttgatgtagaatccctgcctcctgggggttctgcaggttgggttccctggaccacccaattccctttccatccctggctctgtgttgtacctcaggagcttcctacatttgtgggacattcctggccatacctccaaggtccacctgcatgccccttggccattctttgggcctagaggtgcacacagctgtgtggccaccttccagaagacggacctgggaaaacagacttgaaattctctaagcagagaatctggggctccgggtatccaaagaatggtctagaggtgggaacacaggctcttgccttgcttctgcagactacttgcggtggtagacatgtatgtggtcagaggaggacccaagcaggctctctaaggctgaggccagctcaggagcccctcagtgcgcatgtctaaggcgtaactgcagaaaggaagaaagacttggggaggagattaaggcagagtcattaagactgcctagttcattttggggggaagaggataagttgggaagagttaaacaagaggaaaaagaggctgatgaaaagaagggagaagcccagaacctgcaccacttctacaaagatagggactcctaatttattattgtgtttagttagagaatg

SEQ ID NO: 267820 - DNA, 782 bp, Homo Sapiens
  misc_feature (217)..(300): n is a, c, g, or t
aactggaagaattaatgtcctgaatgctcatttgtatttaactgaaaaagtggtccatctaacagtttctacattaatgagggaaaaagaatatatccatagtaagaccacaccaaattatcagtactgtagtagttttctctaggtgaatgagattagggtcatttttctcccactacatctgaaaactggggatgataatgatacccaccaactnnnnnnnnnnnnnnnnnnnnnnnnnnnnnnnnnnnnnnnnnnnnnnnnnnnnnnnnnnnnnnnnnnnnnnnnnnnnnnnnnnnnatacttatttttgccattatcatttcttcattttacttatcagtagttcccaaaatttctacaagagatactaccttttaaaacaaagtccatattgttttaatgtatacctcattttccaatgaagtccctatatttcaataaataccttttaaaaagtatcttcctaagtagaaaatattatactaaaatgaggatgaaaagatgtacaagataaagcctatgctgacaagggctctgtaatctattaaaaatgacagggaaaatgtgcagtgtgaaatgtgcagtaagaaaaacaaaatgctatggggtatagaaaaaggaaaattatatccaggttttccgtgtctcgggtttggggtttggctggggcagtgagagagagcttctgggaggagatggcatgtgaaatgaatgaaatgaaccttgaataaagctgggacccactcagcattctgtgacaggagtggtctgctccagct

SEQ ID NO: 267821 - DNA, 789 bp, Homo Sapiens
  misc_feature (724)..(724): n is a, c, g, or t
  misc_feature (755)..(755): n is a, c, g, or t
aaataaagaataaaataatttttcagacaaacaagagaactgagtgcctgcagagctgtaacatattagatgttaaaggtaatgtcttcaagcagagggaaaatgataccacctgggaaatttgggatctaaataaaataatgaaaaatgttagagatgatacatattcaaatacaagactttttaaataatttgaagtctctttaaataaaaatgcctatttaaacaaagataataaaataggttgtgaggtttataaaatatttaaaagcaaaatataagacatcacagaatgggggagaacggaaggatgctgtcataaggcactttgactattcataaagtagtgacttttattggaagtagactgcacattttatacattagagcaaactttttctataaagatccaaatagtaaatattttagatgttgcaggtatagtaagcagaattctaaaatattttccaatcctccaaggttttcccctcccccacctttcctagtatgcatgcctttcataatttccaggctgaatatgattcattatttaatatggcagagttaactttaagatagagaaattattctgggtggtagagaaattatcctggggaactggaggtaacacacaagccctttaaagacagaatttctctggctggttgtaggggaggacattagatgtcaaagcataagagggtttaaatgtaccattgctggnattacagagggagaggccaacatggggaagnaaactgaggagcaaccttgactgatagccagcca

SEQ ID NO: 267822 - DNA, 549 bp, Homo Sapiens
ggccgcttaattaatttagtccatagtgaaccctctacagactaaaggagataatgtataggaaagtcatttgaagtaccaagtgttctgtgaagagatgtgtcacgttttctctctgtatgagttggcagtgtggatgcacattatgatgcttctaaagccactcattctccctcactgctatctggattgtgtgggggactgagtacccaatgaaaactttggacacctaggatttaagctactagtcatctgggtaacttggggacaagaaacttcagcttcagattctgtgtaaaataaggaactaggaaataggattgtctctaaaatacttccatctctaaaaattcaatgggttctgtgatcctgtaattgttcccacacatcttgatttaggatttctttaggggagttttaaatattcatttaacagtgacaggttgataatcattgaaaatgctatctatggccgggcgcgtgtggctcacgcctgtaatcccagcctgagatctttctacttttttagtgtaaatgcttatagccatc

SEQ ID NO: 267823 - DNA, 708 bp, Homo Sapiens
  misc_feature (512)..(512): n is a, c, g, or t
tgagccactgtgcctggcctaaaaaaaatttatttcgattaaaagcattttttagactagtcacatatgcagtagtggaaagaggggaaagagtagaacaaggagtttgatctgcaactaactgaacagtcaactgaggtaactcactaccttcagactagcctctgtcagttacatttgtaacttgaataacatgcttaaatttctatttcttgttctatcaagtttagacattttgtattgactccatatgtataagatacagaaattcttagctctgtattgctttttgcctcttttctaccatctattttcccacttctgttaactctagcattacttttactataatttaattttaattcactatgttctgcttatccagaagaaattcaagagggcttatacatatataaaacaggttctgagttgattaatatcatagtttaaaaaacttttaaggatgaattcttaagataaatgtgtggagaaggaataaaaagagtttattntcttagtgtacactcttatcctcctctgcgcaacttgacccttctaaattgtatcttgaagatacctctgatgtccttgggaacttttattttccaacctgtatacccagtcatacctgaatttcattaaggtgtactgttttgcatatattcttgattctaggatgccttcaactgtaagacccattattgcttt

SEQ ID NO: 267824 - DNA, 787 bp, Homo Sapiens
ggatgttatacacagttattccatctaaactctggaaagtggagttgggggaagggacattaagaataattctcaattatttattggcaaataagccaacaattccagagtctgaaaactgcttgatctcttttttaagcaacaagcaatatgatctctgtgagcccatcattactgttcatttcttacaggagaggaatgacacacttccgcctttaattgccaaattatccccaattctgaattagtggaatataatttaatatgattttattatgattaatcctgagtcattctctcccaggtaatgctgggctaggataaaaagaaatctgaattacattaaaataatttaattattccaagagaaaaggtgacagaatgttttaagtgggtgcgtaattcagagagcctagatgcagataagctgaataaagcatttaattcagcacattcatattttaacttgatcatcttgaacagttcaggcatcacaggttactagaatacacatttgctgtgtagctgggacagttacatttccaacagggagaagggggaggctaatgaatgtacaaatgctagcaacaactgtctcccgtcctctgcaagggtaagctaacttcccgtgtaatttaccacaaatgatatggtcacggcgctcactgtgccctcaagtgagagaagactgttctgaacaccagtaccaaccacagagactgacacctagtaggttctcaaagatcgatcaagtccataaagccatgaataaatattatatttctcc

SEQ ID NO: 267825 - DNA, 654 bp, Homo Sapiens
ttttattaccaaatcagctacggagtttattcttcagtatgaatacatgatttcccacaaataagtaagcacccgctacttcaatgcctcagctaaaacacatgaaatcgctcatttagttttcaagtacaaagttaaaatgcctttttaataataatatatcagagtaaaataatagtctcttttaaactccactacaagaaaacaaaacaaacagtcattgtccagacagcagacttaatttaacaatatatattttaaataaaatgttttagccaccttggtgagtcacctcctccctctgcgtattctaagggaatttcagccatttttgttgtctgttgaattctagggctgtgcaaccaaatcggtctgtgaagtgaaatgggactaggggatgctttagaccgctgctcatgttctcaggcacagggttggaggccgctaggctggggctgagggagccgccctcctcaccccccagtggagctgagccagggagctttccagttacgggagtttcgggagtcccaggccctctggtgggggaagtgagtaagtcaccaccagcaaagggatcttgtgtccttgtcctccctgctccttgcttgtttctccctcccccaaaactctgctgcctcgggtcagagacag

SEQ ID NO: 267826 - DNA, 724 bp, Homo Sapiens
  misc_feature (645)..(645): n is a, c, g, or t
caggggacctgactgctaattaattagcggtcaccttgggcaaagtggcgtaatctccatctgaggcatcttgattctcagggaagtggaatttggacttccagacaccctcagtgcctctggcttgctccctcctatccatttagtcctgcctgcatcactttgatgctgaaatttcttttagtttctcttactgcctttagaagggaacctaaacatcttaatctggctttcagtgtctttcaggatctgaaaatcatcctgataggtttaaaaagtgggatctgttttgcatttgtgtgcaggttaattgcctagccctggagaggctgtgggggggtacgagaaagagggaccagacacctctaccacccgcccacccagggtgtggagcaaaccagtaaatggttagactccaagcaatcaggcagcctgtcctctttgctctagagatgaaaaacaaaggcccagagagtggatggggcttgcccaaagtggcacagcaagtaggcagcagagctggagctagaaaccatttccagcttcgagtccagggctgttcctaaaccccactggactctctggagcgttgggtatcctgggattatcatcctgacacccatagggtaaatgtgtgtatccagngggatgaggaatgccagcctgctttacaagcaagtattgtactaaagtttggactgacttttacttggataccctctag

SEQ ID NO: 267827 - DNA, 975 bp, Homo Sapiens
  misc_feature (641)..(641): n is a, c, g, or t
aatggacagtgggctcatgattcacataagagtcaacagctccggaagcctcttggcgtcactcgcattgctcctctgctgactcccgaaggtgacaaacgtcttcctgcttccatggctttggctttacttgggaggcccttttcagtccaaatcaagcaaaaatgtactgagtgcctactgtgtgctaagattgggatattcagcagcccctactctaagaggtcccctgggccattgtgtaggctagcatagggagtggggacacagtcttagggtcctgactacttcatgctcacacccaactctgccactccccactttgccctctaggcctctgtctccttttttctgacttgaggatgatagtggtattaatatccagctcacagaattgtgatgagcagtacatgaaatgcatggaaagcagttaacacagcattcccttccccctccaacttctcctggctgcaaattaatcacctcatctgcatcctgggcctcttttgaatgcacatgctgttagagcgcttctcacattgtattaaagttagtcatttatgattccatttttcccactgactgtaggttctcaagagtagggtgtaccatatttcttttacaaccccagcaccaagcanagcacctgctactccgtcggtattcattgttccggctatgaaagcttagactaggaaaggatcttggaacagtctggtccactggttcctgaatgctcgaccgtggacctgcaggagcagaatcacccagaagtgtgttgagaaacagattccgtaggcacatccacagagacagaaagtggatccttgggccttggagttggggtgggatggatgggaagtgactgctgatgaggatgaggtttatttaggggttaaggaaaatgttctaaagttagattgtagtgatattgcacaactctgtaaataccaaaaccatcgcattatatgtttt

SEQ ID NO: 267828 - DNA, 719 bp, Homo Sapiens
atgaaacttccggtctcattgtccgggaagtgagcattgagatttcgcgccacaagtcggaagaactctttggacctgaagattactggtgccagtgtgtggcctggagctcagcgggtaccacaaagagccggaacgcgaatcgtgcgcattgcataggaactcatgacctgacatccattagcagagtcatcagagtcatctggctgctgtgttgagaatggaccatgctgggcaaggggagaagcaggaagaccagtgatgagactgcagctatgagagatgttaagctactgtagattggaagcagtggaggtggtgaggccaggatttcagatatatttaaaagtagagataacagcttttgttgagaccttggatgtgtgatgtgagagaaagaagagaaaggatgatttgaaagggctaagccttatcaaggatttctttcaaatgtctttagtgaagccattcctgcctcacagagggaggaggctgggcattcctttctcaatactttcagagcagtttgtccatacccctaatatagtgcttgtctcatttcaattatattcactcgtaaaatttgtgtttcatgccagtgagttccatgagatcaagaattctattgtacttaattttatatctctcctgcttagcacaatacctagagtatcacagatgtttaacaattttcttgaattaaaactgttataaagaaa

SEQ ID NO: 267829 - DNA, 388 bp, Homo Sapiens
  misc_feature (12)..(12): n is a, c, g, or t
aatttccttagnaatgtccttaccaaacacgacatatcttagaatggacttcctagtttccctcatcatatagctaaagccagactaatgacatgttacctgtagccattgaattcctgcacatgcctaacctaagatgcaaaaacaatttttagcagcattaacttcttattaatgaatggtcagtatttatactatgtgaaatgtggatagcaacactaagcctaatgaaagacctttagctaatattgactttagctgagatttgcagtaaatatacacttatgtgtgtgcacatttgctcaggtacaaataatcggtagtaggataactgagtcgaagggcctccattgtcaactgtaatgaatattattttccccacagaagg

SEQ ID NO: 267830 - DNA, 952 bp, Homo Sapiens
  misc_feature (223)..(223): n is a, c, g, or t
  misc_feature (758)..(767): n is a, c, g, or t
  misc_feature (911)..(911): n is a, c, g, or t
  misc_feature (941)..(941): n is a, c, g, or t
gtgtgagccactgcgaccaaccaagaaactctcttcatcaaggtattacgtgtgtaaaaccaatcacttcatgcaactgtcaaatcttctctttcgaaggcatgtaagtattaggaaagaattatattgattcatatcttctaaccatgagaattaagatgaggaaaaatccctattaatttaaagaggtgggagtttaggggagcctcccttaggcatgaantaactaaattacacacacacacaaaggaaagaagggacacaacagagaagtttgcctggacagcaatgattatatacaattaggatacattaaaagaaaataaataattgcagaggaggacagaactgtgaagatgtggaaatttcccagcagatcttttctaaactctcctatgacaagcaaactgccgtgtggcttaccattttatagcgctgaggaaattgttgttacacagtgctgcttcacctgtaatggcaaacatcagaacaaaaaccagagcccccgagaagaaatgtgtaaagatatcttcatggtgcatggagattatagtgtttccaggcttttggaacaggaaagccattttcggttttaatatactgtcctaatttaagagcaaacattctttaagtcccaaggagcattattcgcctttagaaatttctactcccaaataatatagcactgcaattacgtgagatcattctagagatttaaaaatgctttgggaagacacaaaagtgcccagcaaactttnnnnnnnnnngctccacatcactagtcatcagagaaatgcaaattaaaactacaatgagataccatctcataccagtcagaatggctattattatgaaagtcataaaataatagacgttggcaaggatgcagagaaaagggaacacttatactnctgttggtgggaatgcaaattagttcctcntggccgaattt

SEQ ID NO: 267831 - DNA, 799 bp, Homo Sapiens
  misc_feature (15)..(15): n is a, c, g, or t
  misc_feature (311)..(373): n is a, c, g, or t
cccaagatgcagggnaaggccctgtatgatggggaggatctaaagcaaaagccttttgtgcattgcctcaggttcagcagcagcagccctcactctgaagcctaccttgagaagccaggcttttctgtgaaaagctcatcagcatttatttacaatgcaaactagaaccaactcccagtcagctaataacagaccccagggaaaaagaaaaggtcttccagaccttccccgacacactttaggaaccctcaggggttgaaaaagagggtgctccagggcagtgcaacttaaactgtggttgaaggacaaannnnnnnnnnnnnnnnnnnnnnnnnnnnnnnnnnnnnnnnnnnnnnnnnnnnnnnnnnnnnnngtacagaatgtatattagcaagattcgctaggtggtttatgtgcacgttaaagtttaagaagcactgcctgagaatcccttggtcctaattaattcttttccacactcagatttgctaatgggtttcaccttatctcttgactcttgtttgatggcaacaggaaatagtagcatttcaggaagggtggaaaatataaaaagcactcccaacccaagcctccaaaaaacagcaattttcattttgtgtccatatattcccttctaatcattgtcctcatgcaagattttttttcataaagatgatctgctacataattttatatcatactctttctcctaacattacatcacaagtatactttcatgttgctgctacattcttcacacttgtcattttaatggccataaaacatgacatctagtgca

SEQ ID NO: 267832 - DNA, 1303 bp, Homo Sapiens
  misc_feature (478)..(478): n is a, c, g, or t
tcaaagaatccttttggcttagagatcactaatccatcttcagcttcaattacaactggcataaccttgacaacagattgccttgaagatagcctccttacatgctactgggggtgcagtgttcaaaaattatatgaagctctgcagaagcatgtttattgcttcagaataagcactccccaagcattagaagatgctctgtatagtgaatatctctatcaggaacagtattttattaaaaaggatagcaaagaagaaatatattgccacgttaccaagagatactaaaattgaacgactttggtacagtacccagatctcgctatccattggtagcgctattgacctaagctgatgaggatgaccggaaaatttatgatattatttccatggtgtcagtgattcatattcctgataggacttataaactatcctgcagaatattgtatcaatatttactctgggctcaaggtcaatntcatgatcttaagcaacttttcatgtctgcaaataataatttcactccctccaacaattcctcttcagaagaaaaaaacacagacagaagtttgttggaaaaggtgggactctctgaaagtgaagttgagccatcggaagagaacagcaaggactgtgttgtttgccagaatgggactgtgaactgggtactcttaccatgcagacacacatgcctgtgtgatggctgtgtgaagtattttcagcagtgcccaatgtgcaggcagtttgttcaggaatcttttgcactttgcagtcaaaaagagcaagataaagacaaaccgaagactctttgaagacatcgtaacactgaaaagtacactttctactaaagatgcagaaattgatgatcttggaattcatcataacatggaatctacagtactgaccatcaatgaaaattatattttaacttcatatttgtatggtacttggatgataaaaattaattattcctttctgcttagtgaatgaatactggaatccatctgtgttgatacataaaaattcattcaactcttgaaaagaatctaagagtttggccttttattagctagatttcctctcatgttaattagaaaaatcattctgaaaggcaatccattgaaaatttgaggaggttaaattcttaagatcactaaatgttttacctttgatgtaatcggagtgcaattaagaaaaaacttaattctacttaaagtaattgtgtgttccctagtttatacaaaggagttggaatgagcttctttagatcttttcctgaaataacagcttttataaatatcca

SEQ ID NO: 267833 - DNA, 480 bp, Homo Sapiens
  misc_feature (379)..(379): n is a, c, g, or t
  misc_feature (425)..(425): n is a, c, g, or t
  misc_feature (431)..(431): n is a, c, g, or t
  misc_feature (468)..(468): n is a, c, g, or t
aaaatataagataactgaggaaaattaattgccatttgtatattccttagtaccagattatcgttgattatgtgtaatggagagataataaatagctgaaacctaatattcttccagttttttttatgctgccggtttggatcttttttaatcagtccccttttcaaaagtattaccatgtcatgatttgaattgcatttttaaagttttcttatatacatatatttaagatcatagtaaactcccaaatacagtagagggggtaaaatccatatgctaatctgcattagaatatataaagttagatgacctttttaagaatacaaatatagggctggggtgtgggtggcctgacactattaattcataggccactttnggggagggcccagggccgggcaggatttgcttggaggtcccggggngttttnaggacccgttctgggggcaaagttgggccaaaccccngttcttcttacc

SEQ ID NO: 267834 - DNA, 483 bp, Homo Sapiens
tgacacttgcacccagcccaaatgagatgtttctaaatctaaagtttcttctgcttctgcatttctgtgaatctcatttgaaatttttcagggaagggattttatcatttgttcagagatgtctttatttttattaatacccataaaacgtttgtgtatttgcttcttcctctttctccttttgatcacattttagctacttatctagaggatctctggccaagtattcccttttattgtattgataacaattcttaatggctggcctctcttgtgtacaatgagccaatattcttttttgttctatatttttgtatcttcccctttcctgaacaaagcatatttagagtctcaaagaaatcctctccacaaagacatgttcctccctctggtgtgggtagacatagggtaagagtttggatgaaacttttgtaaattgtagtgttcttggcataaatatgaattaaatctttttttatattt

SEQ ID NO: 267835 - DNA, 725 bp, Homo Sapiens
gatgccataaccactacagttaatcaaggcactgttcccttccttgactatgatatggtcagttctggcaatgattacgggcacagagcccaagaccacgttagtgccatttaaagtgctgttagtcacactcttagcggtggctagagtggatactaggattaaaaagggcacagaaggtagaaagcacacagtcagatggctcttcaatcgatccatcttctttgcttgctctgtaaggcaatagagagatggtttgccaaccgaatcttctatcagacaacacactgttcacagcaggtcatgggacaaacctgtcctgggtccatagagttggtacttgagcaagaaccatgacaagctctctttcctccacattacctgtcttcaattgtggaggacctaattgttcacctgggtgttccttaacctcttctctcccagtaaacgggacttccagtctgcgtcactggtcacagcttggctctgccggcatttggaaggactgcatcagaatcactctggcattctcctaactacccattatagcttccagaatgctccttactgtctcattcaacttcccatgctcctctgagctccacctcatctagcgctctctgctctgtgttactgttacttatgggctccaggtcactcatgtacaccctggtttcaatctcatctgcctcccacaggctggggaacatcaccagacatttgag

SEQ ID NO: 267836 - DNA, 478 bp, Homo Sapiens
ggctggaaaaccgaaagagtgtggtcttcacctcagcacaagccacgactgaggcataaattccttctcagataccatggatgtggatgacttcccttcatgcctatcaggaagcctctaaaatggggtgtaggatctggccagaaacactgtaggagtagtaagcagatgtcctccttcccctggacatctcctagagaggaatggacccaggctgtcattccaggaagaactgcagagccttcagcctctccaaacatgtaggaggaaatgaggaaatcgctgtgttgttaatgcagagaacaaactctgtttagttgcaggggaagtttgggatataccccaaagtcctctaccccctcacttttatggccctttccctagatatactgcgggatctctccttaggataaagagttgctgttgaagttgtatatttttgatcaatatatttggaaattaaagtttctgactttaa

SEQ ID NO: 267837 - DNA, 519 bp, Homo Sapiens
cagacataattaaacttaacagcatcctcaaaggactgcactgatgcttcagtgttatttctagtgggacaaaattcagggcacagatatattaaggtttcataaatcttaagattaaataacagtaaaataaaatttggtgaaagaaatatagaaaggagaaaaattcaagtgccactttaagggggcttcatgaccaacatcctatcagatgcccacaaatcaacacacattagcatacacaggcaggtatagaaataggatacagcctagtcctgcaactctctcaaaaccacaaaatgagagcttgtaaggaatttcaggtttcaaaaaagcccacgattgctgtatttccttattataccaaaaaaggagtcaaagtgtttactgagcacctgtcacagaaacttgctaaatattttatgtaacactagagttatgtggatatataggataagcagatctttttaagtccacctttacaaatagtatttgcttgcaacatttctgtgccccctc

SEQ ID NO: 267838 - DNA, 736 bp, Homo Sapiens
  misc_feature (321)..(375): n is a, c, g, or t
cgatcacagcagaaggcctgtaagtacaaagcagtgcagataaagaaaataaaaatggagacattattttcctcgatctatgcatgtcacctttcatttagccaatcatttagacatttaaaattttcacttaatatttattaattttttaagaaaacaaacaacattgatcttgacactgacacaaatcaagagcgtttctttgtatattgactatttcataatagactctattgttttcaatatatatgaatagtttcttttatctactcatacaatttttgtaattggacagtacttcacttattcagatttatttannnnnnnnnnnnnnnnnnnnnnnnnnnnnnnnnnnnnnnnnnnnnnnnnnnnnnncttagctagaggtaacacatttgaaacatttatttcttaacagactttttccatatatatataaatggcttctcgtttccctacatagtttcataattgtacgatgatttcattactcatgtgtgtttctattgctttattgattctttcattgatctatttataataatagaatcaaaatccattaatgcaaaaaccaagaacatgagccttgtgtattcttaaatctgtctatagggtatggtattttcaacagaggcagagtcatcattgactgaagactggccctcctcttctccattacttctacatttgtttatttattaattcatcctttcactaatagtaattaaataatgtt

SEQ ID NO: 267839 - DNA, 390 bp, Homo Sapiens
aggcccttgccagatgccagcaacttgatattgaacttctcatcctccagaatggtttgtttttcctctctgtcatacctcaagaggaacacaaagagtgatggcctgtcactctgatgcctctctctactcaaatggcagaaaccaaccaggtgatggccacagtggcagaacctaggaagccaagaaaccagagaatggagacacatggcagcaatggcaagtcatcagacccaggatttcccaaagaacactggtccaggaagatgctctgtgaaaaagtgttccctggtcggagaaatttgtgaaacactttgcataatacttaaaagaatgtatggcacatcaaaggtaatatgcaataaaagaattcatttttttaaaaccaaa

SEQ ID NO: 267840 - DNA, 467 bp, Homo Sapiens
  misc_feature (18)..(18): n is a, c, g, or t
tcggcaccgagggtggtncttcccctcatgaatagatcaatgctattaccgtggaagtgggcttgttattgccaggagtaggttcccttacaaaaggatgagttcagcctccttttgcctctttctctccctcattctctttttgcccttctttcatgggatgatgcagcaagaaggcccttgccagatgccagcaacttgatattgaacttctcatcctccagaatggtgatggccacagtggcagaacctaggaagccaagaagaaaccagagaatggagacacatggcagcaatggcaagtcatcagacccaggatttcccaaagaacactggtccaggaagatgctctgtgaaaaagtgttccctggtcggagaaatttgtgaaacactttgcataatacttaaaagaatgtatggcacatcaaaggtaatatgcaataaaagaattcatttttttaaacccc

SEQ ID NO: 267841 - DNA, 528 bp, Homo Sapiens
cagaatgttaggttctgtcaatagaagatactaaagaaagaaagccaggagaagaaaagggacttctttcttcaaggtctaagctgttctaatagcattattctgggaatggcatcttccactcctcctagtacaaagaacctgcttcctcataccccgtcaaggaactgcagcatccagaatacattcatacctaacacctcaatagatgacatgttatccatggaatcgagttcaaagccctctgtaacgtggctatatcccatctactctgagctgatgttcagcaggtgatggccacagtggcagaacctaggaagccaagaagaaaccagagaatggagacacatggcagcaatggcaagtcatcagacccaggatttcccaaagaacactggtccaggaagatgctctgtgaaaaagtgttccctggtcggagaaatttgtgaaacactttgcataatacttaaaagaatgtatggcacatcaaaggtaatatgcaataaaagaattcatttttttaaaacc

SEQ ID NO: 267842 - DNA, 719 bp, Homo Sapiens
  misc_feature (517)..(657): n is a, c, g, or t
ttcggcacagagctcaatgtcaggtgggctttctccttgtggtgggtgccacagctccaggctgtcatattcatagcttctagtccagtgaaaagaaatcactaagtgtgctgatgagggtcctagaactaattctcattggcttaactttgatcatgtggccatggcactgcataacccagttggattatgcctgaattatgtgctcacttttggagctagggagagagtcagctccatatagactacatagactgggttcacatgggtcacatgggctaatgaagaagccaggggtttgagtccaggactgtctgattgccacttgttcttaggccacttcttctacctgcctttcagtgttaggaaaacaaatggcataccgatcacagaatatttgaaaaatagagagcttgctttggcagcatgtatgctaaaatcggaaggatacagagaagattagcatggcccctgtgcaaggatgacatgcaaatttgtgaagtgttccatatttttnnnnnnnnnnnnnnnnnnnnnnnnnnnnnnnnnnnnnnnnnnnnnnnnnnnnnnnnnnnnnnnnnnnnnnnnnnnnnnnnnnnnnnnnnnnnnnnnnnnnnnnnnnnnnnnnnnnnnnnnnnnnnnnnnnnnnnnnnnnnngaaaaactaaaagaaggatggaggagggactttatcattcaaaaatatcaatgtcatcagag

SEQ ID NO: 267843 - DNA, 496 bp, Homo Sapiens
  misc_feature (75)..(75): n is a, c, g, or t
tcagctcccatatagacctacatagactgggttcacatgggtcacatggctaatgaagaagcccagggtttgagncccaggactgtctgattgcccacttgttcttagcccacttctctacctgccttcagtgttagaaaacaaatgcataccgatcacagaatatttgaaaaatagagagccttgccttgggccagcatgtatgcctaaaatcggaaggataccagagaagattagcatggcccctgtgcaaggatgacatgcaaatttgtgaagtgttccatatttttgaatagataatgaatggatgctgggctaaatacctaggtgatgggatgatctgtgcagcaaatcacccagggcacacgtttacctatataataaacctgcatatcctgcacaggtacccctgaacttaaaataaaagttgaagaaaaactaaaagaaggatggaggagggactttatcattcaaaaatatcaatgtcatcagagaa

SEQ ID NO: 267844 - DNA, 755 bp, Homo Sapiens
  misc_feature (259)..(292): n is a, c, g, or t
gtctaggggtgagccatcatgcccagccaagcctgattttaaatcaggtctctgccactagcagctgagagctcctcactgataaatcctttgcagctggaagtattcaatggtatccagtatattcccaatggctcattcctcttggacagagaaactcaagttaaatgaactcttttggctgtttttctccctcccctttgtttcctccctctcccttgcctgtgtctctctgtccactctctcaggcccttccccnnnnnnnnnnnnnnnnnnnnnnnnnnnnnnnnnntgatcacccaccaggaactgggtattcgaggtggataagactgacacggccctcccagagcttccagtagagaaggagagatggcagaaatgcagaaactcacatgcaagtgataatcatctcttgtagagagtggtttaaaagaaaaaggccagagttatagggctaacagtgtatccaacgatcttctttaaattgggaagcgggtgtggtcagatgaagcggtgttcgagtgacttgcagaaagcgcctgaaccaaggaagatcttcaatacacaaaagctcacactgatgctgtactgtaggtcaggatgctccttggctgtgaggatcaggctggcgggccactgggtaaacagggcattagggccctgatgcccaacacaaagccccacccctagccagggagtcactgctgggtcctccctttctcatggctctttaagcctcctcacgaaacccg

SEQ ID NO: 267845 - DNA, 582 bp, Homo Sapiens
  misc_feature (12)..(12): n is a, c, g, or t
  misc_feature (55)..(55): n is a, c, g, or t
  misc_feature (99)..(99): n is a, c, g, or t
  misc_feature (130)..(130): n is a, c, g, or t
  misc_feature (155)..(155): n is a, c, g, or t
  misc_feature (401)..(401): n is a, c, g, or t
ccagagctgggncccccaacaggccagcttttaccccaagcccccctcaagtggntcctgatggcccctagagtcagaacccagtgcccttagactgtncccccggtcctatatgattacccccctgtcnaagttgcctagatccataggtattnattattgaagtaccatgagggtatttcctccccttaaagcagtattgtgaagtcctcctggggaaacagggcaggacttgttgtccgtattcatcccacaaaatccctaacaccctagcacccatggcccaacacataatcaacactcaagaaatgctggatggctgaattaacaagtgaacaaagcaactcaaactggcttcccagcatcatttattcacctccctcttctgctttgcccaaggngccatgcacatacaggccattgtcatcctgactgttgctttccaaaaggacaaggtggtagagatagggcccttagtatattcaacaggagtcaaaagaaatgaattcctggcctagttctgccacttaggagccttcataagcctctttcagcctcagtgtctcatcaatgaagtgtata

SEQ ID NO: 267846 - DNA, 495 bp, Homo Sapiens
gcctagagtcagaaccagtgccttagactgtgcctgggtctatatgattacccctgtcaagttgctagatcataggtattattattgagtacatgagggtatttctcccttacagcagtattgtgagtctcttggggaacagggcaggacttgtgtcgtatttcatccacaaaatcctaacacctaggcaccatgggccaacacataattcaacactcaagaaatgctggatggctgaattaacaagtgaacaaagcaactcaagctgggcttcccagcatcatttattcacctccctcttctgctttgcccaggtgccatgcacatacaggccattgtcatcctgactgttgctttccaaaaggacaaggtggtagagatagggcccttagtatattcaacaggagtcaaaagaaatgaattcctggcctagttctgccacttaggagccttcataagcctctttcagcctcagtgtctcctccatgctccgaa

SEQ ID NO: 267847 - DNA, 750 bp, Homo Sapiens
tctcagtaagtagtctttctaggcaggatttttcttccctgcttaagggggttagacctccaaaatatttgtcagggtctcttttccttttaagggtttaacccacaatcttttctgtatccgttttgtaccagctccattcctattctcaagctttggtgcataaaaccttagtttaggtgtctatatataccactactttggcctgaaaattaggaatcgtgggctcacacttgattctaagttccctagtagtgggcgtgtttcctttctacggtgcttactttcccacctggacctggcttttccccaccgtggcagtctggataattgggtattatttgttttgattggatctcagaaattacctctttagaccgagctgtgctcctccctctggatttcatgagcccattattttcttggcttaattgtccttgtaaatttggtctttttgtcctgggctttccctgtcatgtgctcctggcagccaggagaggcagtggagcttttctccgttgactgtcagaagaaagtgactgttgttgaaaatgtttgctgcaactaaaggagagctgctaagatctactttctagttaaacaagcttttatatttctccccggctcctctcagttcccttgggaaatcaactaattgtgtgtgtaagctaagtgtgtggaggagagaagatgcaaaaaggaagagaaaggtggggaaagaaggaaattgggaacaattagacaaaaaga

SEQ ID NO: 267848 - DNA, 726 bp, Homo Sapiens
  misc_feature (358)..(607): n is a, c, g, or t
cattacctctgcccagcaggacaagatgatgaaagtacagagaacttgtgggtctaggtttgtgtcagaaaggaggttagtggcttgcttagggccaggcagagggcacattggaaggaattctctgttcccggtgacagcccttggaattgctgtgcacccagagttgcggagtaatttattggcttctgataactatagtattggataacttcccaacattttattaaaaattttaaacatatagggcatgttggaaagaattaatactcaccacctagattttgccactatcacatatctgtgcatcctattaatacatttttaattattatttttttgagacagagtttctttnnnnnnnnnnnnnnnnnnnnnnnnnnnnnnnnnnnnnnnnnnnnnnnnnnnnnnnnnnnnnnnnnnnnnnnnnnnnnnnnnnnnnnnnnnnnnnnnnnnnnnnnnnnnnnnnnnnnnnnnnnnnnnnnnnnnnnnnnnnnnnnnnnnnnnnnnnnnnnnnnnnnnnnnnnnnnnnnnnnnnnnnnnnnnnnnnnnnnnnnnnnnnnnnnnnnnnnnnnnnnnnnnnnnnnnnnnnnnnnnnnnnnnnnnnaccgtgcccagccagccattaatgcatttttaatatatttttagtcaattgcagacatcgtacaattttccctaaacgttgcaacatgcctattcattacagttcagtatttttcagga

SEQ ID NO: 267849 - DNA, 812 bp, Homo Sapiens
  misc_feature (408)..(658): n is a, c, g, or t
  misc_feature (699)..(760): n is a, c, g, or t
gtcattcaattatcaggaggaagaagccaagctaggacaagacctctgggcttctaccatccaggcactgctatttctcctacactcaaaatgcccgctcaggcagtgacagccacagaaatcacaaacacctatctgatgcttcttatgtgccaggcacgtggaccgggtcacacactgagccaacgtttgctgagcagtcatgagtgtcgggcactgggccgggggaatcaagaacacagaagtgacccgtgggcatctcccttgcccctgggagctggttttctagcgggagaccctgaacattgccatttaaacacagacaattccaaatcgtggtgacaggcaggaagaaaacacgggcgtatggttgtaaggattcagaggggagtagggctggtggctcannnnnnnnnnnnnnnnnnnnnnnnnnnnnnnnnnnnnnnnnnnnnnnnnnnnnnnnnnnnnnnnnnnnnnnnnnnnnnnnnnnnnnnnnnnnnnnnnnnnnnnnnnnnnnnnnnnnnnnnnnnnnnnnnnnnnnnnnnnnnnnnnnnnnnnnnnnnnnnnnnnnnnnnnnnnnnnnnnnnnnnnnnnnnnnnnnnnnnnnnnnnnnnnnnnnnnnnnnnnnnnnnnnnnnnnnnnnnnnnnnnnnnnnnnnagaccccgtttgtaagagagaacccgggtgcggtggctcannnnnnnnnnnnnnnnnnnnnnnnnnnnnnnnnnnnnnnnnnnnnnnnnnnnnnnnnnnnnnacctgcctggccaagatggtgaaaccctgtctctactaaaaatacaaaaaaa

SEQ ID NO: 267850 - DNA, 1029 bp, Homo Sapiens
  misc_feature (667)..(667): n is a, c, g, or t
  misc_feature (940)..(984): n is a, c, g, or t
agcaacaaaataattaggaaagaaaaaatggcgtcagtgtaagtacatcacatttctcatcgcgttatttttctcatacactaaattaccttacataggtctggttctgatttactgtctgttaaatgcactcactgctaggataaaaatacccaaaaacatttgaatttctcataaggaaatattgggaattaggaaggaaaactattttaaaataacagttgttttaatattgttggggtacacccaactcttttaaagttaatgtttaatttttccccacaattttgtaggagatagcttttttcagcttttgttagtattttaaagtgtagcatacatgtcttaaggaaagaacaaggtgacatttcagtagcattttacttaattttgtgcttgtgtagattttgttacaaatccttcttcttcatcttataccaaaaattcacattactaaatattatgaatgagtttgtcttagccaattttaaggaaatgaaacaatttgaatttttacctgttgggtttgatattaaacattctaaattttatttttaattattgtaacttcatgagaggtttgttcatgttccttaatttgtagagtttctaattgtcttgagtctctcgggtacaggcttaaggattgatgagttatttaaggaanaagaatctacctgctaaatcccccataaaccccccaagagggcctccattttccaatagaagcttaatgaaggagataataaaaaagagaagacaacagaattacagagactaagtaaatatacttatttccttaaatgcacttatttaaatatacttctttaaatatattatataaataaatagaaggagctggggatgtggtggtgcacacctgtagtcctagctactcaggaagttcaggagggatgattgcttgagcccaggacctcannnnnnnnnnnnnnnnnnnnnnnnnnnnnnnnnnnnnnnnnnnnncacagagtgagaccttaaaaaaaagtgagtgagtgagtctcttta

SEQ ID NO: 267851 - DNA, 517 bp, Homo Sapiens
caattgaaaagcatcctgtacatgaaaaaagttattgcaaatgactcactttttgtgtggttccttctctccctttttccctcctatcgtcactttagaagtctggccttcattttcgacacacagataataccgtccagtggttaagagcgatggagtctattggtctacccaaggtaagccttcacgcactggaatctgaactagaaaggcaaaggggtagtacacaaacatctctttatgagcaatgactttggagactgggttatgttaatgtagaaatgagaaatgtgaggactaaaaaacatggaaagacctatccaaagtaacatatggcaagaactcagaatgagggatgtgcccagattgagagcagccaggtaaaattgtgcacaaaataaaggcagaacaagctatagctggtagataggtgagctatctaaaatagccaactccctttcttgtgttgctatttgtacataaagattctaagtctcagccacttttggtggctcat

SEQ ID NO: 267852 - DNA, 732 bp, Homo Sapiens
  misc_feature (197)..(197): n is a, c, g, or t
tcctgcaggctgtacacaaagcatggtgttggcatctgcttagcttctggggaggcctcaggaagtttccaatcatagcggaagacagagagcaggcatcacatggtgagggaaggggtgaggtgccaggctccttaaacaaccagatctcatgggaactaccagggcaagaactgactcattaccatggggatggncaccaacccattcatgaggggtctgtgcccatgacccaatatctcccagtaagccccatcttccagcactggaggttcacatttcagtatgagatttggagaggacacatatccaaaccgtatcaccatgagttaaaccaatacatcaaatttttagggacagttggaagatcttcagagtcaagacaaaagagttgaaaatggggtgttggactataaccatgagtattttatacaatctctctttctccttgaatcatagaaatggtgtttgaaagctcctttcaatatagagaacccccttacctgtcagtgcccaaaggcccccaactggggagatctgaagtgagaggaggaagctgcccaggttttcctgtccctggagagccatgggtcctgaggattggagcttatcattgagcaggctgttgtcacatacacagccttccagcttctattatgatgcattgtactgtttatataatcttgtatttgggaaatgcctaattatattttttaaaatcactccaatatc

SEQ ID NO: 267853 - DNA, 832 bp, Homo Sapiens
tgagggggaagggggcttaacaaacctcaccttaatcttattccttgatatacttttattttttcttaatctctttgggttctgtcagattaggtatttcttaaagatatgtggcagggtaatttgaagactccaggattatcttcttgtttgtattttattggtttaataactttagaataattatgtttctgagaactaacacctttacagatgaaattgattgaggactaggaagtaacttcatttagatcatgtataacactgtaaagtggtaattaagagttaaaaggcttgggttggaatcccatctcttcaactctgtaaccttgagcaagttcctttacctcattctcagcttcctcatctgtaaataattatgatacatgtctcatataagggagttgtaagaattaaaggaaataatgtttataaatggcttagcatagtacccggtacagtaaacgctcgacaatgaaagctaacaaagtacagtttcaattaaggtatactctataaaaattatagactatgttagttacattgatttttcaaaatatgttgtctaattaaattaaaactttaataaattttaaataatttaaaacaacatttaaaataaaggtttggattagattgattatgtacttagaatagctatttgaacctaatagaaaaataagaatattaatgtttttggctatagtcatcttatggaatcctctgtacttcttattttccttattaatatagcttgttaaacacaactttatttttcttattaatattactggttaaacacataaccattgactatcacctctattggaag

SEQ ID NO: 267854 - DNA, 653 bp, Homo Sapiens
  misc_feature (17)..(17): n is a, c, g, or t
agagagctagcaccagnaacctgatataaaagcaaaagcttattagattcataaggcacagacttgaaggaacattttcataatagatgcttctaaaagctctatcatttgttttactttaaaatgcacactacataacaacctaatatcttaacttggtccaactatttagtataactaatatgagtttttatactgataacttgcaatgccattaaaacccaagaaggtaaagagaagctcagcatggcaggcactttcttgtatgacttggcattctcatgtaagagagccagaatccaactgcagtcagcccacgatgtgctggccactgttctctgtttttgctactgaggtgtggggggtgttgctcacacagtcatgatatcccaggtcagtgatcacaagcaacgtgttgctcaggagctcccagggtgttcccagggctcctcagaggtcactgctgctagttcctccaatggttcaggaacaatacgttcttacctgctccactgcttatcatcagttttcccaatagcaccagctgatcacacatcaactccttctattcatcagctgatttaaagtcaaagcttgtacaattttaatggaaactcatgtgggtaaaagtctgagagctacttataccaacc

SEQ ID NO: 267855 - DNA, 1112 bp, Homo Sapiens
ctgactgaaacttggctggcactggaggacatgctttacctgagctcccttaaaagatgcactctctgatttccattatgaccctgcaagcaagtggcagtgacgcaggattttttcagtgctgcttggccagctggatatatccacagctggcaaaacacatacctgagcctcactcagccctgggtcacaacaggaggcaccctggccattcgatgagccaggccacacctggcttgtactctaactggaccccgtgttcaccacaggatccacactcagcccacagctgggccaggctgggggtgccttgacctgcctccgccctgtgcgttggcatcccaacaaggggaatgtggtggcacttgaaaagggatgccagtgaccctgaagccccaaaggggattgctatagcctttttcatggcccacattcggtgggtctcaagttcttgtttccatgttccaagaagaatgaagttatgctacagccaaagggtgagcacagcagagagttttactgagtgacagctctcagcagagagcggacccagagaaggcagccccctacctgaagttgggtagctcccctgacctgaaggcaggcagtccccaccaagtgtggctgagtccaggacttttctgggctcagaatcggggagtgcatgctgattggtttatgagtatgcaagaaaggctaaaacaaaggcacccactcaaaggtaggtaagaaacacagtgcaagaaaccacttagggaagagtaggtatatgtaaaaataggtggaaaggtggggattaatcagaggaaagcatgcccaaacgaaaagagaggttcctcaatttggtcccatggatttatcccaagacttgtagcttggatttcaggctttgaactgtctttggtttgaaggggggtttcattggggacccgccccatcggcctaggcatttgactgcctctgccactatcagcaaagtgaggtggacctcacctgaagggcactggagttgaggaaatcaagcatctggagcaacaggttattggactcataacttgagggcacagtgagttgcccaaagttctacatgaacaaccatgtagagaaagcgc

SEQ ID NO: 267856 - DNA, 417 bp, Homo Sapiens
  misc_feature (19)..(19): n is a, c, g, or t
  misc_feature (71)..(71): n is a, c, g, or t
  misc_feature (84)..(84): n is a, c, g, or t
  misc_feature (111)..(111): n is a, c, g, or t
  misc_feature (182)..(182): n is a, c, g, or t
ctttcaagggtcaattggnaatcccctttttcaaagtgcccacccaaaattccccctttgttgggatgccnaaacgcaacaggncggaggcaaggtcaaaggcaccccccnagccctggcccaagctgtgggctgaagtgtgggatccctgtggtgaaacacggggtcccagttagagtacnaaacccaggtgtggccctggctcatcgaatggcccagggtgcctcctgttgtgaacccagggctgagtgaggctcaggtatgtgttttgccagctgtggatatatccagctggccaagcagcactgaaaaaatcctgcgtcactgccacttgcttgcagggtcataatggaaatcagagagtgcatcttttaagggagctcaggtaaagcatgtcctccagtgccagccaagttt

SEQ ID NO: 267857 - DNA, 1096 bp, Homo Sapiens
  misc_feature (47)..(99): n is a, c, g, or t
  misc_feature (330)..(330): n is a, c, g, or t
gctcactgcaaataatctggtaccttgcccccaaataaccgccaggnnnnnnnnnnnnnnnnnnnnnnnnnnnnnnnnnnnnnnnnnnnnnnnnnnnnncctcatacctccaaggaaagaaaatcttactgtcatgaagattcagtgttgatcatcttgttattccttcagattagtgtggtttctattccctaacctgctactaaattacataaagtctttaagttataaaaatgattccagggtcagaaggtgggtaaggcatcatctcaaaagtatctctagtgggagggcctaatcacttcctcatttcaaaacacattatcaganacaactttagagcagccttttgacttggggttcattagcccctgagggggaacagggggtgggaagctggccgtctgagggccctggaaattctatgagcattttgagtgttcacagacatgtgatgtgcatttgaaggaaagatagtccatagctttcttaagctcaaagagacccattgtctcttcaaaataacttgtttttgaatatcaaatattaaattcaggtcttagcaaataaaagtgagaaatttctgagacatttgtaaattacaatgtttccatgttcaactagatcttcactagaccattaataaaagctttattattctgagctccgtgtcctggagaaaatcatttaagttgtaaaactgagcatcaaaactgaagaatagcctaataggtctcgaacaatctcacatgtttttcacaaatttactaacgaatttccttagaacacattctgtccatataatttacaaagtggcaattgttcatgcaatattgaaactgaatcatcatttgtctttacatgtacaaaatcaagatgggaagaaagggcactacagtatttctatagaaaagaaaggttttccacagaaatcagtaagtttaaaaactgcattaaagttttctataagaaagatattttcaaagatttaaatcttggattaaaattatccttttaaaattaaaacatggagtataagaatttggctcaaatgtatgaaatctgaatggaaaaagtgtgctattctaaattcata

SEQ ID NO: 267858 - DNA, 337 bp, Homo Sapiens
  misc_feature (82)..(82): n is a, c, g, or t
gccaaagaaatcgggcacgagagacattcaaaacttcttaaatagcccccaggcgtgggtggcacgccccggaatccccagnactttgggaggctgagctttccctcattggccgtcatgccttggatcattaaggacactttggaacggagctttgctattctctgaagatacacaaaatcctccactgctcacgtcataatctatttaccaactgtggaaaattccgcggtgcctgtggtttttaaagtgatgctgaagcgagcacctttgtgcatatgtcttgatccacgcctgattttaaaatttcagataaaatcctagaagtgaaaaaaga

SEQ ID NO: 267859 - DNA, 672 bp, Homo Sapiens
acgacctggtactccaggtcatgggcttgcagctgcagctggataacatctcgtccttcctggatgaccacgaagagaacatgcatgatcttcagtaccatacccactacgcccagaaccgcactgtggagaggtttgagtctctggaaggacgcatggcttctcacgagattgaaattggcaccatcttcaccaacatcaatgccaccgacaaccacgtgcacagcatgctcaagtacctggatgacgtgcggctctcctgcacgctgggcttccacacccatgccgaggagctctactacctgaacaagtctgtctccatcatgctgggcaccacagacctgctccgggagcgcttcagcctgctcagtgcccggctggacctcaacgtccggaacctctccatgatcgtggaggagatgaaggcagtggacacacagcatggagaaatccttcgcaatgtcaccatcctacgaggtcacactttgttttcacataatcggatatgatatgaagccagccataaagcccaggatgaccaagaatataatttgaaaatgaatttgtttactatccttaatggtaagcatcaccttaagcacatattatgccttgagacactagccaattgtggtacatgaaaataatttataaataaataaatttacctat

SEQ ID NO: 267860 - DNA, 781 bp, Homo Sapiens
  misc_feature (1)..(1): n is a, c, g, or t
  misc_feature (224)..(224): n is a, c, g, or t
nagcctctatatcttgaactccacacctcaaacccagattgtccacatgtgagcacctgtctttttggtttgctgtttctctcgtgagttgtatccagttgcccaaggtggaaagttggggcgtcatccagcaggtaagtcctgacacctccacctccccgatggcttcagaagccagcctcttctttttctgttttcctctggcctcttcaactttcctcatnccatcttaccattaagccagaaaaatgacccccaaatgtggaatccgatgggtgttctttctggccggacatctttctttggcttctgctgtgggggtaaagtccaagcccctgggttccctgtctctcctctggtctaatcttctattcctctcatcctgtactttgcccttcatcaactctgaactgtttatagttctctgaacatagcccgagtgattcaacacatttgcatgtactgttccctctccctgctgtgataaagcgacagtcaccctaatcccccgccccctccgttgcattttttctttcctacaagatttattatgcacctactgtgtgtatggctctgggatgctgtaataagcaagacagacaccatctttcccttcacggggcgtatgtgtctcgtgcatactgggagggcagggacagggtctccatccatttctgcattccaatgccaagagggtgtcagatctgggtgggtcgaggtagggaacaggtaaacataactcacagtgtgatgccgtgttacagccaggctgggttcctca

SEQ ID NO: 267861 - DNA, 399 bp, Homo Sapiens
  misc_feature (150)..(150): n is a, c, g, or t
  misc_feature (154)..(256): n is a, c, g, or t
aactggcaagaatttatagaataatatatggtggtagacctggcaaacatcacctcctctggacatccttaattacaaactattaaaaaatgaattagatgcacgcaagcttttgccttaacatcagtggtttcaggccaggcaacaggngcannnnnnnnnnnnnnnnnnnnnnnnnnnnnnnnnnnnnnnnnnnnnnnnnnnnnnnnnnnnnnnnnnnnnnnnnnnnnnnnnnnnnnnnnnnnnnnnnnnnnnnaacttaggtaggcatggtgacttgtcctgcaggccagctactcagttggctgaggtggaaggatcacttgaacccaggaggtccaggctacagtgagtcgtgattgcatcctttactccagactgagttaacagagtaagacc

SEQ ID NO: 267862 - DNA, 787 bp, Homo Sapiens
acaggtactgagccgtgtgtatccttcaggtccaagcagcttctaaactgtgtctatctctgttcaggtccctggaactctcctgggcagcaagctcacaagagaccgacctctgtggccttcgaagcgggttgctgttagacaccttttagaagctacattcatagtatctcaaaagacagacataaggggtactcggtatggccaccactcactcccacaacacagccaccatttcccacccagaatttcctgtgaaatgtgctcattttaaaacagcacacatcctgagaattgcaaagttgggcatagagatcaatacaaattagacttctttttagatacgctctacgctctgcagagccctctggggtctccaagggctgggacctgctggataaaactggatgaaactaagttgctgtttctttggtgcccttgaatggactttcttggctgcagtgacgttaggtccgcttcctagccgcgtgctgctctgccatcggggatgctaaagtcggggagggccaggaagcctttctttgtttggaagtttttgtttctccttcgcctgctaggttgggataatccgttgggaagtctctgagcgtctttaaacataaaatctagtttcaaaggtttaaattcccaagttgccccctaagttacatgttgcttaggcttggttgctatctgtatggtataaataattccatttagaaattaagaaattatgggctgcatttttgatgccagtggctctgtagtatcccccaaccaccaaaaa

SEQ ID NO: 267863 - DNA, 523 bp, Homo Sapiens
  misc_feature (120)..(153): n is a, c, g, or t
tgccgtgtaattcaatgtttcattccgctgcctccatcatgtaatagaatcgctttccagaaaggcagttaactggaagcagcagaggctcccagccgtgagaggactgctcaacaatgnnnnnnnnnnnnnnnnnnnnnnnnnnnnnnnnnnttgtgttttccctctgaggggcccaagggttatggctttcatgtctaggtgtggggacagaggagggagaggcagatccctgggccgggagaggatggccctggtctgaatctggagtaattaatgccacccaaagaaaaagccctgcccaggtccaatgttgtcttagatctgatgatgctgctatttacaaaacactgatcgtccgaaagcttgaatctgttcctcctcgaatgaccctgtagatgcctgacctccaccgtacctccacatcactattcatgtccttctaggaaaatgtgcacatgcctcacgcactatgtgggaagggcgtgtttttaaattaataaagtgtgtcaccattagccat

SEQ ID NO: 267864 - DNA, 798 bp, Homo Sapiens
  misc_feature (137)..(208): n is a, c, g, or t
  misc_feature (239)..(285): n is a, c, g, or t
  misc_feature (323)..(323): n is a, c, g, or t
  misc_feature (751)..(751): n is a, c, g, or t
atatggatatctggttatgtggcttatccacagagtccagcctaagatctgggtttaaattatactgctgtcatttttttccttttgagggagtggatatagtagaaagaattgggatttcaatattttctccagannnnnnnnnnnnnnnnnnnnnnnnnnnnnnnnnnnnnnnnnnnnnnnnnnnnnnnnnnnnnnnnnnnnnnnntagttgtaaggattgaggacactgtcttggnnnnnnnnnnnnnnnnnnnnnnnnnnnnnnnnnnnnnnnnnnnnnnngccccttttattaaaattattttttactgtttgggatnatcttccttcaatctttttattttttgcactagtagcgcctgttctaaaaaaagtgtgtttatattctataggactggctgatagtctaagaggggaagccatattttagcctggccaccagaggtagatcatgttaatcaaagcattttaaccaaggctttcctgtttcttctttctccctgctttgcatttgatcacttcttagcttttatttcttaacgcgatgggaacatttgcaggtctcagtgattctacagactgttagcacaatgtgtctaatcggaggggatagactttttaaaaataactcttctggtagttaaataattcctcatggaaaatgtgtaaattatagaaaaaattcaataggaaaaataagttgtctgtagtcctacctccccggagatagccactggtactggtttgnggggtttcctcccagtctgattttctaggtacagaaatggacaaaag

SEQ ID NO: 267865 - DNA, 429 bp, Homo Sapiens
  misc_feature (29)..(29): n is a, c, g, or t
  misc_feature (35)..(35): n is a, c, g, or t
gtggttctgggttggggtgtccccgtgangttgcnagttccgatggtagctggaaactgccagtccatctccacgagcttcttccattccacatgtcctggtacccgccacaggatgatccaaatatctggagtctgaaacagctggggctcctgggtgcctccctctatctctgtgtgatgtctctacatggtctcttctgcatgacggcttcatggtagctggacttcttacatggtggctcagggtgtcaaagacacatgtcccaggagagaaagacagaaccctaggctgaaggaatattacctttttctaactcagaaatcacagtgtcactttgccgattcgttataagtatatatctaagatcaacccacactggaaggaaatgacagcctctattttaaaattaccttgttggaggctctc

SEQ ID NO: 267866 - DNA, 959 bp, Homo Sapiens
  misc_feature (295)..(295): n is a, c, g, or t
atttctcaccctgctccttggtcttgactgcgtgaaattcctccctgatgagccgtacattaaagtccgcatctgctttgttgctggagccacgttactaatagcaggtaccccaggaatcattggctctgtgtggtatgctgttgatgtgtatgtggaacgttctactttggttttgcacaatatatttcttggtatccaatataaatttggttggtcctgttggctcggaatggctggggtctctgggttgctttttggctggagctgttctgacctgctgcttatatctttnttaaagatgttgggacctgaggagaaactatccctattccttgaggaaagcctattcagccgcgggtgtttccatggccaagtcatactcagcccctcgcacagagacggccaaaatgtatgctgtagacacaagggtgtaaaatgcacgtttcagggtgtgtttgcatatgatttaatcaatcagtatggttacattgataaaatagtaagtcaatccaggaacagttatttagaattcatattgaattaaattaattgctagcttaatcaaaatgtttgattctcctatactttttctttctattactcttatattttcccgtcattctctctgctaaccttccaccttatgcacacactttccctatattttaagataagtctgctaggatgtagaaatatttgtttgtgatttctatatagctattagagattatgacatagtaatattaaaatgaaatgatacttaaacagaaagcaatttccaaagaggcccagggaccctaatctttgaagagatgaagaaacttacttttctccctggcttttggttcactttttgtacttttaacaagtgggtgaattatttgataattttgaggaagattattcttttaaattcaaactagtatgtcaatgcctaccattactctgattatttt

SEQ ID NO: 267867 - DNA, 840 bp, Homo Sapiens
tagtctctacaatattgtcagactgatctctgcaaaactcaaaagtcaaattactcttctactttaaacttccagtagctcccggattcatttaagggtagaatctaaatcctttggcatagcacttaagaccatttccaagggagtggctctaccatggagccctagagactctacatgtgtctacatgggatgcacaggcaaagcttggactgccatatgacctaaatctgggtggaatgccctgtgatcctcctaggaacatggcaagggaggaaatcttcagagaaggcttcgcgaggttgttttctcatctgcctctatcttgtggggatgctgccatgaggcggttttctgatataactcccaggttccagaggaacatgagactcccaacttaacccctaggctcccgtagggcagaactgcagctctatagccatttagctgccagtctggaattgactggccagcaatagggtgtatcacaactccttgctgaagccatctgaccccttttgtttcagtgccatccttttggtttgggataaggactcatagggctgacacctttagcttctcttttcttcactatgtatataagtaataatctggctgaatctaaaattagttcattatttctttaccagctgaatctgtaagtgttagacttggacggtcctttgtgtttggcacctttcataatctgattcaatcaaagcctttaaccctgatctatttactagtctaaacaactatctcattacaaaattaacatatgatattgtgaaagtctgcttctttatctgactatccattttctgctctatacaaatacag

SEQ ID NO: 267868 - DNA, 716 bp, Homo Sapiens
  misc_feature (332)..(332): n is a, c, g, or t
ctagaattaggcaagtcaaagagcatttttaatagaattgatggattttctttccctactcataattccacgaagaaaaacctttaagggaaatatcagtatccccttgaatctcagcaatgccattgactaacgtcctgcggctgtttgtgcgcttcctggcacatttttcacagtgcagtccaatggctgcctaggggatttcttaaagcatggctgactgcatgttggagtttgcatgggagatttttgcttagcctcgtggtggttggaagtaaaatgtttgtggcaagtttgaaaagttctctgctgacctacgctttgcatttcangaaaacctatgttatcagaccactgaactatggagcctatgaaaaggcctgtcattttcccatcccatttgttgttacttggtttgggctctgttcatgctgtccttctgtttgggatcacaaatcctgcaatgaatagctacgatttaaatatacatacactcattgtaaaaaaaatctgacagctggtatagtttgagcttgtcttgcttttaagtataattatccttctggagatccaggggctctgatttctgggtaacagcatccttgatcaacatgcagtgttactgaggcctctctgctttcttgcatattaatcacacagcaatgttcaacagcttttcctaatgaaaaatttcctagttgatttaaacatctttt

SEQ ID NO: 267869 - DNA, 511 bp, Homo Sapiens
  misc_feature (46)..(88): n is a, c, g, or t
aagtaaactaaaccgatgataacaaccatataatcaccagttgttnnnnnnnnnnnnnnnnnnnnnnnnnnnnnnnnnnnnnnnnnnngaatgcagagtaattgggatagtcacttcagggtgcctgcagagaccacaggagagggtgacgtgtgtttgtgatttctgtggtaccacccatcagtggacctgatggaccatggttctgacttctatcctttccccattttatagatggggaagatgagatgcagaagcacagtaactttccatgtgcatgtaggcatctatgtaagtggttaagtgagaatttcaaacccaggtggtattgacttccagagttagtatttttaaccactgtgctgtactgtcccacaagtaatattagtttaattttagtgaaataaccaagataagtaccaagcagactaaccccaaagtccgctcttaacagctacactaactgcctctcaagaggtcgtagagcttatagactgacacagctggtgtg

SEQ ID NO: 267870 - DNA, 496 bp, Homo Sapiens
ctggacagcattttttaataggctatttcctgggccaggatgaagacttgttcactgcctagattttgtgtaatctgattatcccatgtcctagcaaattgccttacagcacccaaatcaaatacacccatttttttggtaaaatgccactctaccattaatgttgaatctaaatggttctataaaacctgccttatacatccatgctcctagtgactcaatttcctagcgtatcttactttttgaccatgaccagcagtaaaaaatttacatcacgatttgctacacttaatgcatatatctatgcacagatctatactgcaatgcaaaaatgcaccatcacaaaactgtaggtgacgtgcttagatgttctaatgcatttcattaaaaaattgcaatcacccacaaaaactgatttcaaaccatgcagtttgaaagacaaatgctaccctgtcttagagaatatgggtacatagccagtgacagtacaatctga

SEQ ID NO: 267871 - DNA, 684 bp, Homo Sapiens
  misc_feature (360)..(360): n is a, c, g, or t
  misc_feature (487)..(499): n is a, c, g, or t
caaagaccataccctccctccccctaatatctgcaaaagaacagggacgccaaagcatgcacacttaaacacaccttgagagctgcttccgcccctagaacggaatccacaaaagcagtttgcatctcctgtgtctgctttcatgaaattggttgaaatctaaatctgaacaaatctgcttgttttgtgaaaatccatatactatttgtaaatttgtgggttgtctgcccttcccaaagctcatacgttaatgaaacaatgatcaggacctactcttcttaggacttttcagctgatttttgtggtttcacaacagtgaggacagcatgagacacatcactgtggggatgttgatggatnaaatgccaattattttacagtagggaaggattcaaatgctatgtttacaggacaggatttggaaacagggagcccttactatcttttattttcattccatttgagtacttactgtgtgcaaggatannnnnnnnnnnnnctcaaaataacccagcgaggtaggtactacattcctcatcctacagatgcatccaaggctcagagagggccaatgacacttccaggttcacatgaatacagacattttcagtttgtctgactctaaagactattctaagctgtttctctaagtatttttaactatatacttttaattaagcggcc

SEQ ID NO: 267872 - DNA, 673 bp, Homo Sapiens
  misc_feature (308)..(308): n is a, c, g, or t
ttgagacgttagggatggatttgaggcacaagtgagacagtgcagaaggaatttgagggttggagggggctttcttgaatctgagcgattcagaccataaaagtaaacttgtctttgtttatttgaccaggcttacatcaaacatggtttctcttttattaatatcaaacacaatgtatttcaattcagtaaatatctgagggacagaaaccaacctaggtgctgttggtcacagtcttggaggacagaatggcagaagtaaatactccataaatacatgggaataggaaatctgtgccaaagtgccnaaaaacataggaagaggtagccagttatttcattggaagcagtggggcagattaaggaaaaattcagaatgaaaggtaacattagacactgggtgtctagaggaataggagtttgccaggcagctggaggaagggcagcaccggggcagaggaaccagcgtaagcaaaggcagggagatgtgaagagttatggggaatggagaaaagactggtgaggcaggagtggaggatactgagagttgcaagaggtggagagagattggagctggattatgatggggaagtgtgaagatatttacacctaatggtttttgaacagggagagcaaataggtccaaaaatgcctggcagcctcacagagaata

SEQ ID NO: 267873 - DNA, 578 bp, Homo Sapiens
ttatggtttgggcatggcatccaatcaggcttcagtcttggtttatgttgtgagttaataaaaatgcatacagcttcatataaacagggccttcttatattttcttttatttaccaactatagacacaaagtcaagggcttattttcaatccattttattgatttattttatttctctgttttcctcttcatgtattcaaccattttttaggctccaacttttgagtgtggaaccatgccagcattagagatgcaaaggtgaccaagatgggcattccttgcctacagaatgtagtctaaatagggagatgcagaccaacttgcaactacaaaacagtgtgttaagtggtaggtgagcaaggagacgggtatctaaccccaaattagcggcttaataaagtaattctgaaaaagctacagtcctggaggatgattaagaggctgctggggtcgcagtgtgagggagtgtggcagggtagaaagagggcaaagggatatttgagaccagtggttctcaaaagagggtagctctgtcctcaagcaggaatttcagaaaatgttaaggacattctgggctg

SEQ ID NO: 267874 - DNA, 862 bp, Homo Sapiens
  misc_feature (11)..(11): n is a, c, g, or t
atctgtcaatnactttgccatacattaatttactctatccttcttataagcctgaggttgaataggaccctatttatagatgagtaaactgaggctcaaagaggttaagtgacttgatcaaggtcatatgactcatgagcaactgagcaaagacttaaacagctcaatctactgcactctgatttctccctgtgaaccaaacatgaacctcccattacacctacagaggtctgtgtccatcatttgagcatgccagaatagaaaaacagagctcttggcattgatgttagcttgatagggaaatttgcctgctaagcttggaatctgtgacaggacaagcagatgccttgccaggcaagagggcatttagctaagacagcagatttgcagaggcagacccctgatccaatagcactttttactgtgatccatttgacctgtggccatgccattctggaatagaccaaaccaatgtcaaaggtggtctctatgagagctgcatgcctccaaagtaatcgatggctgatgggagagtggaagtagagaatatacatttctggtttacacaatgagaagccttgggttccccttcaagaatattatgtcagattctatcacagtgcacttttactactattttcacatgtaaaatctgcattttgtgagtgtgtattgagtaattgagtgcttctttgttcaatttgcataacaggggcatactgacattttcatgtatatcagatgtgactgtcatactcaagactggtgcaatttcagaatatggctttatggtaataccacaaatggcattgttttttcagcagtgtgcagagttttgcaaatactccattagcagcaaaag

SEQ ID NO: 267875 - DNA, 560 bp, Homo Sapiens
  misc_feature (511)..(511): n is a, c, g, or t
ggccgcttaattaactcaccttcctagaatatcaggaaatgcctgaggcataacagatagtaagcctaaaaatgacccaagaccggacgtagtctgtggcgtgcagtgtaatggagtttgtggtcagcgttcaggttatggcgagagcggtacccataaccttccaccctttttgttgggaatgaatgacgggagtctgcacccgcccccaccccatggtgcagagtggcttgtcagaccctccatagaatagagacaggcttcaaagactatttagtacttattagcagtttttaccctttttatcatgattcatgtggtagagcaagctcgcctgacacctttataatggagtacttcagtataagattagtgccccagagatactcagagttcaagagcaatgcagcctccctgttttggtaggttgttagcgaggctgttgtgggaggggagggcctgtagatggaatgatttgtaagctgggaaaggaaaaaatctaggtttttcnttttttggaccatcactgggactacagatgcctgccaccacgccgagcc

SEQ ID NO: 267876 - DNA, 801 bp, Homo Sapiens
  misc_feature (42)..(42): n is a, c, g, or t
  misc_feature (45)..(45): n is a, c, g, or t
tatgccttctcccattccctcctccctccaacatgccaatancancagccagtattaggttcctttagctgtaaaatgaaaatttcccaattgcaccttagaaggaggctgaagggtaggagtttatctggcacaagtctacaaagctgacaggtgcaccaaacacctgaggttgggatcatggcaggacaggtggggtttggggtcatcagaggtaaactgaggaggaactcacttaggagggagcaagtcaatgcctttcatgtccttcagtctttcctttaatcagtcactgagtcagttaggctgccaagaaacacttatgaaacatgggaaaggctttgctcttgaaggtaagtaaggtaccatcttttctcctgaaaagttggtactctagagactaatttcagaaacaggcatcttgctcaggaatgagtggcccaagtatgatttcacttataatcacaagagtccagtgtgacttgaagttgggctgtaatctcaaacttgtcactaaggagataggtgacctgcaacaggtgaatttaacctctctgaagttccatcagctcttctaaaatgaatgacttggacaagatcatctataagacatccatgtgctctaatacttcatgactctgaaaagaaagaagaggtaaaaatactggctggaattcccttgtcatattaaaaagcttgaagaaaaataagtcatataatctatcaacaattcaccttttagaagtttgctaggcactgatttgcaagagaagtaagagaaggcatccattcttgtatttc

SEQ ID NO: 267877 - DNA, 635 bp, Homo Sapiens
ggcacgaggttcctctctgcgaactctctaacactggaacattgaggaaatcacggaacttccatgaaggaacttccatcagttgtgacagcaactactcacaaaatgtctctgatattagcagtagtacggtctccttagagatgctggatttccagtttcatgggcgtattctcatggatggaatgtttttcagtgggcgacactaactggctgttggagatctgtgtggggacatggccatcacgtatgatccacaggcacttctctggttctctgtggctggttctgattttattccaagtttctgaatgaggtggtttctatcccgatgtgcccttcctatcttttcttcctcttgtctcccctcatttcagcctcttccgaatctcacttctaacccacaccccatctccaaaacactgggaagtctgcattgagatgataaggttatagtattagcacacttttgtatcaagttctcacagtgtctgaaatgtggttatgattccatgatgtctctaatccctactcacccagttcttaagaatcatgggcaaccctgcttgggtcacgccttcacgctgtggaagctttgttcttttgctcttcactgtaaaccttgctaccactca

SEQ ID NO: 267878 - DNA, 595 bp, Homo Sapiens
aggacctgccagatcagtgttgtggctcacacggaaatgaagacaatgtttctcatgctccagtgatgtttgagacagataagaatgaaacttttctcccgttcggcattccattaccatttcgttctccatctcctcttgtgtctcttcaggctgtcaaagaaagtgtttctagctttgtgcgtaaaactactgagaagattggcacccttcacacgagccctgatctgaaagtgagaccagagctcaggggtgatgagcaatcatgtgaagaggatgtgagttcagatacctgcccaaaggaggaagacactgaggaggaaaaagaggtaactagtccacctccagaagaagacaggttccaggagcttaaagtagcaacagcagaagcaatgaccaagctacaggaccctctggttttatttgaatccgagtctctgagaatggttttacaggagtggctttcacatttagaaaaaacatttgccatgaaggacttttcaggtgtttcagatactgacaactcatccatgaaattgaaccaggatgtgctattagttaatgaatcaaaaaagggaatattagatgaagatat

SEQ ID NO: 267879 - DNA, 742 bp, Homo Sapiens
  misc_feature (438)..(438): n is a, c, g, or t
taaggtgctatcaatcttatgaaattatctgggaggataactatacagtgtttgtctcttcagtgttatatacacttttggttttagggtggaatactctcttaacgttgtaataattgattttagataaactattttttaaaaaggagtaacatgaactagagctgctgcttcttgctacacctttcatctatatccttctgccacttataacatgtgcatttccattttaaggtcagagacagcggtagcattactatagctttaagttccttttttgtcaatttataaataatacaggcattatagatgcatgtcagaactttaaagtaaaccctggcaaaagatccatatcatggtgtcaaaatttaaacatctacagctacgtgatatttttaactatccatcaaacttaaatcattagatcccagctaattnctaaacctagagattaaagttagtaggaaatagattgtatcaatttcttagctatggggacatctgcttactgagtacatgttttggcataattaattttattctgagaaagttgttcttttctaattaccagtacattttttaaaacaatattttctttgttactaaagatagcagcaagcatatgctaagctaccacttgtgagaaaaagttacataccttttttctcaaaactgaacagaagatataattttctttcatgtggacttcaaatgctggcaaggatgtggagaaaagggaacc

SEQ ID NO: 267880 - DNA, 368 bp, Homo Sapiens
tgttgggtcacagtgtgtcctctgcttgttaagaagatgccctggcacagcagtagttagattacttgtaaaatagaaaccttggaatgtccaatgactagattgggaaataagataattggattctagttctgtatttacctccaagctgtattttgatgttgggagactcacttcatttccttgggtatcagttttctcatctgtaaaaggaaatgagtacagtcatttgaaaatacttctagttttattatgttccttgaaatatgggactattggcaccaccccctcacttgaacaatatgagttggcatattaatattaatcttagttaaaagtgttagctgaacaaaatgatagaaacaaaa

SEQ ID NO: 267881 - DNA, 585 bp, Homo Sapiens
tgagccaccacgtcaggcctattaataatagcttttatctgatctttccaaccttaaagcccactataccactaatatataatcccagctctacacaggtgaagaactgcttggtccttctcacctgtaaaaccactgcttacccatctggaatttcctcatcccctaccaaccaaaagtgcatcttcataaagccttcccctaaacagatagttccatcatttggcgttctgtaccatacagacaatataaagttggactgtcagttctttccccatcatgtgtttaatttgtctcctcaacaaaacattaataaaaagtgatattattaccatatgattaccttacacaactacattagctcatgctaactagggcaatgattttttatacagtctttagtatatgccaagcatctatctaagagcttgttaactagaaatgcatttaattctcacaacaggcctatgagggaactattaatcatccctgtttttacacctgaggaaactgaggaacagactaagtaacttgctaaaagctagtcagtaagtggcagatttaatgaacaaataatacttcccc

SEQ ID NO: 267882 - DNA, 771 bp, Homo Sapiens
  misc_feature (124)..(166): n is a, c, g, or t
  misc_feature (350)..(359): n is a, c, g, or t
  misc_feature (604)..(634): n is a, c, g, or t
acaaggtcgtctttatttgccttctctcttttgcgtttgttatagtgtcagtaatccccagggtgtttggggctcagattgcttcctcagagtatatatgcctctaacctaccacttcaataannnnnnnnnnnnnnnnnnnnnnnnnnnnnnnnnnnnnnnnnnnaaataacgatgccaggagacagaaaaccaacacctactccagaagaggctgttgagattactgctggaataagcccaggataaaatctttatgtcctttcagacaaagcgtagattaaatagtttatctgactcatacgactgcagtttctttcggcctcatccagaaactgatacaaagttgnnnnnnnnnncttcctttttctggtgcttctataatcttagcttatgctcagctgtgaaaaaagtaaatgtccaggcaggcactctctgcaacatagaattaaacatgcttcctgaacattgtttgcactttcatttgacagagagcagaaatacaggtttatgtatccataaatcctgtcatggttgacaaagtaatttaatagtgttttgactcagaaccatccgttaatacgatttgagagacagagtagannnnnnnnnnnnnnnnnnnnnnnnnnnnnnncaggactggatggggtgggtgcagggcaggaagcatgtgacagaacaccaccacgctgcagtttcacaccctccctgcagcaataggttttaactgaaaagctactactcatgctttgcaaattgatagtcccactg

SEQ ID NO: 267883 - DNA, 513 bp, Homo Sapiens
agacccaccacatcgccccagaggcttttccagcacccatgatgttccggactgacctaaaaactaattgtcgagaagccaagggtgaggaggcaggaagcacctccggttggaggcacccaggcttgccagccacagagcgccccgaagtcaccgtcatcccagcccctggccttcctgccgccctccggtgccatggcgctgctgttcagctcaggcacaggggcacagcagaggtttgggaagcggtctccccaccggcactgggattggcgggtccaagcccagcaaccggcttcgctccacaacacacaccacacccgggactgtttttaatacatagcaacagactgggttatttatttaagatgtgtattgtgtcatatgaagtttaagagacataaatggcattttgttatttattaagacaacctccaattgttctctggctgtttttttcagttgtgtctagcaaaatacttatctgccctttgaaataaaatgtttttgttt

SEQ ID NO: 267884 - DNA, 1054 bp, Homo Sapiens
  misc_feature (492)..(613): n is a, c, g, or t
  misc_feature (882)..(882): n is a, c, g, or t
tctacatgtacatgcagccaggagccagttcttcccaggaccagggcaagttcctcacgctcttctacaacattgtcacccccctcctcaatcctctcatctacaccctcagaaacagagaggtgaagggggcactgggaaggttgcttctggggaagagagagctaggaaaggagtaaaggcatctccacctgacttcacctccatccagggccactggcagcatctggaacggctgaattccagctgatattagcccacgactcccaacttgcctttttctggacttttgtgaggctgtttcagttctgacattatgtgtttttgttgttgctcttaaaattgagacggggtctcactctgtcacctagggtggagtgcagtggtgccaccatagctccttcgactattgggcttaagcgatcctcccccacctcagccttccaagtaactgggactacaggtgtggcatcactggcagtgggaattgtnnnnnnnnnnnnnnnnnnnnnnnnnnnnnnnnnnnnnnnnnnnnnnnnnnnnnnnnnnnnnnnnnnnnnnnnnnnnnnnnnnnnnnnnnnnnnnnnnnnnnnnnnnnnnnnnnnnnnnnnnnactgtgactggccaacattatgtgatttatgtgtgaactatataacacaaatcatccccaaaacccatcatgatctgtaaagcagctgcaaagaatgaagtgagagaaacagttgtaaagatgagtttccacctacttatacccagagtgctaagaggaaataactcttctcaatcagagctttgcctttgtttgttgttgtttgcctttaaagtctaacacacctgacatgtttcagtcagaatgaccccaaatgcatcactgttctnccacgtggtcccaagtgcctctctgtttagggccatcaaatcatggaatgcagcacagtttgatattttctatattcccaattcctacccaaaccttttcatgaaatcgtagagtttgttttaccctttatctggtgtaagattctgcataaaccaagaagtgaacctgtaa

SEQ ID NO: 267885 - DNA, 1140 bp, Homo Sapiens
  misc_feature (159)..(159): n is a, c, g, or t
cttgagaagcagggttgagctccctgttggccgtgcatcgacacagtggctcccctggggttgtcttgagtagaactgagcatggctgggctggcccactgctcctggcagagatcatggcggagtggtcagccccgtgccacaggcaggaggcacttngggacggcctcttgacagagcaggcaccttggccgggagctggcttaattccagctgttctccaaaggctctgcaggttagcatggcctttttaactccagacttttgtcaaaacatgaagtcagcagcatcacagccccaggcccgagggtgaagcattgggggggtcccaggtgattgcatacacatggagccagataagggaagggagtgcggggcttgcaggggtctatgttggggtgaaccctgttggctttatttgatctctcggtgtttcaacctcctgaggcaattgtgggaatttagatgtggctcttcggtctgagccccacggtctagatgaagctggcactggagggtctcctacgggtccctggatttcttcttgatcaaggcttatgctatctaaaaatgcaccgggcagcaaggatgtcccagcaacgggaataatagtcaggaggccaaggtaacctcttgtagctgcagaatccagatgaagtatgccatgttccctaccctgggcttctctcagccacccagcacgtgcacgcacagcctcgtgctgggacatacacagatacactcccatacatataaagacaaacatcctctgccatccaggcagatgcttggaggcctgaccccaagacccatttccaatcactgtggttttaaatgatgtgccagaagccagccgcaaactcaataaacagcccccaacagggctgctcaactttagctactgagccttttaaacaaggaatttctacaggacgagaggaagacatgcaccgtcaagggcagggagcagaggagggaagaaagcagagacaaagctcccccaaacagagcgaactagaagcccactaaacactaagactattgtcctagctacacggtactactgaagggaaagaagttcaaagggggaacatgctactctaaaaaggtcaggctaagctacttaaaatgtcaatgaaa

SEQ ID NO: 267886 - DNA, 657 bp, Homo Sapiens
  misc_feature (17)..(17): n is a, c, g, or t
  misc_feature (43)..(86): n is a, c, g, or t
  misc_feature (222)..(234): n is a, c, g, or t
  misc_feature (242)..(343): n is a, c, g, or t
tttcaccatattggtcngacttgtcttgaactcatgacctctnnnnnnnnnnnnnnnnnnnnnnnnnnnnnnnnnnnnnnnnnnnntgagccactgtgcccagctgatttatgtttttcaaagatctcttcagctgctgtggtgagagtggaagcagcgagatcagttgggggctttactgtggcccagatgagaaatgaggatagtctcctttggtttaannnnnnnnnnnnngagacggnnnnnnnnnnnnnnnnnnnnnnnnnnnnnnnnnnnnnnnnnnnnnnnnnnnnnnnnnnnnnnnnnnnnnnnnnnnnnnnnnnnnnnnnnnnnnnnnnnnnnngaggatagtcttcttattctgaaatggttaggatgagcacagcagaaagaaaggaggagtgggtccaaacctcatacctgtctccttctgtctcatcccatctgctgccaggattcccatggtgagggatttcctagtggagtcaggagatataggtgaatgggtggggtgtcagattcactacagtggcagaaaggaggaggagatgaaggtacccagtactgtggccacccaagtccccttttacaccaccaatcttctaacctttcctgaacacgaatgatgaggatgcagattaaaaacaacaaatatgc

SEQ ID NO: 267887 - DNA, 805 bp, Homo Sapiens
  misc_feature (386)..(640): n is a, c, g, or t
  misc_feature (648)..(659): n is a, c, g, or t
gtccttataggttgttgccatgagccaggtaaaacaattgaaaggagggaggaaggctggggaagctccttttctgaatattttaaagaaagacttgctctccttatgctctaacttagggctatcttatcctagatgtctcatgaagtttcttttggacctagaattctataattcagatacttttaaaggatacattattatattccatctcaagttgttggtgaaggaaataattacttaggactatctcattctccaactataggggataactgagggaattattagtaattgggtgggggatttctttgggtcttcagaactgattggtccaagcctatattgtaaaatataccctatcaggggctgggcgcggtggctcnnnnnnnnnnnnnnnnnnnnnnnnnnnnnnnnnnnnnnnnnnnnnnnnnnnnnnnnnnnnnnnnnnnnnnnnnnnnnnnnnnnnnnnnnnnnnnnnnnnnnnnnnnnnnnnnnnnnnnnnnnnnnnnnnnnnnnnnnnnnnnnnnnnnnnnnnnnnnnnnnnnnnnnnnnnnnnnnnnnnnnnnnnnnnnnnnnnnnnnnnnnnnnnnnnnnnnnnnnnnnnnnnnnnnnnnnnnnnnnnnnnnnnnnnnnnnnnctatctcnnnnnnnnnnnntacactatcaaggaagattaattagatatgctgcaggggtacttgcccttctgaaattctggtccataagtagtacgcataaagtagaataatacttacaaaaagaattactggctgggtgtagtggcccatgcctgtaatcctag

SEQ ID NO: 267888 - DNA, 973 bp, Homo Sapiens
  misc_feature (162)..(192): n is a, c, g, or t
aattcggcacgagcggcacgagtctaattctcctaacaattatatacactggcaaaaactcttcagatgatatataaggaaaaggtcaaatatactaccgaattcatccagctttccaaagatgctcaaaatctttctgtgtctctcactccctccatctcnnnnnnnnnnnnnnnnnnnnnnnnnnnnnnngaaagaagaagaaaccctgagccattaatgtgtctcgtaacttgaggaagttcatgaattctctgggcttcatccattaagattcatccttatgctcctgcaagtttcttatatttatgtatttctattctgatttctgaaatgataacctagtagtgtctgatgaagttttttcatgcttattttattctttgtcacagatgaaagaagaataggactaattggggctaagatgaattaatgtaagtgtcagatactaggcaggtgttagggatgaaatgatgaatgaggcatggacctgttcctcagagtttatggcccagtagacataattgtattaggactttctgcagttgacatttgcataaagctgactgactgaaggaacagaaagtgagacagacagatatgaccaaatttatacaaaccatgtacccaacacttgaaagatgggtggatattttcccaggaaacagattttgggcaggacattcccatgcactggaaatagcatgaacaaatgcatgaaaattgcctacaacatgcctggcacatagctgtgaggtaccctatgagttgttgacttgaaaacatggaactgcacagggcattcaggcaagtgcaagtggttcaggggccagtgcagagcagagtgctgagtaaagatgtcagaaaaggaaagcaatggtctggtacaagtcttgtatagaacaagaagtttagacttttgaacaggcaatcgagatttggggttcagaaagataaatcccaaaagtatgga

SEQ ID NO: 267889 - DNA, 602 bp, Homo Sapiens
  misc_feature (39)..(39): n is a, c, g, or t
  misc_feature (117)..(117): n is a, c, g, or t
gagaaagcctgcaggcaaaaacttgcatcagacagaggncttaagttcatgtgtatgaaaataagtgccaagggagatttggtgggatccctgcaatgtctgctacaaatgtcaagnctcttggctggaaacctggccagaatatggttccacttcctgaaaccggaaacattggtggccaaagaagaaggagcaggcaaaggaagggagctggcaaaggagactggtggagcactagcgatttaggagggaagcaggaaattgtactatcatgggagtgatgagaagtgacgttttagaatgcccagttaatacatagcccaagaaactagaaattattttcttagatcatggaaagtattttagaaaacagtattagttaaataacagtttataggctttaaacacctcatactgcactgtactacaaaattcaaatgtcaaagatggaaaaaacaatattcaactagacaagagtatgagataagtgtttccactcctcatctctttctttcctttcacttaatgtgtgaattatacaaaccaatatactgtacagaccaccttataggaacgctgtatttgttgagttaaaaattaaa

SEQ ID NO: 267890 - DNA, 807 bp, Homo Sapiens
aaaactactgttatgggtgcctcacatacagatcctcagtgatcatcaatccagaccaactctattctttcctttgtggttgttattccttccaatttatttagattttattgtttagtgaaaatgggcctctagtaaagtgtccagtcacaggtgaaggccaatatcagagttttaaaatgggaacagagcctaattatttgaaaaggagactcctaagatgaggagcaggtggtactaagcctgccaatggcctcagtcccttggcaacatcaagtcaaagcaaatgcctgaataacagcccttttgcccagcagcaaatattttctgagagccacccaccggccccagagcagaaagcaggaagagaatgaacatgtctgagtgttcccctggaaggctgggccttacaaggacaggcttctgtcagcatggtgacagtcttctgtgtagatgggggagggagagaagtcccaatgtgccacccatgggatccagcagaaactgggctctggagtattgctggccccagtggactttcatccaaggagttctttggtcttcactgccagatgcctgtccagttctgccactgtgtcatcggccatttggctgatctgtttctctattagcctaatggtgtcctctgagactgtatccttggatttcttcagcttgttcattgagttggtgcgaaccttccgtaaagagtctttggccttgttggtgttctgtttggccagtttcaccagcatttctctgtgctctctggttacttggggaatgggtacccgaattagcgtccct

SEQ ID NO: 267891 - DNA, 391 bp, Homo Sapiens
cacctacacagaaagactgtcacccatgctgaacagaagcctggcccttggtaaagcccccagccctcccccaggggaacacctcaagacatgttcaatcctccttccctgcttcctgcctctgggccggtgggtggctctcagaaaataccttgctgctggcaaaaggcctgtactcaggcatttgcctttgacttgatgttgcccaagggactgaggccattggcaggcttagtaccacctgctcctcatcttaggagtctccttttcaaataattaggctctgttcccattttaaaactctgatattggccttcacctgtgactggacactttactagaggcccattttcactaaacaataaaatctaaataaattggaaggaataac

SEQ ID NO: 267892 - DNA, 479 bp, Homo Sapiens
  misc_feature (441)..(441): n is a, c, g, or t
ggtcattgttgatcttatcaagtaatgaagaataaaaccagatccaagtggttatggattgaaccaagaggtaaggaatggagatcaagagtttatagacaactcctccaggaaatttgtgaaggcgagccaaaatggcatgaagcctggagattttgaggcaaggttatttaaacgtttggagagacaagcttatttaaaaatattatttgagagggaaaggataaatattcaagaaaaatgaattattgatagtacaatgttcatcagaaggtaggaggagaatggcttcaaagcacagatggaaggactgacttcagaagggaaaaacaggtcttctattataagagaaaggaagaagagtgtgtgagatttttattgggtagaaaagtagactctgttctgaggattttatttttctcaagaaagtaagtagggtcnatctgcttaaagcagggagttggtaggagtgatctgag

SEQ ID NO: 267893 - DNA, 403 bp, Homo Sapiens
  misc_feature (38)..(38): n is a, c, g, or t
  misc_feature (323)..(323): n is a, c, g, or t
  misc_feature (388)..(388): n is a, c, g, or t
ctcagatcactcctaccaactccctgctttaagcgatngaccatacttactttcttgagaaaaataaaatcatcagaacagagtctacttttctacccaataaaaatctcacacactcttcttccttcctctaataatagaagacctgtttttcccttctgaagtcagtccttccatctgtgctttgaagccattctcctcctaccttctgatgaacattgtactatcaataattcattttcctggaatattaatcctttccctctcaaataatatttttaaaaaaggctgggtctctccaaaggttaaataaccttggcctncaaaatctccaggggttcatggccattttgctcgcctttcacaatttccggggagggagttgttntattaaactcttggt

SEQ ID NO: 267894 - DNA, 481 bp, Homo Sapiens
  misc_feature (361)..(361): n is a, c, g, or t
cttgctaaaggcctccagtccccaactcctggggaagaaggatccaggcctctgccgcacaaagcctccactgttctcttggggctggcaccccttcctgtggccctgtggcaccaaacaaattgattcgtccagcgaatatttcttatttactctgttccacatggtggtgagtgaatcaaccctggactctccccacaaaggacttaagaacacgcaggtcatgaacaaatgaacacttttgcataatttttatgaccaacggtgaccaggccaagagcaggatgaggtgatggagaataccttggcctggggcatcggaggaaactcttgcgaggatgtgctacctccgttgaaagtngggaagatgagagaccggctgttaagaggagcaagggaaggaggtttctgggaatgagtagaacagcacgaacaaaatgcccgagacaggagcgagcttggcaccttcaagaaaataaag

SEQ ID NO: 267895 - DNA, 718 bp, Homo Sapiens
  misc_feature (337)..(345): n is a, c, g, or t
cactctgtgtccccttctacgttccagcaaaagagcaaaagagaagaaaccaggcccctgagggtttggttagaacaggttttttgctattaatacttcctcaagtactcttgtaatttttggctgtctctcccattgactacaaaaaactcttggaagatgtgcaaaagatggcaaattacactgtatctaatgtagaggttgcagaataaggtgaggtggcaaaatatacgtcaggctaagtgtgaaaataaggcagaggaatcagaataaaatacgttgcaatgagaaactgttcttcaaattgaaaggaagtatatgttttgactgtgcagannnnnnnnnggcacattgcagtgtatttgtaaacactctggtgatttagccaacacatgggaggtggggagcaagagggagcctcacaaagcagtgggtgaattgacgagaaagctttagtgtgaaatctgggtagccatgtggcttgctaattggaccactatcacctaagagaagccatctggtcctgcttgttgaccgaaacaaaagtaggtaactcttgaaagaaagtcaggttgttagagcaggaataaagaagcaggcagcctccacccccagccccttttcctctatctggcacagtgcctcacctacagcaggtactcaagaagcgaattctttgtcaattaaaataataaagaaataaatttaaaaaatttaa

SEQ ID NO: 267896 - DNA, 548 bp, Homo Sapiens
acttagggactccgagctaggtgagaagtccacccttccctccacctacttcctccatggccaaaattctgccttccctctctgcctggctgtctctcttgaaatctgtattcttttcagcagataatgtcaataagccctttatgtgagtaggatttggagcttctctgtttctcatctcgaaaatctgccctgtgccagtgagtttgggcctctggcccacacgtctaattattgtaccaggattcctggacgtcgactggggacagagtgcctctttggttagaagaggggtattctggcagtatttcttttttgaggcattaatctagcttagagaggctgagcaagtgaaaatcgttgtgtgttcctttgatattttttcctttcctgtttgaatgccacacttagctggggtttgggaatcaaatgttaatgaatctcttggggtttcttgaatttaattgtaatagtcattttttctgccattagtaccaaggaaaaaagccaatattttagggcacagaatggtagaaaggggtctactt

SEQ ID NO: 267897 - DNA, 649 bp, Homo Sapiens
cattgcataggacagagaacttccctgtatggaaaccaatctacagattgtttcatatcccctgaagagtaagctgagaggtactggtgatagccaaacgagggacatatattttttaccgaaatcaaaacatcctaactatatacatagttccatcgtcacaccctgtggcagtgcaaagtgcccagattaaattcaagaaaaaaaagatttacttgtgtgtaaacctacaggtataaaacaatatataaatatggtaaagtaccatatgaagaataaacacatacaatatatatcttcaaaaattttggacacaggtatcttcatatagagatgtaagaaaagaatgcctagttaaatgtccaagcgtagtgaaaatatggaaagttttaaaataataggaatttcactgaaaaaatttaatctgactccatccaaacaaccctcgtagtataaatatctcctgcataaaatgacaattctatcctataatttaaaaaatttatcaaaaactggtaagaacacttcatgaaagcttataagcttgcttttttcctttaaataggatcaaatacaacatacagagaaataataaaaggaaaataatttatagggctattccctttctagatatactgatagaacatga

SEQ ID NO: 267898 - DNA, 765 bp, Homo Sapiens
ttccactgggaagtaaacatgatctactcaaatgaatttacaagatggtacacatactggagcaaatccaacacctgcattataaaacaatgtttaaaaggtgacagaatgaggaatttgtacattgtaagaagtgagctattcagagatcaacaagtacattttaattcggttagcatagaagtcttcatagtcttcagataacagacagtgaacatccttaactcgatgaaagttaaaaagcaccatgcacaacagtttagtggtaagcactgaaaaaaatagcacctgtaatactgtgatattgacaatttaaaactggtctaataactgccggagatatggtgccttggacaattctctatttactcgggagagtttgaaaagtactgggcagttcagagaaacacatgggatgtgtcgatcaaagcaacctgtacagttcttgcatatctgaaagcataagagaaatacaaaaaataataggaaagtttttatgcgtgtatgcaaacaacaaatttttataatccctactttctagactaccacagattactggcagacatacattacagaaactttcattaattttaatctcttggaagcctagactaccctatgttgagacatttctaaaggatattattttgtaaagatagagtacaaatttccctaaggattcatttaattcctaagattaactttcatttacaatggaatcctattaaaatctacataagctacccaattaccaaagaatgtctc

SEQ ID NO: 267899 - DNA, 852 bp, Homo Sapiens
  misc_feature (380)..(380): n is a, c, g, or t
  misc_feature (525)..(525): n is a, c, g, or t
  misc_feature (593)..(807): n is a, c, g, or t
tataaattaaaagatgtaagctaaagtatgaaagctaagctggagaacattgaataatttgtaattttgttcacctgtcagtaagtatgaacagttgttagctcgtagtaataaaagtggaatgttatactcttaattgtgcatactcttaattgtgctgatagaagggagaacaggtaaaaatagttagatcacagtgccttgtagtgaaaatttgtctatttccatcttcctctcttcctcccctaaattattttcttgagcttcagaaaatattgtggcctagattaagattgtcgttctaattagcggataaacaggtactaataaagccatgggataatctgccaaaatgcattcttaacttggggcccgtggancaagtgagtccataaggtgaaccttagcgtggagataaactcatgatatttcatacaacatgttatttataagtttcctagagggaaaaagctttcgtaagattattagtggtcataaattgtttttgtaagtgtattatctacnagtaataggtaatggagaatgtttacttcaaaaatagtatggtaggccaagcgtggttgctcatgcannnnnnnnnnnnnnnnnnnnnnnnnnnnnnnnnnnnnnnnnnnnnnnnnnnnnnnnnnnnnnnnnnnnnnnnnnnnnnnnnnnnnnnnnnnnnnnnnnnnnnnnnnnnnnnnnnnnnnnnnnnnnnnnnnnnnnnnnnnnnnnnnnnnnnnnnnnnnnnnnnnnnnnnnnnnnnnnnnnnnnnnnnnnnnnnnnnnnnnnnnnnnnnnnnnnnnnttgtgccgctgcattccagcctggaatagagtgagactccatctt

SEQ ID NO: 267900 - DNA, 607 bp, Homo Sapiens
  misc_feature (549)..(559): n is a, c, g, or t
ggccgcttaattaaaaaagttaccttcctagtttcagacatttaatcaaacaaaacctctaactctgagacacctttagggcctttactagaaaaatcccctctgtagccgttggcacaaacttgacaaacttgctgaaccgtgcagatgttgaagcagctctcagttacattggggaagaagggaactagacattccacagctgcctacaacggcttccttcccgggacacaggtgcaggctccatcaagctcgatcactttgcagagcaactggggatcccaagcaggggaaaagaaattccagggcagcttaaatttctcccagtaccacagcaagaagtaacactacttaaaaagtaaccagttacttccaacaattatgtgtgagggtgggtgaggaggggggcaaggaagaatgaagaataatatctccagtaagaaaaaataaaagatgtttcatatttttaaaatttcaagctactcagaccttccttaggtctttgttaagaaaataactatgaatatctggtctttattcctgatcaannnnnnnnnnnctttaggggtggggagagaacagccaagttgaaaaaataaagaactta

SEQ ID NO: 267901 - DNA, 703 bp, Homo Sapiens
cgccccacagcccactggagagacagaagaatctgtgtgaatcttctttacctggcctgaggatcaattcaggcacagcagaacactggccaggaaactgaacgtgacctgaatgtcttccaggctgagacaggtcctgagtgcaatcccagagggcacacgtggtcccctagaaacaacgaattcacaaggtcaggtgccccagccgggcacgcacgcctcaggttgtgaggttaacagggatccaaggtggcttcccatcgtcgggcctctgtccagtctggatcattgggtttaggccttgacttcagagggcctgcctgggactgagttccaaaccattctgtttatccatgacatgagtttgttagtcccaccttatcaagtgtggacagtctctggaggagttctgcacagagcccaggagccaaggcagtcctctgcctctcctcgtcagcaccgtgaggaagccgaggtgtgggctcagcagacggtccaagtccacagccgccacagtccatggaaaggcagcaagaggacctcttgtgtttggttttttaggaggaggagaaagcttttaggagcaggtctgaaaaataaagatcattattattttttccctttccctgagcctcccagatgccagttttgttttgtttttctgttacctgtgtgtcccatgtagtaatcaaaacttaagaac

SEQ ID NO: 267902 - DNA, 1328 bp, Homo Sapiens
  misc_feature (977)..(1029): n is a, c, g, or t
attcggcacagggtactacgaagccttggaggcaatagagacctacttgctgaatgtctctcccggggggctgacctacattgccgagtggcgaggggggattctggaccacaagatggggcacctggcctgtttctccgggggcatgatcgcccttggccccgaggatgccaaggaagaaaagagggcccactaccgagagctcgcagcccagatcaccaagacgtgtcacgagtcatacgcccgctcagacaccaaacttgggcctgaggccttctggtttaactccggcagagaggccgtggccacccagctgagcgaagagctacttacatcctccggccagaggtggtggagagctacatgtacctgtgggcgacagacccacaaccccatctacagggaattggggctgggaggtggtgctggccttggagaaatactgtcggacagaagccggtttctctgggatccaagacgtgtacagtagcacccccaaccacgacaacaagcagcagagcttctttctagcggagacactaaagtatctctatcttctgttctctgaagatgacttgctctccctggaagactgggtgttcaacaccgaggcccacccactcccggtgaaccactcagacagctccggcagagcctggggcagacactgaccccatctcctgccgccgccctggggccgccgcagggatgccttgccttttcaggatttgagactgttctcaaagggattgggaacgaaggccccatctcgggcagacccccagcagatgtgtcggacaagcaacttcttttcctctgtgaggagacaagacttggagactcagcgatgtcaggccagggccatggccacactggcccacacattcctttctacagagaatttctatgaagcccactcacttgccattccagggccaaaggaccggaggtttgcatatccgccccttgtatttgannnnnnnnnnnnnnnnnnnnnnnnnnnnnnnnnnnnnnnnnnnnnnnnnnnnnctacagtttagttttgtcacaattacacatatagttttcaaaatcatgcactttcctaaaatggtgtcatcctgaaaaacaaaaccccagtgtttgcacacacacaaaatcttgaccccgttatctatattttaaatgctttttgcccaacactgaccctatgttcaactttgtgtcatttaccttataatttgaggaggggtttccctttgggcctcagtgttacaaattactagtgctattttcattattattgtaatggaaaaatctgtggactagaataaaagagtttattgaat

SEQ ID NO: 267903 - DNA, 764 bp, Homo Sapiens
  misc_feature (436)..(469): n is a, c, g, or t
aaaaatgtaagtcggctatccatctctgaatatctttgctgacgagagaggaaagtgtcttagttgagatggtttctcctcccaaaggtccacccccagaatcctatggattccctgaggctgagccctgctggatatgtgtgggagactcagtttggagtaaacagctactgcctcagggacagaaagagggaggaacaggagaaacagtgtgggcattcttgccttcatcgccaaggccccttaacttctgccacatggtctggaataatcctgtctaggtcatggaggacttaaggagctgagtttgattcccactcggctctgacacgattatttatttatagttccaaccattcaccattggttgagctcttgccatgcgccagaccctgggcaaggtattttagacacactgtggtttatagctccgagnnnnnnnnnnnnnnnnnnnnnnnnnnnnnnnnnngtgtaacaccacaaaacaggttggagacagtcagtaactttgttgccagcattaatttcccgcctcaacttagccacactagctccacacgctttgtctgtcttgggtgctggtttttgttttcagaatagtgtatataacacacataaatggtttaaagaattagaacatattttgtatgcaaataattttttgattatgtatgttaaaatgtttgtagcttgatttttgctttctttatggaatcttttaataaatatcaattctgagttttaatagaataaaatttatcaat

SEQ ID NO: 267904 - DNA, 620 bp, Homo Sapiens
gaagaaattttgtgtcacgcagtgtcatcttattcaagtccatttgagaagcggtgagcaaattggctaggcctttattgttgatgtcaaattctctttccttgctcaccctataggtccaggccagtttcctttcatcctcccaaagctattaacacgatagtgtgaatttgatgctgttgaaggcaggcctgtagtgaacatgtggcatttctttggctactcaacatccattcctccttcctgatggcatctcatttcttttggggaattacttattcccatggatgcagccttaatggggtataaatccaggcacctgctccccaccatggaagattgtgaagtggccagattctgcttcctccagccctgagggtgggcatgcggcctaagctcaaccaaatctgataaacacttctggatctttgaacctcgaacaggtgacacaaggatgacaggaacagttatcagggaagcacactgatcgactgagctgcctgctcctggccttctggatcctcctcagttcctgcttatctctaggccaggctctcaactctgtcaattctgtgggtacacaaatatcctttcatacgttcccacttgatcatgctatc

SEQ ID NO: 267905 - DNA, 705 bp, Homo Sapiens
attctaaagtggcttccatatccttccctaattatatgtaccattatgattagaaccacaaaatgagcacacataaacacacactggtagcctatcagaaaagaaagccagattctgcactggtccttgatattgttacagaaccacgatatgctaaatgctctcagctcaggtgaaaacttttgttttcatatactacagcatccttcctccctacctgtgggtggtattggatgagtgatctttatgctgatgtttggaaccgtctgttatgtttttgccaaaagcagaaattttaccaccctgaagaatacagtatgaaataagaaagccttcctttttgtggatcttcattcatgggacttttcatagctgttctgtaatctactaaagcattggtcttctctccaggggatgtgtggggcatggtgtatgtatcttaaaagggatctgcctgagagagagcctgtagctaaggcctgccagctctgcttcctccccttccccctcgcaatcctccctcattgatctatcttcctgtggtgcactgccccctagagtgtaagaacctcagggccactgaacaaaggaaaatgtcagcgatagtaaaagtaaatggtgctaatgactggctggcaaagccatggtaaatcaggtggatttcagttctctgctttcaacagactaaaggagaatctaatcaag

SEQ ID NO: 267906 - DNA, 784 bp, Homo Sapiens
  misc_feature (196)..(219): n is a, c, g, or t
  misc_feature (738)..(738): n is a, c, g, or t
ttcactaaccaacagatagcacctgtttccaataacttaggttacatttgtgactcaggaataattacaggccactcttgctctcaagtcccattgtaaaggaaaaatacctattaccctgtcttcattccaggtattgaaatgcttcttacaaagggatctaacagatttcttagcaggggcccagggaaacacnnnnnnnnnnnnnnnnnnnnnnnncaaaagcaatattactgctttgaaatctttcaaagtgaaggctgttatagagcttaataatggatctccttttacttgcctgaaattattctgaagcctgttaagagcatgccccgtattatccaaatagccatacagttaaatcaattttaaaacattgtaaaaggctgttttaacatcaatttttattttaattgaagcaacatacacatgtggtttagaaaaccaaattgtaaaaagacagcagctttgaatccctcctccccaccctggccccttccacacagtctggttactgggagactgttgttcggtggaggattttgtgactatacctctggtcttagtcaggggtctctagagggacagaactaataggatagatggtacatatatagggggagtttattaaggaatattaactcacgcaatcacaggtttccacaacaggccgtctgcaggctgaggagcaaggaagccagtccaagtcccaaagctgaagaactcgaggtctgatgntcaagggcaggaagtatccagcacgggagaaagatgtagcctggga

SEQ ID NO: 267907 - DNA, 576 bp, Homo Sapiens
ataccctgcctttaaaaaaatagcttttttgtgtgtgtaaatatagcttaaaagtcatttcatcgattctaatctagttgtactgtgattcatttccatatataaatattttaattgagtcaaacctgccttaagagaagaaaagaatttcaaaaatttcaaagtcttattctctctttattcttgtcctgtcattaaatacatttgattgtgccgtgctaagcaaagtggaaaatgaaactttgtaatcctggattccccttgcctctgggacctgtgatttaagacatttttgaaatgtaggaatgtagtgcagtgaagctctgtacagaggtgggtctgagttgtgtgggtccacctttgaagcttataccacttgggtgagggttagggtctctctctaaggaaaaaacatacaaagttacacattccaaattaggtacaaatgtgaaaatttatttagaatgcaaaaagaaataaaaacaaattacaaattgttcaaaattgactgtaccacaaacatcacaaaatcaagaaatacaacatttttgttaactccctgaaacgcttgagagg

SEQ ID NO: 267908 - DNA, 747 bp, Homo Sapiens
  misc_feature (62)..(62): n is a, c, g, or t
gcattcatgtgtagaaaaaaccatggagacgtgtcccctggagggcaggttgtaaactgcanccagttactaggaagtcagtcctttacatgctcgtaacatgggcgagctcttgagatgggatctgggtggcaggagaggttgcttttcagaggaaagctgcctgggacccagcatggtggagcagctttgaagttgagtcccctctgggtgcatactgggttccaggggatgatccttggcttgagggcaggctgcttgatggaaggggacgctccacaataagaaagaacaaaggctttggtttgtcctcatcctccagtctgtcccacacacctgcccatctcctgggttttggtggcccccagtaagtggctgtggaaaaaggaggagggcccaggtgggtgctggcagctgtcctgcaccactgctggggtcgggtggagttgctggtggagttctgtgatagcagaattggcatctcctttctgcggaagcaccagtctgcacagaaagcataggatgtattgtattaatgggctagagacaaagtcgtcccagaacccctccagggccaggcaggtttataaggtagtggtaggaaaaagcttggtggctgaggcagtggccagttttgagaccagctgaccccccatgaagaaaaactcagcagtccttggttattcagtgtttttgatgaggcagctagctggagcgctggaccatgcagaatttgttgcaagaact

SEQ ID NO: 267909 - DNA, 636 bp, Homo Sapiens
  misc_feature (530)..(543): n is a, c, g, or t
ctctctcctttccgaaatctcctaccattttcttttgaccttgtatgccacctcacctgaaacgttcaagaagcattcctcttgcatagtaacagctccagtcagggcactgaggcccaagtcagggaccaacccagccacagtgaggtattctgagcatttcacaaggctccttaacagctttgagatctgaatccctctcaaaacctaacagaagctacggaatcctctccatgcatgtgcagattttgcagaaaatttcatgggattcatcccctaaagcctattcatggctcccaattaagttcccacattgcacctagtttattaaaaccaagcctttatatccctacacagaatttccaggtcattatgaaggcacatgtatgaaccaataaattaatttcactcacactgacaatctagatgtgactgagcctactgaaaacccaaacagtcaattcactgacagttccatttctttattggtttttctttcatcaaaatcaatgagataacgaccatggccnnnnnnnnnnnnnnaatgaagtctcgctctgtcacccaggccagagtcagaattttaaataaattcagcccgggaatttatttaaaaaataaattaattaagcggcc

SEQ ID NO: 267910 - DNA, 141 bp, Homo Sapiens
aggaggaaagaaaattcttgagcctctgtgctgacttctcagcactcttcaccctcccacctctacccccacctctgtctgagcgactcccaagggaaaaagattttgcagggtttgggtgttttttgttttaagtgacac

SEQ ID NO: 267911 - DNA, 613 bp, Homo Sapiens
  misc_feature (1)..(1): n is a, c, g, or t
  misc_feature (458)..(486): n is a, c, g, or t
ngtgtgaaccactgcacctggccaggacctatttttattgtagactttactgaatatacataattctgagtgcagatatgaaagctagtactattcctgcaaaaaatgccaaagccaagatgcgatgagtgaaatttcactacagatttgttgatggaagggccctaagtttttccctcgttcacctatcatgttttgcctagtgatggtcctgcttttgtatggcaaagtcacatatagcaagtattcttttctacactgttcgttgtgtaaggaattccctttgcaaagaccatgtatcccaattcttgcctagattatgagcaattttgaattagtgaaagttttattttcaaatagtaaatatagccagttgccctgcctcaccttattgctgatcatgcaaattatggtgaaaatcttagagcttaaaaaatatatatgggctcagttgtagnnnnnnnnnnnnnnnnnnnnnnnnnnnnnttattttagtccaggcatggtggctcatgcctgtaatcacagtgctttgggaggcggaggtggggggattgcttgaggccaggggtttgagaccaaccagggcaacatggtgagaaccagtctctat

SEQ ID NO: 267912 - DNA, 638 bp, Homo Sapiens
ttgagcttcttctcctggatcacccaagaaactgagctgcttgctgttttccaaaccatctcctattcctcctgcttctgttcatacatctagttttccagaaatgtctcagttctacttcaacatctcaagttcatatcccataagaccatgtcaacgctcacctcctccagcatgtgactctccatccctctgcccagttatatgctctgttttatttggcatgacttttaggacactttgtattcatgttattttgtgtgtatttgtggcaggactctatatcttagtatagctcctatgctctctagcaaggtgccttgcactttacatgtatcaaagtactgtgtggaatatgagcagtcagaaaagactccaaacagagtgtaggaaaagccctctgggtttgtgaagttttgatccacgtatgaaaatattcttaattcatttctatatgcagcaaattcaactttgttaactagaattagttttatataatacatagaaacactggaaatcaaatttaagacattattattcatccgaaaaattagatttaccatcttttttaatgtgactgcttcatttcaattccttaatcaaattagctgcctgttttatacctgcttggtatttaa

SEQ ID NO: 267913 - DNA, 744 bp, Homo Sapiens
acattcagttccttctaactgcttgcctttgggacctgcaggacagtgtggtagttcttccttaggaatgctagtcattctttgaaaatcatcatgacaagcattacaaaaatgtgttgttccaaaacagaaaaaaacagccactgaacagcagtagcgacatttatattccaaaaagtctgtgccatgtttgggacacatctgagccctggaaacatcagaacaggcaccacaaatgagctctctgggatcataatcatctccccgtccagcctcagcatcgcagcgagcttcaccaccaaaatatgcctttctgcatttgtagcacacataatatgcatatctattcattgcatagccagctgggtcattataaaacctcacaccaggagttgtgatagcttcactcttatgcagaccttcatattccaatctcattaaggcttttcttctgacatcctcatagagttcttttattggatcaagtaggtcttttagtactatgtgattaattttgttcttgcaaatgggacaagatataaatccaaatgttatccttgggccaagccatcgattttctaatactcgccgacagcactgtaagtggaatatgtgactacaatccagctgaatggctggtgctgccgagagcgcttcggtgaaacatatcatgcacatgtcatcggcgtcttgcttcaggcttgtggcacttttgtcacagccgtgtagacagggcagacagtg

SEQ ID NO: 267914 - DNA, 807 bp, Homo Sapiens
  misc_feature (316)..(327): n is a, c, g, or t
  misc_feature (707)..(723): n is a, c, g, or t
  misc_feature (781)..(781): n is a, c, g, or t
  misc_feature (797)..(797): n is a, c, g, or t
atcaatgtgagcgctaggccctgttctaaatgggtcccatgtggagattcatttaatcctgacttaataatcctaaggagatgaataatattttatctctttttgcagatgaggaaactgagaccaagaaaatttgagtagctgctgaaggacattcagctagttacatacagtatttaaacccagcaagttatctcagccccgtgttgtgttgccctctgatgaagggcagcaagggagatggtcttcgctggaatcagaccactagaattcccgagtgctttggggtcaccagtcctctctattggaaagttgnnnnnnnnnnnncttaattagtagttggatcactgtaaattctaggcaaatcgactttcctcagaatatgtgactcatcttgactaacaatcttttccaaaatatttcattgctcatcggcttgtacccacccccatgccccaccctggccaatttcttaaagactactttcctggctcaattttccttttctttagaatgacaaaaagtaattcctcttccatatagtttgtttaactaaagaatactattaatacaccatcttccccagacaacgaattctatacacagcacaggtggacgtgagcacacacgtgcagagacatacatacaaacacacacacgactagtcaaaagcggagcctgggcaacaagagcaaaactctgtctcnnnnnnnnnnnnnnnnngttctttattttagactgggcacggtgtctcatgcctgtaatccaacactttgggagnccaaggcagagcaaantccgtctcga

SEQ ID NO: 267915 - DNA, 751 bp, Homo Sapiens
gatctacagaaaagttgcagagatagtgtagagaattccctcatcctcctccccagtttcccctattgtaccatctcatattactgtgtttcatttgtcacaactaggaaaccaccgttggtacattctgttaactgagctctggacttagtcggatttcactagtttttcatgtaacgtcctatttctgttccagggtcctatccaggacaccacaggacagttgtcatgccccctcagtcttctctgggctgtgacagtttctgtctttccttgttttccatgaccttgacagtttggagagaagtgctaggcaagtattttgtagactgtgctcagttgaggtttggctcatgtttttctcagggcctagcaccagtgaagaaacgaagaaatttcccagtaaaacaatggggaaaaaatgacccttttcctctcggccctctcaaagggatggaaccattttttggcccagatagcaaaggagcttttcccagcaaaaccagaatgtttccatttggcttttcttggaaacaaaagaggaaaccatgggcagggccgcgagctgggagtagaagctatgggctctctcctgcatccccgcatccccgcccgaccagctgggcatactacaggttgccatcctctctccagagccctgggaacagggcactgtctcattcagatccgcatcaaacctgctctgctcctgggatgataggctggggtggggcagccatcgaagaaatta

SEQ ID NO: 267916 - DNA, 612 bp, Homo Sapiens
  misc_feature (221)..(237): n is a, c, g, or t
  misc_feature (246)..(462): n is a, c, g, or t
tttcggcacagcggtataaaatatatagcatgaaacatgcctttagtctgaatgtattgttgatgttcagggtgattagggtaaaaaggagaaagctgaagagatatcctgataatataatccttcctgcagcaagcctgctttaggagtacatcaaggaatttctaaagaaaacaacacgagcctctcattccttgaatgtttgttgcttttctcttcannnnnnnnnnnnnnnnngagacagannnnnnnnnnnnnnnnnnnnnnnnnnnnnnnnnnnnnnnnnnnnnnnnnnnnnnnnnnnnnnnnnnnnnnnnnnnnnnnnnnnnnnnnnnnnnnnnnnnnnnnnnnnnnnnnnnnnnnnnnnnnnnnnnnnnnnnnnnnnnnnnnnnnnnnnnnnnnnnnnnnnnnnnnnnnnnnnnnnnnnnnnnnnnnnnnnnnnnnnnnnnnnnnnnnnnnnnngagtgctgggtataggtgtgagccactgcacccagccttctcttcatttttgaatgtgtttttattttcatgctcacttactcaactctctctaaacatgcagatatttaagtgtgctttgacagctgggtgtggtggctcactcctttc

SEQ ID NO: 267917 - DNA, 578 bp, Homo Sapiens
  misc_feature (25)..(25): n is a, c, g, or t
  misc_feature (195)..(195): n is a, c, g, or t
tgaacccaggctgtctggctccagnagcctggcacttcatcatgtgggaatcctgccttttagaagtgcctccagcacagcacttggcccagggcaccagcagggctgtagagtgtgcatgagaaattgtaaattttcctttttgaaatcctttatgtgttggtgactctttgaccttccccttcaccgcagganaagctgctgcttttttacacagaaactttcttgggactgaggaagtcattaggggatttaggtattaaaccttcctttgcgggtctgccataacaaaggatgtgaaaatggtacaaggacagacatcattgtcaggcttgaaaggcggcctgtccctgatgatcaggcccttcttccggtgcacagggagcagtggggcatgatgtgtgttgccctcttcatgggtgccttgttctagaagctggtaaaaggatgtaggaaagttgtcaccattagtaataaagcaacagaggtctgcgtttccagtgtacattcaagcttgcctgtaacttgtgtgtgcatgggattttaatttttaaaaaaagtttcagaaatctggcttg

SEQ ID NO: 267918 - DNA, 706 bp, Homo Sapiens
  misc_feature (677)..(677): n is a, c, g, or t
gtaggaagttcattccagttctgcaaggtgtctgctttcagaatggagcccactttggtggtggcaaggcctggctgagttctttcaaagcaacatccaacttctctttgctctttgacttcctccagattctctcctgtgctggaggtaataagggttgcacttccctctttacttacactggtgaaacatgcagcgaggattcaaggtcaaaattgggtcaaatttaaactaacacagtctcctgccccacttacctgtcctctaaccccatccaccagccctaagtgggtcatcacatgatcagaagtcagctggggggaagagcagggatagatagagcaattaagggagcctcttttaggggttaagccacatggacaggggctttgcaacagtctttcatgagtggccgaaatcccccactcacctgcaaatgtgcctcctcaaagatgcagggattttttaataaacagaggaaatgataaattatgttgtaattccactccaaaggcatttggttcttaacagccaaatcctctgtagtctttaaataaacaaaaacttatttggtgaacagacagggaggaaaatgaaagattttctgtacttgggttccacatgtcaacaatttctctcctgtgtgtatgttggccaaagctgtatcaatgataaantgaataaaggaaaacctctgagcccaaaa

SEQ ID NO: 267919 - DNA, 713 bp, Homo Sapiens
  misc_feature (306)..(488): n is a, c, g, or t
aactggggcttcaattaccatctgtatgctgatgatggccaaatacacatttctagccaatgaataacctctgaattccagatctatacacagtatattcaactatcaatgctaaatatccactctgatgcttcaaaagcttcttaaaggcacatgtccacagactcatgagtcaatccctattaaggcacacatataaatcttcctcctcttccattctattctgtctcaggcaaatgaggccaccagctgtagaagccagaaacttgagtgtaatcctcaaaaccttcttctcaatcgaacccnnnnnnnnnnnnnnnnnnnnnnnnnnnnnnnnnnnnnnnnnnnnnnnnnnnnnnnnnnnnnnnnnnnnnnnnnnnnnnnnnnnnnnnnnnnnnnnnnnnnnnnnnnnnnnnnnnnnnnnnnnnnnnnnnnnnnnnnnnnnnnnnnnnnnnnnnnnnnnnnnnnnnnnnnnnnnnnnnnnnnnntgtaatctaatatatcatcaaatgttatggattccacctctaaaatacagcttaaatccatcaatttctcttcatcttaactactagcatttcctaattcaagtaccattgcctctcacttgaaatactacagtacaacttccctacatccatgcttgctcaacttcaatctactctccatagtgcagtgaaaataaactttttaactcatctgtcccctgcatt

SEQ ID NO: 267920 - DNA, 572 bp, Homo Sapiens
  misc_feature (137)..(137): n is a, c, g, or t
cgcgataacgaagaaacctgaggttccattttttgggcctctgtttgatggagccatagtgagtgggaagctgctgccaagccttgtatgtgccacgtgcatcaaaggccagaagggctgtgaagtgcctcatcccnactctaccagagcttctatgaagagcgagctctgtatctcgaagcaataatttcagaaccaccgcgaagtaatgacattcgaggatttcgcagcccaagtcttttctccctctcccagctactccctcagcggaacggattaaaacacgtaaaggtctcatttcaatatttgagcaaggggccctggcctccagtctgagtgctgacctcgaagagcccctgagtgaggaggagacagaacaccctctcctgcctctgccccgagccactaaacccagaatctccaggaaatttcgttgctgtactagtgccctcagcaggtcttcccattagtggacttctgaagcccatggtgaattccactaccgtgtctcagatgggactcaaactaggctgtatcatcttgtcctgaaacctcacaaaccttggacttcc

SEQ ID NO: 267921 - DNA, 351 bp, Homo Sapiens
  misc_feature (81)..(81): n is a, c, g, or t
ccccctgcctcaaaatattgaaaatgaagacccttaacgtgttttaaacccgttcccgcctgagggaagtaacctgggaanagggaagaaaagacttgggcctgccgaaaaccctcgaatgtccattacttcgcggtggttcctgaaattaattgcttcgagatacagagctcgctcttcatagaagctctggtagagtgggatgaggcacttcacagccctgctggcgttgatgcacgtggcacatacaaggcttggcagcagcttcccactcactatggctccatcaaacagaggcccaaaaaatggaacctcaggtttcttcgttatcgcgatgaagaacatgtgatt

SEQ ID NO: 267922 - DNA, 558 bp, Homo Sapiens
  misc_feature (516)..(516): n is a, c, g, or t
  misc_feature (522)..(522): n is a, c, g, or t
aaggagaggggctgataggagaacttggaatcccaggagcagccgctgactcccatgagcctgtgtcttggggtcctcacctgtgtacctgggccccagcctgggagaaggaatgctggatgatggtctctcaaatctgttctcccctgcccctaactccgtgtcttggagtggatggacagaactgcatggccatgtgactgtcccaggccgagcaaaggtgtccagaggcctgcaggtggtgctggcaccagaggcttctgcatgaccttatgtgcagtggtcactgaggcagacagggcttctgaggggcctcaccctcagggaactcgaggatagtcatgtggctttggaaggccagaagccatttaattgggtgtcatcattaaatactactttcgtcctaccatgtgaagtactttgaataaatgcttttttctgtgagaaaggagggctaaggttacataccttattcctatgaagcattttggttttagcttttaaatcacaaagagnaaaaanaaaaagatctttaattaagcggccgcaagcttattg

SEQ ID NO: 267923 - DNA, 847 bp, Homo Sapiens
  misc_feature (441)..(441): n is a, c, g, or t
gtttttcagttgctttactgaagtggcagcagttggaggagacagaaagctcacagcagagacttaaaaaccatttcgaatcccacacctcaatcagtcctcagccaggcacaccttggacatgtcacttactcccaacttcttcactggcacaaaaggatgacggtctgatcttcccgttaagttgttacaaagataaaattaggaggataaaaaaatcctgaacaactacaaagctcaaccaatcttctgttcactctaaagacaagcaaaatgtaaaataacatatctcatatgaccaaaaaaatgaacaaaacctttattcaaagagacttctaaactcttctgcaaactttacttcttttcaggtaattatttaaaacaccccttgtaattttcagacctaccttaggaaatggtcataaatacaatcgattcagnatagttttcatcccattaaattaaatccaaagagcccctaaatgtactaaaaaagcacacagttatgacctagcaacaatatggtttaaaatactttacagaccagtgaactgtgcaataccttcaaaaatgggatgacaaaaggtctcagtgggaagttagtagcttcttgcagtttggaatgaaattcttcaattgtcaaagtggagttctatggaagaaaatatgtagtataaatacattagcctgttggtaaatagtaaaaacacaaacaaattaattattaagactggtacaacacagtgtaataacaagcaaacatactgacagaaaccagtattttcaataaaacctattgactttgtaaaaaggatcacacagtttattgcatcactcacttctaaaa

SEQ ID NO: 267924 - DNA, 779 bp, Homo Sapiens
actacatgaattacaaaacagaagaacccaacaggttgattatcaagatctaaacaactggcattaaaaaggaatctattaattgctatcatgaaccttaaagatattcattcagaacccaacctgatactttaaattgctgtgcagtttaattattttctattagcatagagaaatgaattggaaggtaagaagggagctatatctcctattgttaattgcaaataataatctacagtctgcttctgctacctgttgtcattcttccctaccagctaaatataaaagcacccatgcattgctcacctgcataaagagaagaaggaatagtctggatttgttattacaaaggggatttatttcaaaaaggaaagtgaagggatgacagataagtgcacttaaaccttttgagcattacagaaagcttgtagaattcgggtaactgaatgtaatctctgtattctccgttaacgatagagcctcttggacagactgaagttgtgcctggaaccataatactctctttatgccactgtcttccttcttagcaggccgaaaggcacacactcatggctgattcttctgctctccacctgctggcccccttgtgagccagagcttttggatctgatgtagccttttgggtgtttgcacaaagggctggcacatttgcaagtggtatgtctgcttgcaaagcagtgggacaccaaaaacattaaacacagattgtttggggtttaagcaaatctaagacaaacaagttgaatatctgagactat

SEQ ID NO: 267925 - DNA, 263 bp, Homo Sapiens
tccattcttgaaaaatattaattacagtcataaatcctaactacattgagcaagagaaagaaagagcaggcacgcatttccatatgggagtgagccagcagacagcccagcagatcctacacacattttcacaaactaaccccagaacaggctgcaaacctataccaatatactagaaaatgcagattaaatggatgaaatattcaaaactggagtttacataatgaacgtaagagtaatcagagaatctgactcattttaaa

SEQ ID NO: 267926 - DNA, 680 bp, Homo Sapiens
  misc_feature (170)..(226): n is a, c, g, or t
  misc_feature (385)..(385): n is a, c, g, or t
tgatgttttgattcccaagaaaatagggcagtgggtcccacatcccagatgctttttacttatacaaaattcctactctcattggaacatgcagacacgtttgctaaaaaataaatattattataccaacagtctcatttattgtcacctggattttctgcacgattggnnnnnnnnnnnnnnnnnnnnnnnnnnnnnnnnnnnnnnnnnnnnnnnnnnnnnnnnncccagtgtctctgttttctctggacatttttcttatattatccagaaaacaaaattgtttgagaacttcataagcaccaaaaaaggaaaatgaacattagaaacatttgcttttttcttatttatatatatagtttgggagagaaagaggaaattactncttaaaaacaaacctagactggatcgtgtttagagaaaacagagccccagaaaaagagacatgaccctggtcaaggtcacagaaaattcattagtgacagggcctggagtttagatttcctgcacccttcaggggtatatcaaaaattccttttgaacttttcctatgactcaaatggaactaaaactttaaaccagttagcagaaaattcatcactcagaatacacaaaactcattccgtctctcttttcactaccagtatccatctttaaaacaggggtgtcttgagacattc

SEQ ID NO: 267927 - DNA, 805 bp, Homo Sapiens
agctcctcaaagccttacctgttttgcctaagaggagtgtccttcattcgtacctatagaaacactacttggcaacagtgaatgttctctgacacatgtaataggttgttaagtttctctatttagagtccattggtagtcaagaccacctgggtgctgtttgcaagacataactatcatggaagtatttaatactatactattggtatagcaggtacatgatatgctattagtgctgtagaaatgttatgttagagacgggaacctgaagcccctccttgtggcacatagacaacctttgttttttcctataatcctttccaccttttccttggggtaatgcccctccaagtgtgctctcccctgggactcagctgcctaggccttccttcttagccactattagctgagagcagaggcagcagctctggctgggcagtggcccctggagctttgacatctggaggggatgaggaccccgttcggatgactcctgcccttccctacccaggctgtttgactcttgatctcgcctagtactttttctcaatatctaattcctgagcctgcgattgagttgtcctgcttggacacagcccttgtgttccacatgtgtggtctgatccagtgacaaagaagttgccatttaaacatctcatcttgaagaaccattctgcctttcatgcttcatgtattgaacactgaaactgataggagtcttagctttccctgtgtgtttccaagggtttaatacatacataatgatcaagagaacctgatttaacattttgctcaccctagtatt

SEQ ID NO: 267928 - DNA, 495 bp, Homo Sapiens
tttttttacactagaaaaatcaagttttttattttaaaatattttcaaaggctaaggccatagcaaaacaacccaagggtggttgaatcaaactcagggaattagaggagcatcagccaatgcaagcaggtctatataaaatacacatcatttataaatgcacacagcagaaagcacagtggccccagaggaccaggcagggggacaacagagagaaacagagcactatctggagggacaggcacacccgcaacactcaaagccctgggcccccaagtgcacctccaaagtcacctacgctgcagcatggctcttgccctttctgagccctgggtatagctgaagaccaagttcaccagcatcttggcacatccacctataactggcacctctcatggcctctgacaaccaagcaaggctcagagaatggatttttatctctgtctttcagcaaggaccagggagaagtgctgaagcaagaagggttattttcct

SEQ ID NO: 267929 - DNA, 357 bp, Homo Sapiens
ggtagtaactaaagaaatgaaagaacatcaaggcacaatgaacttcataaaacgcttaaccctggaagaaatgaatgggaaggaacactaacaatttacggagaaattctttagatctgggtactcactttgctgatggctcttatctagtgataggccccactcaatacattaaaatcccaggcttctgccgaaatgccacttaatgatccctgctgctgctactgccatcattctcaattctaacaggttttagctttaaccctaacttgcagcataaaacttttggcatggaacagtattctgacacttaaattcaggtgtatgaagaaacacaaaattaaaattaaataatag

SEQ ID NO: 267930 - DNA, 661 bp, Homo Sapiens
  misc_feature (19)..(19): n is a, c, g, or t
  misc_feature (48)..(48): n is a, c, g, or t
  misc_feature (72)..(72): n is a, c, g, or t
  misc_feature (79)..(79): n is a, c, g, or t
  misc_feature (157)..(157): n is a, c, g, or t
  misc_feature (159)..(193): n is a, c, g, or t
  misc_feature (428)..(441): n is a, c, g, or t
cagtaagtcagagtgaaanccaggaagaggtataaagaagcaggctgncaaagtgaagctaactctcagagncaaagancgaaccgaaggaaaaaaactgacagcttttgagaccttagatttagccattcctaaggcccaattgaacccctatgtnannnnnnnnnnnnnnnnnnnnnnnnnnnnnnnnnnncgcgcgtgagtagtttagtgacttgagtccctaaattcctttttttaacctagcatagcactagtttggtttcccatcacttgtaacaaagaatcctaatttactataaaaatattatcttgagaaagagtaaactaattgtgtatatggctaagaaaaggtatggattttcaggtgtactacaatatacattccatcctccctcctttttctacaaaggagaattttctttccnnnnnnnnnnnnnnggcccactaaaaaagaaaaactcatcaaaattggatttactatagtagtcaacgtcagagccaactcttcagaaaagcacacgattaagaaagtaaactgagagaaattttcttaaagtagtcagctttttcaaaaacatagtgccacttttaagagaaaaattagttggaagggaatacaaaatgataagaggagtattatattcatggtgaaattact

SEQ ID NO: 267931 - DNA, 746 bp, Homo Sapiens
  misc_feature (20)..(20): n is a, c, g, or t
  misc_feature (73)..(88): n is a, c, g, or t
  misc_feature (534)..(534): n is a, c, g, or t
  misc_feature (536)..(536): n is a, c, g, or t
  misc_feature (603)..(644): n is a, c, g, or t
ctcggcgtggtgagccgagnatcgttccattgcactccagcctgagcagcaagagcgaaactctgtctccagnnnnnnnnnnnnnnnnggcaacaatctatacgtatattcaaaacatgacattcatcaacaaaagatacgtggaaggatgctcactacaagcactgcttgttaacagccaaaaaaataaatgcctaccatcaatcaggacaggcaaataaaaacctattattcacataatagaaaacaatgtagccatttcaaataaataaaaagatagctttaaatgtactaatatagacatgttgaagcttctctaaaaggaaaataccactagcatatagcatgattctactttcattctttatgtacttctgtaacagtggggatctttttaaaagcgtgaacatacaccgcttttgtaatttaaagattatcctattacaaatggggggaggagtgtataagaatggacaaaccctcaaactggtggaaaacccaacaaaatgttacttcttagtaaatattttaaananctatatatatataaaaaacacaaaaattgaacattttgtaaacatgtttcaacataccaatatattnnnnnnnnnnnnnnnnnnnnnnnnnnnnnnnnnnnnnnnnnnttgatgtatcactgattaaataagacttagattctgcctgctcagagaaagtgattcataaactgaaaaatcaaatttaaaaaatgtaagttcgggccaggc

SEQ ID NO: 267932 - DNA, 561 bp, Homo Sapiens
tgctggcaggatgtggtatttctcattcagggcctctggaaccatctaatctaggaaacacccttgtctcatgccttgctgccacacagctccatttgctctccagttttccaagaagccttctacctgactggttttgctctaaaccactatctcagactgaaattcttcacaaattccacccaggaataataagggttcatttctgaactggactcagcatgccatatgacccatggagatattttcctcatgagatttgacacaggggtcattggccatgccgcaccctagctgatgactgggcaagttaccaaaaaccatctgagccagcctcctcgtctatgcaggggaataatatggttctgcaggatggttgaggtcagggaaaaatgtattcaaattagcaaattcttgccaaaatacaaaaagcgagattcttcccaccaactctcactcatcatatagaactactcagtgccccatgtatacaaatgtaacaagcctgcatgttgtgcacatgtaccctaaaacttaaagtatcatagtaataaaatttaa

SEQ ID NO: 267933 - DNA, 483 bp, Homo Sapiens
  misc_feature (190)..(190): n is a, c, g, or t
atttctacagtgggccacctgtcccctcagtgacaccaggggagggtcaagagaaatgagcttgcctgatttgagaagggtgtggttgtggagggctcatggaaacttggtgaatttgacttcctcaaaggccaggagttaggacaccactgtctcacaggctgccatgaggggcaaatcaagaggcacnttgctttcaagcacgagttgggtcattctgactcagaattcagctttgcatacatattttataccccctgtgtaaagacatgtgaactgtccttcggtggtgtgtgttgtatttcatattcctgagtctattctccctgtgtcctccttatttgttctgattttttccccgccctcccaagacagacctagagttcagattctgaccccatcatttacctgtgtgaccttgggcatgttaatctttctgagcctcatattgctcgtctttggaatgggaacaagaatgctttg

SEQ ID NO: 267934 - DNA, 586 bp, Homo Sapiens
  misc_feature (24)..(24): n is a, c, g, or t
  misc_feature (147)..(147): n is a, c, g, or t
aaaaattacacaacaaaaacaagnaccccacaggctttacccaaaaacgcggctttgccctaggaactgtggccaaaatgggttaaactaaaaggaacacaaaaaccccaagggtcagacaggaaggtgctgctggctggaaggaanagggagaacaaggtgtcttaggccaagctagagattatgtcccttacaaattattcagaatctgtgccttaaaaatccattgcaaagattggcgctgggcttgatctgatgagaagacagcagtattgaagggggcttggcaggggatgtggagagaaatatggagaaagattaagaacaagcattagaggaaagagtctccccctctgtcttctaggtggaggtgaggggacccagctaggtgggcctccgagtagagctggccccgtttccccagagcctgtggcactctccactctctatataccaggaacactggttgatactcagaaaggcaaggagccaaacggctcacagacgagttccatgcttgcacgaggaagggctcagaaacacaggttgtaaagggagaaattagaaggagaatgaagctttggta

SEQ ID NO: 267935 - DNA, 427 bp, Homo Sapiens
  misc_feature (173)..(263): n is a, c, g, or t
agggctgtgctttaggaggctgtaggagagagccacttgctagtggctgccagtacttcttgacttgtggatgccagcattacttgacttgtggccacattacctcaatctctcctgcgatggttgtgttgtcttctttttgtgtcagattgccccctccctctctcaacatnnnnnnnnnnnnnnnnnnnnnnnnnnnnnnnnnnnnnnnnnnnnnnnnnnnnnnnnnnnnnnnnnnnnnnnnnnnnnnnnnnnnnnnnnnnttcccccaaatcataaaacatttataggtttcacagtgtaagatgtagatatcttttggtggaccattttccagcttatcacactcctataaattatttggaaaagtaggaaggttgcttttgaagtagcaacttgtagatatatcataagtatacttccagtt

SEQ ID NO: 267936 - DNA, 548 bp, Homo Sapiens
  misc_feature (530)..(530): n is a, c, g, or t
ggccgcttaattaaaacaggctttgcttctctgcgtcccctgccccaaaccaatggactgccctgggccgtccttcatcaggagttttaattgcatgttgattgaactggtaggttcttgtcctacatcatcatgttggactaagcccacaacagccatgcagcctcagtaaagaggccctttggatactcaaagtgtgctgctgcctttttctttgtgactggtgatggctgggttcctacaacaacggccaggggattctgacctttatgaatcaggcagaggaatgcttctgtcttctttctccaagtcctcaactctgccctttttctgtcaattagtaggccttaatagatacaattaagagaattctacttaggttaattgggtgattgggaaacatggattatttagggtacttaatctgtggtttgtccatctctagaatattaacaattgatttttgcctgattttacaaaggtatcatctcagtgggattgctatgtagaaaggaaatttataatggaanattgcttccaatccagtt

SEQ ID NO: 267937 - DNA, 526 bp, Homo Sapiens
  misc_feature (403)..(403): n is a, c, g, or t
  misc_feature (451)..(451): n is a, c, g, or t
  misc_feature (515)..(515): n is a, c, g, or t
aactggattggaagcaatcattccattataaatttcctttcatacatagcaatcccactgagatgatacctttgtaaaatcaggcaaaaatcaattgttaatattctagagatggacaaaccacagattaagtacctaaataatcatgtttccaatcaccaattaactaagtagaattctcttaattgtatctattaaggcctactaattgacagaaaaagggcagagttgaggacttggagaaagaagacagaagcattcctctgcctgattcataaaggtcagaatcccctgggccgttgttgtaggaacccagccattcaccagtcacaaagaaaaaggcaggcagcacactttggagtatccaaagggcctctttaactgagggctggcatggctgttngtggggtttagtccaacatgatggatgttagggacaaggaacctaccngttcaattcaacatggcattttaaaaattcctgatggagggacggcccggggcgttcctttggntttggggcagg

SEQ ID NO: 267938 - DNA, 684 bp, Homo Sapiens
atcactctgtatgcctttgtgtactcatagtttatctcccacttataggtgagaacatgcagtatttggttttccattcctgagttagttcacttagaataatgtatccagctttatcaaagttgttgtaaaagacattatttcattccttttttatggctgagtagtattccgttgtgtgtgtatgccatgttttctttactcatttaacttatatatttttcaacaaaaacataattctttgaagaatgacagatgtctgatatcaatcaacatggataaaaggactaacttcttccatgtaataaacatgttcatatttctctgaaatgacagaataggccttttccccttttatggtccatttcactatggtgtttaattgatcagtcgagaatgaaggaaaacattctttgaaaaagtatctgccagaattttgtttagaatggtcagccttaactgaagataggatttaaaaagtatacctgtaagtagacctttttagactttttattatgaaagttgcatacatacacagaatcgtagagaattgtctaatgaagttccatatacctcctctccagattctttaatgaacctccatgtacccattccccagattcattaattactgacattttggctatttgtatttcatatatttttttgagacagggtcctact

SEQ ID NO: 267939 - DNA, 553 bp, Homo Sapiens
  misc_feature (538)..(538): n is a, c, g, or t
attccattggacttggcaaagtcagcttatctgaaatgttaacgctttcatagaaaggctttagcttttcttgtaaacctgctcaaagcaccgcgcccggcccagaaatgtcttttatagatggctttaaaaaatccaggacccatgcaaggttcccataaggtatttaaacttttaaaatatttatactgaatagatgcacaggtcctataatgctaacaagaggcaaaagacaaggaaagatttctctcacaattctactaccacagtttcaaaccaatttctttttcatctctctgttctttaaaaatgaagctttggacagattttctttagttcactttcctaaccatccatgagacaaaaaaagaacactgatcaagactgtggtggctgtttgactgcataagcacaaattgtggtctttgaaagttcttggctgagagatttggagttttattaagaataccaggaagccagcggcctttgagtaatgtttgaaacaagagggaagaaatcaactattgcttttgtttgntcaaaagctgacttt

SEQ ID NO: 267940 - DNA, 515 bp, Homo Sapiens
ggcgtgatgttcaaggttgtccagcagtccagaggaaggagcttattcagtcacaaagaagaaccttgctgaaaggcaggatcattcccagtatctgcctctccctggactgggccttgagacacagggttaggccctagataaacccagaggccgaaacagacctcccagaactgctcctcactagggcagaaaggacagcccagccactgcctaaatggtcagtgttagttactacagagcaggacggcagaaggcagagcagaccagagcaactccacaaagtctgtacctgagcaagtatcgaacaccatcacctgcatccttcaagggttccaggtagatctccagcctcttgtaggagagaaccaagttgaaaaggtcaaacgctggggacttggtaggaaaaggtggagactccaggggagcctcgggcatcacgctggggctcagctccggcccactcccctcacgttctgatgtctgcatcctgtaaccataataattctgtgccg

SEQ ID NO: 267941 - DNA, 728 bp, Homo Sapiens
cctgtgtatgctgaggccttggaaataactcgtgtcgcttggtgttgatataaaggcaaatcttcttgctccctcctttgagccacaacaggaaggtcaatgagcaagctaggaccttggacatcattcgggatcatgcctaaatccagactagtttttgctaatgaattaagattttccaggtcgtcaaatctgccttgttgactgtttccttcagttgatggtacagatggtagggactccatgacaaaattttctttcatcacattttcagggcaatagccatacggctgtgcctcctgggaatagacagtcctcccggttcttgcctcttgaagaactcggaatggttcattatcatgcaaccactgtgtaccaaaagtgaagttcattcacagagggcacaggagtggcctcttgaatgtgcgacaagggatacaactccatggatggtgagggatcttgatataactcatattcttcatcaacaagcatttctctttcttcatccatttcctgcaatctaggagtcagaaattcatgcatctcccaggcctccttgctttgctctatctctttttgttgggaatggaaagactttcccagatctagaaatggttcatccacaagttcttctttaaaatatggttcatctctaaatcccttgggtgcttcgagtattaaagatgaatttatatcatgaattgttcctgaaaattcagtcttgt

SEQ ID NO: 267942 - DNA, 711 bp, Homo Sapiens
tcatggctccctaggactctgtcctgggttctcagctcagctcagctcagctcatctcctctttacactcagagatctcaaaatagcaaccttcaagaaggcctggtccacagaaatgttctgttggagcttcacaatactttataaaaaattagtttctacatttccattttttcacctaacaattcctatttctggcttcttttgaaaaatcagggcgtttcagcatgccaggcttgtgtttctgtgtgatcatggccagctggagctatgagtagagcagtcttaatcagggcatttccaaattcttacaaccatcttcacttaattctgttcactgccccgcccctctaggcagcttaagttgtcattcctattgtgctagccctaggtaagttatggctccgcaaaacaaggacagccaaatttttatttttcagcccaccgtgaccctcatgcccacagccaaattcccatacatgttccaataaatcccagactttctccggccctctcttgctgctcacacttgctgcagcccttcttctctatccctttagcataaccttcagaactcaacattccatctgagagagtgttcagatctggaattctaaaaggaaaaaaataaattatgttatgcattactacttggaggcatgctagttgggcaccactactctataagaagactctagttacataataaaa

SEQ ID NO: 267943 - DNA, 468 bp, Homo Sapiens
ggccgcttaattaattagtcttaagcaccaggaaagcagttggccctgttctccgcctacaagccttgggaacctgaattgattttttgaatgatccatttttagaactcgagagaagccccagaatgtcacagcttcagcgtcatctggttggctggttttccggcttgttggcctgagtctgtgaggtctcttccagctggcaagggagggaaaccagttcagactggctggagcagagagagggaagggattggttcacatcacaggtcaaggccagctagaatggggccagctccaggatgaggacactgccccccaccagggctgtagggcaggttgatggccaacaccagggcacactctgggatgcacctgattagtgggtgcaggtgttcccactgggtgtgggcagaggaatggggtagttaacagtcacaaatctgtccaggcacaagtggctcatgc

SEQ ID NO: 267944 - DNA, 827 bp, Homo Sapiens
agcagaggtaatcaccatccaaaagttggtatttctcactcgtggtcatttcacacatccctttttaaaatagaatggaatataggaaatgtggaggaagctaaaggaatgggggcttttaaggcttccagtggagcagatcctaacccttggtcagtataatttggctctaggttcaggactgctggcagggtgagaaacatgttggatatagagttttcattttctgaagacaagtcagaaacagcacattcttcctgggttaaattcaaggacaaatttgttgtttggcttttctctaaaagatagtgacacagtgattcaattcttcaggcagtgtattacccaaagattcttgaatccttttcaatttgatgggcccttttgttgattctctataaagatggagcatacagtgttaacttttagttggtaaaagtgcttctgtgaagaactatataatgtggcctactttgtttttcctgatgagttgcccagtgccaaaggtaatatttggagaatcaagacgagtaggcagtttacatgtcctgtcaaactctgtctcaaataccctggttatgaaatggctttcagatgggtgcctgggtgttgtgccatctaagagctgggtgtggaacaagtgcagcagtactcgggtttcctcatctctattggtggctgtcattggatctgtaagccttggatactaccaggaagggaggcagagtttacctttcagtgtgagcatttcaaagccagacctatattctttttcagagggaaggccagtccacttaattacaagcacagccaaaaagggattcctg

SEQ ID NO: 267945 - DNA, 429 bp, Homo Sapiens
  misc_feature (14)..(14): n is a, c, g, or t
ggaaagattacccnggaactatccaaaggcaaaataacctaaaaggcccaaaagttctcccttagaatttgtctaagaatgtgtcaaatagttttcagaaaattttctttttgctgctctctgtggaactcaacctcccattttgtcttttccaacatttcctctgcaatctcatgctatatccttgaagagttttttggctgtgtggcctcattgagactttttggtatcctatacctttctccgatatgtggaataggctaacttcaaatctgtaaaccgaatagccccattccttggactacatcttgacttccttatcccactgtataaccctattagtttcctgagttggctgatgtcagcctttctacaatatgtccttttaatttggttcatcagaggtaaaaggcagtataaacaattgat

SEQ ID NO: 267946 - DNA, 606 bp, Homo Sapiens
aatgttgaacttcatgatgcatgaccagcgcaccggcccggcatggaacgtgctgatgtggaccatgctgtttctaggccagggaatccaggtcagcctgtactgccaggagtggtacgcacggcggcactgccccttaccccaggcaactttctgggggctggtgacacctcgatcttggtcctgccatacctagaggtcgggacagacgacgctacctgcccagacaccaccaagttctctgcctgcaaaacctgggaaccaggactccctgtctgcattcccaaatttggctctgagtcgaggcaacctgcacacaagaccccaccaaggaatgtgcaaggactgagatctgcagacttgtgggtaactgatcacagacctcagcatgggggtgaccagggtgactcttcaatccctatccccatgggctgggtacaggatatcctcctaccccatgactgtcttagggagacttggggtaccttatggatttgatgaatgtgggggaactcagaggaactggggccaccaaggttggaaaagggtttggttcttgactttgtattccttccaatacagcaataaactttgtctcccttttta

SEQ ID NO: 267947 - DNA, 409 bp, Homo Sapiens
  misc_feature (200)..(302): n is a, c, g, or t
atttggaagccctgtagaaacaaaatatcccctgatgcagagaatgactaatagtagcagctccccaagccttctaaatgacagtgccaagccatattcagcccatgatcctctaacatcacctgcttcatccttgtttaatgactttggtgccctcaacatctctcagagacaaaagagacggagcttgtctttgtcannnnnnnnnnnnnnnnnnnnnnnnnnnnnnnnnnnnnnnnnnnnnnnnnnnnnnnnnnnnnnnnnnnnnnnnnnnnnnnnnnnnnnnnnnnnnnnnnnnnnnncacactgctgacacacggctaaatttcttttgtgttttagtagagatggtgtttcaccttgttggctcagtctggtcttgaactcctgagctcaggcaatctgccca

SEQ ID NO: 267948 - DNA, 481 bp, Homo Sapiens
  misc_feature (128)..(128): n is a, c, g, or t
ggttctttttgcatcagactcagttctcgttccagctgggaagtcccattgggtttggaaaggtgatttcctgcttaagaggagagacattaaatttgggttctgaactgagcctaaaaaccaaaccntagcagagttctggatcatttctccttcagggcttctgaaacaaggaaggtgtggcttatgaagttcccccattttccattctctacagaaaatttcaatcttctgccttgaaagagaggacaccaagcaaacaccctaaaacaatgccttatgatcaggccttatgattgtcaagaggtgggttttgagttacaagaagtccttacccagtgagaccgggttcctgtagttctccagcatcacctccccatacacggtcatcctctgagcagaatctgcttgaatccactcttcccaagagaaatctatggacacatccttgaaggtcactgactcctgaaactaaaaattc

SEQ ID NO: 267949 - DNA, 412 bp, Homo Sapiens
acctttaaatgggggtcctgaaactggaccctaaaaaacccaatccctagcaagagttctggatcatttctcccttccagggccttcctgaaaacaagggaaggtgtggccttatgaagttcccccattttcccattctcctacagaaaatttcaatcttctgcccttgaaaaagaggacacccaagcaaacaccctaaaacaatgccttatgatcaggccttatgattgtcaagaggtgggttttgagttacaagaagtccttacccagtgagaccgggttcctgtagttctccagcatcacctccccatacacggtcatcctctgagcagaatctgcttgaatccactcttcccaagagaaatctatggacacatccttgaaggtcactgactcctgaaactaaaaattc

SEQ ID NO: 267950 - DNA, 515 bp, Homo Sapiens
  misc_feature (16)..(16): n is a, c, g, or t
  misc_feature (24)..(24): n is a, c, g, or t
aagatttaggctgccnagggacanggcggaaacccattataagtagaaacactttacatcaccatacctccaaacggtaatcacgaaaaaagggaaacaaagggtgaaaattaagataaacccatgttctcaactgaatttaaatgcacagaggatcactagtaatgattcatgaaagcccaggaaatgcaaaaatgacagctgcattgtaaatctaactcagccacatgtcctgaggttttgtacactttggtcttttatttgtagggaaaatatctcatcagtgcaacatctaaaatttagcattatgaaggcacttgactatgcttttgcttagttgaaatacgttcataatgtatcccctatttgtaggtaatgatttttctacctaaaaagcattgacattattctatgaagttccaggtaaattttgaatcggttgcttacaatctgcctccccacatacacaccctaagaatacactctaacaaaacaatggtgtatttctagatcta

SEQ ID NO: 267951 - DNA, 555 bp, Homo Sapiens
gtacccaggggacaataccacaccggagcagatggcccagtacacagctgagctccgtagatacatcaacatgctgaccaagcctaggcatgtgccatggacaaggagagagatcccagcccctgggaccctgggcccactccacattcctggccacaccctatccccagcccaagccccatctccagccccagtcccagccccttccaggccactcttggggaaacagagcatctgtgctgaccaggcctgggcccatgtgccctgggcaagagggtgcctacaggcggatatgaaaccggtgggctggcaccctgggcacagtgcttccaggtatggagaaagagacaaagaggacacgctggccttctcagagtggggtcttcccatgctgctgcccccagagagctcagcccgctggacttgtaacactacctcccgccccctaccactccacgggcagtgccagcccagctctcccctccacactgttggctctggccgaagctcactccctgttcctgcacaggctcaataaagcaagtcaaagcacaa

SEQ ID NO: 267952 - DNA, 165 bp, Homo Sapiens
ttcaaggagtggggtaatagactcatgtcttaatgcgaggagctgtaccctattgaggccatttttgccatctactacaacaagtgatttgctcatgccctccccacttggataatgggcaactcacaaaaatcttggtttcctgactaacagaacaaacctgga

SEQ ID NO: 267953 - DNA, 640 bp, Homo Sapiens
  misc_feature (301)..(413): n is a, c, g, or t
  misc_feature (436)..(482): n is a, c, g, or t
  misc_feature (549)..(557): n is a, c, g, or t
ctcgaaacactgaaatcactctaacaaaggcaaatcaatgtcttattaatttctggttaaaaaatagacccaagaagacagggcacagacataaattttgtgtggtgggaatacaaatataacttcaacgtccagattcatggatttggaaatgaccttaggcactctaagtatagcaccactgaagtttacatttagggaatggctaatccctgctgatctaaactatttccaatccccaatgtactctttaaatacagaaatttaaaaaaagaaggggccgggcgcggtggttcacacnnnnnnnnnnnnnnnnnnnnnnnnnnnnnnnnnnnnnnnnnnnnnnnnnnnnnnnnnnnnnnnnnnnnnnnnnnnnnnnnnnnnnnnnnnnnnnnnnnnnnnnnnnnnnnnnnttagccaggcatggtggcatgtnnnnnnnnnnnnnnnnnnnnnnnnnnnnnnnnnnnnnnnnnnnnnnnaacccaggaagcagaggtggcagtgagccatgatcacaccactgtactccagtctgagaccctgtcnnnnnnnnnggaagggctcaacatagtaagtacagagctattttaatagaaagatcatgagggaaaaactagcagctgtcagatagagagta

SEQ ID NO: 267954 - DNA, 240 bp, Homo Sapiens
aatcattctacacaacaaatgtttcttctaacatccccacaatatcaccccttaccacgagacctcccttcagcttaatctctcccactctaggttcccacgccgcccctaatcccactcgaagcagccctgagaaacatcatccattctctctccataccaccccccaaaaattttcaccaccccaacacttcaacactattttgttttatttttcttattaatataagaaggcaggaa

SEQ ID NO: 267955 - DNA, 495 bp, Homo Sapiens
ctgacagattaaacagattgtgggaaccaaacacccagaagactccctgtgagatggtgcctaaaacatgtcactgttgatatttttaacagcccaggtcattcctttactttcaaatcttcaagaattggatttatcagccaacaaaaagatgggcagttcttctgaaaacttactcagcaggctccgatttttaccagcattgaagtcattagttatcaacaactgtgctttggagagtgagacttttacagctcttgctgaagcctctgttcacctctctgctctggaagtattcaacctttcttggaacaagtgtgttggtggcaacttgaagctgcttctgggaaacacttaaagctttccatgttctcttcaagttgctgaggctgagcagctgtttcccgggtgacagaggatgtggctctcctggcatcggtcatacagacgggtcatctggccaaactgcaaaagctggacctgagctacaatgac

SEQ ID NO: 267956 - DNA, 482 bp, Homo Sapiens
atcaaagttcccattgttatcaatccaaatgcatatgacaatctagctatctacaaaagttttctgggaacaagtggagaactctcagtgaaggaaaaaaccacaagtgtaataagccatacttatgaagaaatagaaacagaaagcaaagtgcctgataacaccactagcaaaaccactgactgtcttcaaactaaagggttttcaaacagccacagctccccagcaaagatccagagagccactcaagagcctgtggccaaaatagaaggcactcaggagtctcagatggtgggcagcagcagcaccagagagaaagcaagcacagtgctttctcagattgtggcttcaatccaacccccacagtctcctccagaaacacctcaatctggccctaaagcttgcagtgtggaagagctttatgccattcctccagatgctgatgttgctaagagcacacctaagagtacgccagtccggcc

SEQ ID NO: 267957 - DNA, 504 bp, Homo Sapiens
  misc_feature (332)..(332): n is a, c, g, or t
  misc_feature (394)..(394): n is a, c, g, or t
  misc_feature (425)..(425): n is a, c, g, or t
caaactactctgtgagggactcttgcaccccgactgcaagcttcaggtgttggaattagacaactgcaacctcacgtcacactgctgctgggatctttccacacttctgacctccagccagagcctgcgaaaactgaagcctgggcaacaatgacctgggcgacctgggggtcatgatgttctgtgaagtgctgaaacagcagagctgcctcctgcagaacctggggttgtctgaaatgtatttcaattatgagacaaaaagtgcgttagaaacacttcaagaagaaaagcctgagctgaccgtcgtctttgagccttcttggtagggagtnggaaacggtggctgccagacgccagtgtttcttccggtccctgccagcttgggggccctcanggttggagagagctgcgatcccatccaggcncaagaccacagctctgtgatccttccggtggagtgtcggagaagagagcttgccgacgatgccttcctgtgcagagctt

SEQ ID NO: 267958 - DNA, 484 bp, Homo Sapiens
  misc_feature (395)..(395): n is a, c, g, or t
aaaatccaaaacgatagtgtgagctattgaaactcaagcgattacagacaattgctctgaagaaagaaagacattcaacttgaacgtccaaatgaactcaatggacatccgttgcagtgacatcatccagggagacacacaaggtcccagtgtcattgcctttatctcatattcttctcttggaaacatcataaatgcaactttttttgaagagatggataagaaagatcaagtgtatctgaactctcaggttgtgagtgctgctattggacccaaaaggaacgtgtctctctccaagtctgtgacgctgactttccagcacgtgaagatgacccccagtaccaaaaaggtcttctgtgtctactggaagagcacaggggcaggggcagccagtnggtccaggggatggctgcttcctgatacacgtgaacaagagtcacaccatgtgtaattgcagtcacctgtccagcttcgctgtcctgat

SEQ ID NO: 267959 - DNA, 503 bp, Homo Sapiens
  misc_feature (111)..(111): n is a, c, g, or t
  misc_feature (145)..(145): n is a, c, g, or t
ttcaactgttgtattatctatacaactccaaagaatggattgacctcaccccctgtgctcctgcctacaaattgccatttacttttatttgggacatttgtatatagtttnatctatgtttcattatatcattagcagtttaaancctttagagtctaaaatcctttgactcaaagagtctatggaaaaatggagaaagatttatatattagattattatcaactaactcttcatagttggctgaagccttaataacaataggttagtcagcatttgaataataattctggaaaagattaggaaaacataaattgtgtttacacgattgtgctcatgcactagctagtaccgaagagctgtagtgaaaatcttttaaatgtaaattggctcagctacctgcacatgtgtgaccagtttgaaatcagtgaaatgcagtataatgagatcatccttggaattcccgtcccccacgttgaaggctggtcacaatgctcctgtgccg

SEQ ID NO: 267960 - DNA, 502 bp, Homo Sapiens
catggtgggggtagagggaattgaagaaattcccacagtggcaacttggactgcatctcctgctcaatttgaactggatcaaaattcttttggtcctgtagtgcgtacttcttgtgggcgtgtgcatcatgatagttcagtaggagggggcctttgggcactgctttgctttcattttcttcttcagataaaaatatgtcatgcaagattctttttctccctctctgaaagacagagtgagggcagaagggacacaatgtgagctgcgattctgtggtctagcccgtctgctctgggggatggctcccgcagactgggtgggacgagatcttcttcagttgcaacaacctgttgaaatcaacaatgagaggaattggtgtaagggtccgctctttagtgatactcactgctcattgctgcattcccactgcttagtaagaaccagtccatttctgggacccaagtaccactgatgacacaaaatggcaggaaactatcagtg

SEQ ID NO: 267961 - DNA, 696 bp, Homo Sapiens
  misc_feature (457)..(457): n is a, c, g, or t
gccaggccagctgccccagtttgcagttcagcctatgcagtcagtgtgtaaatactctgtaaatgcaatgcctacatatttttttaaaaataaattatcatttgaaaaacaatttaaaatgaaaacatcactatcttggggaaattacccctatagcaaggacagaaacttgtaatcaggatcatgaagctatgaaaggccctactatcacctgatggtagcatgcttcacagaaatactagctcatcttttccagattgaggcagactgttaacgttggctttgaaaatgttagctaagaataatactatactaataatagcagttaatatatagcccacacaatgtgtcatgaactgttctaaactttttacttatgtttatttaaaattcatcattattctccccattttacagatgaggacactgaggccagagaagttaaagaaatttgtgnaaggcagtacagctagtatgtgaaagagaaagaatctgaacctaggcatccttgttctagatactcttctcttaactactaagatatagatatctaattggtggtgtcagtgtctcaataccatcaaacattcccaaagcagagatgagggtagtacctgaactttttatcaggaaataggccaggaggcaccgcatagacgcctggtggcagatcaacagatacattctcctgtcgtt

SEQ ID NO: 267962 - DNA, 721 bp, Homo Sapiens
  misc_feature (671)..(671): n is a, c, g, or t
ggtgtggaccagtcacatgaagaggaccatccagacagctgaggcctgggtgtcccctatgagcagtggaaggccctgaatgagattgatgcgggtgtctgtgaggagatgacctatgaagaaatccaggaacattaccctgaagaatttgcactgcgagaccaagataaatatcgctaccgctatcccaagggagagtcctatgaggatctggttcagcgtctggagccagtgataatggagctagaacgacaggagaatgtactggtgatctgccaccaggctgttcatggcggtgcctcctggcctatttcctggataaaagttcagatgagcttccatatctcaagtgccctctgcacacagtgctcaaactcactcctgtggcttatggctgcaaagtggaatccatctacctgaatgtggaggccgtgaacacacaccgggagaagcctgagaatgtggacatcacccgggaacctgaggaagccctggatactgtcccagcccactactgagccctttccaagaagtcaaactgcctgtgtcctcatcgccttccacctttaggaaatgctatctttgctcttctcctactctgcctcggcctcactgaggcaccccacttccagtgaagaagtcctccgcaactcccaaacaagcctcgcttntggccgcaaccaaggagctatctagctctggaggaaactttctttcttaa

SEQ ID NO: 267963 - DNA, 424 bp, Homo Sapiens
ttcactactgtggagtcgaggatgaaatgagaggatgcttttgaaaacactttaacatgatgttgttatttattttatatatttgttttgtatatttcagttgttatgagcccatccttgttggggaggtgctataaatactaatctttaatgaaacataggtgtaataaggcagacattaagaaaaatataaataccaacacttgaaaaaagctcgtattatagatttttaaaaagtacttcaataaattacatacttgtaattaattgacttgagaagtatagaaccctcatctgtgtggtatgttaaatgtcttcctaagtcctttctttatcctaattgtatttcttaagtatttgatgttaaccttatatgtaacattttataagcaagtaaacattaaatttagccaccctctggctg

SEQ ID NO: 267964 - DNA, 395 bp, Homo Sapiens
  misc_feature (31)..(31): n is a, c, g, or t
  misc_feature (45)..(45): n is a, c, g, or t
  misc_feature (66)..(66): n is a, c, g, or t
  misc_feature (75)..(186): n is a, c, g, or t
  misc_feature (188)..(234): n is a, c, g, or t
gtgaaaccccatctctagtaaagatacaaanaattagctgggtanggtggcgggcacctgtagtcnccagatgcnnnnnnnnnnnnnnnnnnnnnnnnnnnnnnnnnnnnnnnnnnnnnnnnnnnnnnnnnnnnnnnnnnnnnnnnnnnnnnnnnnnnnnnnnnnnnnnnnnnnnnnnnnnnnnnncnnnnnnnnnnnnnnnnnnnnnnnnnnnnnnnnnnnnnnnnnnnnnnntatagatttaccattatttttggaaaacaggtttggcaactctatactgactacaccaattcttctcatgccctaagtgggaaaactagcctccacggtagcaaatattgatgtggcactaaggccatttccacctgattaagtggctggctggtcacaaa

SEQ ID NO: 267965 - DNA, 466 bp, Homo Sapiens
  misc_feature (389)..(389): n is a, c, g, or t
  misc_feature (394)..(394): n is a, c, g, or t
taaattacagtatgactatccagtagactgttgtgccatcattataatttatgtttctgaagaatatttgacagcatggcaaagtgcttatagtgttaagtgaaaagagtgatatacaaaattgtatgtataaatccaaaaaatgacttttaaaaagatggaaaggatatgcaaactctgggtagttggattatgggttttcctggttttatgctttaaaaaattttctccagtatattactacttatattatcagtaaaaatcaatagcatctagagctggcagtggagagattgaggccagatcactaagtttggtccatgaacaattaactggctgggtggacacagaggctatatgatcttgtgttggcagcaaggctggggacnagaangggaaaaggacctgcccaggaggagaagggaccgtgtgactatgtgaccataatccctaccaaaaaacacca

SEQ ID NO: 267966 - DNA, 389 bp, Homo Sapiens
  misc_feature (338)..(338): n is a, c, g, or t
  misc_feature (377)..(377): n is a, c, g, or t
gaaggagctaggagaagaattctctcatgtcagtagccctcttagggactacttagggtcggatccatttagtaactgaactcctagtgagcttgtattgcaaatcctctctattgtcccagccgtgaagtacttctctggcttccatagttaccttctccctggctggtgaagaagtggcccatgtttctggggtttcccagaatgttacagtcagcctcaaagcccatgtggaaggtatatttcctggtttctattgcaaaagttctgtagtggtgttgctgcaatgaaatggaagtccaacggcattccctgttagtgacggagtgtttcaaganggacctaacacgtaattgctttcatgttcgttacccaangtaaggggacag

SEQ ID NO: 267967 - DNA, 923 bp, Homo Sapiens
  misc_feature (340)..(422): n is a, c, g, or t
  misc_feature (434)..(577): n is a, c, g, or t
ttataatgcaatattatttattcataaaaatatccatccatacctattttaaagaaatacatctacatagtaaaatacagttttgtaaaacttttgagtttactaagtcagttctaattttttacttgtagcatcaataaaatttacttctcgaaccaataacaactacaggcaagggtcaacaatttagctccctgaaattcagcatccctgaaattcaatggaaaggattttctaataacatgatcacatttttaaacctatttagggcaacagttggaaatatgtgatgaagaaactgagtaaattatacagaagtgctcttctatataatttactnnnnnnnnnnnnnnnnnnnnnnnnnnnnnnnnnnnnnnnnnnnnnnnnnnnnnnnnnnnnnnnnnnnnnnnnnnnnnnnnnnnaattaaatgaannnnnnnnnnnnnnnnnnnnnnnnnnnnnnnnnnnnnnnnnnnnnnnnnnnnnnnnnnnnnnnnnnnnnnnnnnnnnnnnnnnnnnnnnnnnnnnnnnnnnnnnnnnnnnnnnnnnnnnnnnnnnnnnnnnnnnnnnnnnnnnntgacagaaggaggccctgtctctaaaatacataaataaataaatcactaactggtggtatagtgaggagcttatttcttccaaaatatatgaaaaatattactggtcatgactaagaaaagtgtctctggagtcttcaagttagagaaaataattttttcccaatataattctcctattccacataagtcttataatccaacctgtagaaagttgccatgcactgtgacttactactttgtataatctagttctcaaccttttacactcatgtgtgcaagaaactctcaatacctctcattacacgcagtgattttcaacatactataaaggagctgattaaaagt

SEQ ID NO: 267968 - DNA, 943 bp, Homo Sapiens
  misc_feature (613)..(613): n is a, c, g, or t
  misc_feature (768)..(768): n is a, c, g, or t
ttccctgaagccactcgaagtgaagaagacttaaagaaataccccaagtacccctgggggagagaaatctatactttagaaggtgttgtggatggagctccatattccatgatttctgacttcccttggctgaggtcattacgagctgcagagcccaacagcttcgctcgatacgactttgaagacgatgaagaaagcactatctatgctcctagaaggaaaggacagctgtctgcagacatctgtatggaaacaataggagaggaaatttcagagatgcgtcagatgaagaagggtgtatttcagcgagtagtggcaatttttatccactattgtgagtcaatggagagccagttgaagatgactacatttaattggtccctcctcctttccagctattttgtcagaaagcaagtagggccatccagctgccagagtgctccacagggacttgaggcatgcagttgggaggtcctggctcggtttgctatatagggaatatataaggaacatcgaaattgtatacaaagatttggtaccataaaaaatatacaaagacgctccctaaagtaccaactttatatcatatgtttatacaatttaatttaaaaantcattttaaggaagacagataatttgaaagacttttgtttttcttgacttaattcatgaagtatcattttttgactgagtctccatttacttcattcttaatgattattgtctatccctttaaatctgtgcctttttcttcttgagcgaagctgntttgagtaaacctgttgaagagtgtttgtgtcttttgtgcttttttgttgttattaaaacaccaactaaaccttatagtcaagacaaggctctatgtttctgtacaaagctgtagttctttcttagtattatagttgccatgtttcttaaatcaagtaaaaagacttatgagctt

SEQ ID NO: 267969 - DNA, 672 bp, Homo Sapiens
ggcacgagaacacatacaaagacaagacagacagaagggcttccaaatcagatccctaaccaagaactccaagagtatcccttccaaactatcctcctgttctctgtctgagaaatctccccaaaatcttcctgattgagaagtctcccaaaccaagactcttcctactaattagagagagccaaccgagaatctcaaatgaaccaaactgagaaagatgcccctcagtgggcctacagaccgacaccccaccatggggcaacagaaaaaccaagaccccctccccaaaggaatcaaaccaatcgggaaaaggaaggaggcgttggccgtgcctaggatattcaccaatccagacacactgtaatgaggctacagctacagacactccatgactgggctacagacagacaccttgtgatagggctacagttataggacatctcctcaagactatttctctattgcaattaaatccatgcacactgggtcaccagtgccccttcagcagagacaataccagagtcagcccccagtccaaaataactaggcagctgcttgagctggcatctgaatccatcaccagagggggactaccaaaccatgggcaggtagccacatgggcaatcctggacaagccccccagatttgtaaccacccaatgagttcaccttg

SEQ ID NO: 267970 - DNA, 522 bp, Homo Sapiens
  misc_feature (500)..(500): n is a, c, g, or t
ctgcctacaactacagaacagcctgtcaccaccacattccctgtaaccacgggtttaaaacccaccgtggccttgtgtcaacaaaagtgtagacggacggggactctggagggcaattattgttcaagtgactttgtattagccggcactgttatcacaaccatcactcgcgatgggagtttgcacgccacagtctcgatcatcaacatctacaaagagggaaatttggcgattcagcaggcgggcaagaacatgagtgccaggctgactgtcgtctgcaagcagtgccctctcctcagaagaggtctaaattacattattatggggccaagtaggttgaagatggggcgaggcaaaattcatggcccaaacagctttgatcatggatgtttcaaggacccaaggattcagaagcttccggggatgccctttaaaaattaaggcattgtttaacagtggaactgtgttcctttaaggtgtttttttgcctttgcctttgnaaaggtctatgttctctccgta

SEQ ID NO: 267971 - DNA, 964 bp, Homo Sapiens
  misc_feature (419)..(479): n is a, c, g, or t
  misc_feature (504)..(513): n is a, c, g, or t
ccgtctagtgtagaagttttagagtatcttttggtgtaactactaaatttactgacatctctaaatttaaaaaatgcatgcccttcattcacatttgaaacattcggaatgtcattttaaaattacttctctttttttgaaaaataaattttaaaaattaaagtaacttctcagtctttcagcatggaaagattggggacatttagagacttggtaatttccatgcgagggcaggtggattgggttcctttgcccaaagcagaacgtgggacaggatcagcctcgtgagatagcacgtctggcctttggtccccttctccattgcttcctctctttatgtttctcttcctatctctccgagttgctgtttctttgtgaagtctttttctaattcagtctttgtgggagttggttcatcnnnnnnnnnnnnnnnnnnnnnnnnnnnnnnnnnnnnnnnnnnnnnnnnnnnnnnnnnnnnnatgtatcaactccccgtgcccccannnnnnnnnngcttgaccttctctgtttccttttattcttgaataaatcttagtctctgtttctctttcccactctttcctctctcttactgtctcccttcttgtcctgttctcagctaacttaactggccacatgtgacgaaaacaacaacttcttagcttcttttttgagcatcttaaataattttgtttattttaaatttcaatgaaacatccaaccctcactgtcatcccttggatatacgtttttatttaggtgactgaatttttttcaacctttatggcttgtgatagaaaaattttaccctaacttaaaactaaaaaattggatattgtaatgttaatgtacctaatatgtttttgaatattctatgttttatatgttaaaaatactcaaacatgtttctaagtagaatatcatttacatttaaaaatacatttcaggatatgacttttctgaa

SEQ ID NO: 267972 - DNA, 564 bp, Homo Sapiens
gccaccctgggggtgtgggggaggatccaggaggcagaagctccactagctcagagcatcctcgtaaaccaggttcaggtcaggagttgaagctcagggctgggcggggttggcctctggtggtttttgcatcttcagtgctcaccaaagctgtttcgtagacactgcaaacaagaaaggcctaggaaggtcaggacgtggatggcctgcttccaaagaggccacacccaaccccatctctggggcccagctctcaattacagggaagttcttcctttggggtctaagcctaaagtctttcccgctgtgtgttcccttctggtgaacttgttcaaccctgctccatggagccaagcctatcagctggccacttggagtggcggtcagtatttttacaacttgttttcatgaagatgatttgaagtctccttgcattcccagaatgtcagacccgccctgattcacaaggattgaccaaaacagggtctgagccaaccagaggaatttgaagacttagtcatcccccttggatcatctgcacattcttctcctttccttccagtt

SEQ ID NO: 267973 - DNA, 447 bp, Homo Sapiens
  misc_feature (49)..(49): n is a, c, g, or t
  misc_feature (174)..(174): n is a, c, g, or t
aaatcctcattctctagtcatgactaaaggaatgaaccacatgggcaanccaaaatcaaattctctactgcatcactaatgtaatactaaataggatgctccatcaaaagagacctagaatttacataatttcccataaacttatcagaggaacaaatgtaagacaatgggaangaaaatcaagataagctcactgttgttgctggtttgtgtattcctgtctttctcaactcctcccacagctgatacaacattgtagttaagagagctggtagaaactacttcactaaaattatgtatttgaacatcagccttttttcattctagtcagccttttttcactctaaagtattaaattcaaccaaaaagccaaacattcaaagtctgttcaccaaaaacactcatcataaagatgtttatttactatccatataaggatgcaaaatg

SEQ ID NO: 267974 - DNA, 612 bp, Homo Sapiens
  misc_feature (342)..(342): n is a, c, g, or t
ctcggcgtgggtttcaagtctgtctccctggttctgtgggtaattctcaggagggtggagggaagggagggtgcagggattggttggggttgccctgtccatcgggctgtgtcgctgacataaaatccagatagaaaagctaagaactctaccggtattctaccccggaataccccgcctccgctgccaggagggagagctcccagatatccaggtcagactctcctcattcttgaattatctgcacagtccctcccacgtcccagcctagaaaagcttctgactcctggggcctcaaactgcaatgcaccttttcagtgcaataggagctatccaatctcncagccgcgtccatccgcccactcgagcccacctgtttgcggaccacagagcggcagcacatccctacacggggctgtcaggcaaggtcaacgcgctagagttcaagagcctttgctttgcggattgccgcagcgccgggtgtgggcgcaggtggggatagagtgctgggttttgaaagagtgacccgcaaagctgagggtgcagagcaagacacagatctgggaagagcagagaaaaaacgctcctgcttctgaacccctcccacctcgc

SEQ ID NO: 267975 - DNA, 675 bp, Homo Sapiens
  misc_feature (83)..(83): n is a, c, g, or t
  misc_feature (212)..(212): n is a, c, g, or t
  misc_feature (300)..(300): n is a, c, g, or t
atataacatatatccggaaaatctagaaggaaaaccccaagacatgccctaagaatagcaagaatagtgagagagggcaatancaaatgatatttgaagtgttagaagtccataataaaaagacaagtttaaggagaaagtcatattttctattactgttccacatctctatgtatgcagaacagcaagtctttaattagtgctttgcaagngcagcagatacttaatcagtgctcttcacatgagcttccagaggtacagcaaatcttaaaattcctacaatcaggctaatagaactangaatataatagtaaaaatcacccttaggaggctttgtgcctttttagactgaagcaaaattttatgaacctataaccttttaaaatcaaatgaattatttttatgcataatatgtatcaattaatacaaaaataaaaatattagagcacttttcacaaagtttgatcaacagaacttcctaaaatgttaacggatgttaccaaaaaagaattctgtagttaaataagttttgagaaagactagattaaacaaaatcaaacagctttattgtaagacttttcagagtttcagtatatcttatatattgtgactctccaagaggaagtcttttcagatctatttttccccatcttgagtttgctgtgatctgaatac

SEQ ID NO: 267976 - DNA, 688 bp, Homo Sapiens
  misc_feature (58)..(98): n is a, c, g, or t
ttataggtggggtcttgcgaagttacccagggtggtcttgaactcctggcctcagctnnnnnnnnnnnnnnnnnnnnnnnnnnnnnnnnnnnnnnnnnacaagcaccatgcctggcctagagaaggatttaattcagctatttaaaatatgttcaaagagataagagaaacgattcagttctgtagactagagaactaaaggaaagtatgaaagcaatgtctcatcaaatagagaatatcaataaagagatagaaaccataaaaaggagtcaaataggaaattctagagttgaaaagtatggtaactgaaatggaaaaattattagaggttctcaatggcacattacagcaggctgaagacagaatggggaacttgaaggttaattgagattgttgactctgaggaacagaaataaaaatgaatgaaagtgaatggaatctcagagacctgtttgtggaacacatcatcaagcttactaatgtacacataatgagcatcccaggagaagaaaaacagaaaaaaggagaaagaatatttgaagaaatgatggccccaaacttcccaaacatgatgaaaaacaatctgcatattcaagaagctcaaggaactacaagtaggaaaaactgagggatccacatctaaacatactgtaatcaaactgacagaaggcaaagacagaatatcttg

SEQ ID NO: 267977 - DNA, 412 bp, Homo Sapiens
gccatttaaaaaaactctgccctccattttaaacatgttgaaagggaaataaccgccatatcaccccatgagtttgttttgccttttccatacagacttgtatgtgtcatttgagtggtttcccagattggagcgaggttattctgatctaaatgaacagcatttttttccttagcctctgtttgcccactctgggtatctctcctatgggcaaagccattagaaatgcataaaacctcgagacatggtttttggcaaaaactccatgactttaaactagctcttttactactgacctttcacagagaaaaaatatttcccttgaaaaaaactgggcttgtcatttttttcccttgtagctttaagcagagacataagtgccttgcattacacatagtaaactttcttgggt

SEQ ID NO: 267978 - DNA, 445 bp, Homo Sapiens
  misc_feature (342)..(372): n is a, c, g, or t
gagagtagactcttgtcccccaacactcagtgttcccattacatttgctgagagctaaggagccctcacagacaagatacctattacaggagagcttgactcctcaactccccctagcagaggaataatttcggaagagtatacatgaagtatactatgtcccccgactgtttactctgagttcctgctacttttgctgagagagctaaggacccatcacagacaaaatccctattacaagataactcgactacccattttcaacagagaggaagatagtggtggtattccctagaattctaattgcaaaagaggcatttttctggccgagtgtggtgtcannnnnnnnnnnnnnnnnnnnnnnnnnnnnnnaagcaaacttgaggccgggagtttgagaccaacctgggtaacaaagcaagacccctcctctaaaaaaagaatt

SEQ ID NO: 267979 - DNA, 767 bp, Homo Sapiens
gaaagaaatgtagctaaacatttctcgttaatttgttattaaaccatatatactatcaaagtgtagcaatctgctcaattctagtacctgccagaatttcatccaattttatatttaaatgtcttatattacacaatttttagcaggatgaaacattttaagacagtgataaggataatattttaaatttataagatctttatgccttttcaaagtttatttggcagacttgagtaattagatggataacttgattggaaaaacttctatttccttgaattgcctagaatgaaatttcctaaagtgtgcgcttatagagctaaaggtaataattaacagtgtacagaaaggggttctatggtcagagaactttggaaaatactgtgctaagcatcagtaaatgggtttcttttctgcaggacttccctgagcctatacatggtgagcctctacctatcttaaagaggaagatttaataagcagtatttccctaacttaccagttttatacagaattctttacataactctcatttcagaacatcagtattttatggagcctagtttttgaaaatgctaaactaatatctggaaagaaatactgatatttaaatcctaggtgcttgtcatctactcagacagatgatgaagcagctaaccttcatttgtgtagacttggcactatcattattcaaagaacagcagacattggttctgtgccttaaaccgtgaaaatttaaacccactttcttccccccccgcccccgc

SEQ ID NO: 267980 - DNA, 743 bp, Homo Sapiens
  misc_feature (43)..(43): n is a, c, g, or t
  misc_feature (250)..(522): n is a, c, g, or t
  misc_feature (543)..(567): n is a, c, g, or t
gttacttggcttgtctggggtttagtctacctccaggacatanccagtaagggagaagactagggggagaggcacaggcagttggtagaaaaccttgaagtgtgtaaagtttgatctttgttctgccagcaatgggagacaccgagggactttttggagcattattattgtacacgttttagaaatatctgtgggtcttgccacctggtttcgtttgaatagggaataagtcaaatggttttggttttgnnnnnnnnnnnnnnnnnnnnnnnnnnnnnnnnnnnnnnnnnnnnnnnnnnnnnnnnnnnnnnnnnnnnnnnnnnnnnnnnnnnnnnnnnnnnnnnnnnnnnnnnnnnnnnnnnnnnnnnnnnnnnnnnnnnnnnnnnnnnnnnnnnnnnnnnnnnnnnnnnnnnnnnnnnnnnnnnnnnnnnnnnnnnnnnnnnnnnnnnnnnnnnnnnnnnnnnnnnnnnnnnnnnnnnnnnnnnnnnnnnnnnnnnnnnnnnnnnnnnnnnnnnnnnnnnntgatggtggtggtggtggtgnnnnnnnnnnnnnnnnnnnnnnnnnagatggagttctgctcttgtcccaggctgtctcaaaaaacaaaattattggaggtgcgtgtccagaactttttctgatggggtgttcaaggtttgagttctactggcatagttaaatgctgtcctgagcaagttaaagatggcttttcccccaataactttccatttaaaattacc

SEQ ID NO: 267981 - DNA, 764 bp, Homo Sapiens
ctaagaaagggtgttaaagaaaaagattagttaaattgtgaaagttgaagattccctactgatgtgaatgaggaaaaaaagtgccaactttgtaggcactgttcccatagggaaattaataaggtaaataggatttagggtgggctaaccctttctgatcttctggaaatccataaggacaggtaattctggaaagtagagtgattacaacagcaaccttctccacaatttccttagaatgccgtctgaaaatgagcgaatctttagcagtagccacaaaggatatgcctgatcatattgcagttcgttcgctgatgttctctgtccaatcaactgacaggactacaggtgtcctgctcctctttctgttttattttctaggtgctgtccccctttgttccacagaaaagcatagaaagctctgctgtattctcataaagcttggccccagccctgatgagtttctctatactcattcacaggacaggctttgagctctagactttggtgggatacctcttactacccagaatactatggggggaaagaggaattgggagtaacatctttatcctgcctgccttttagctgtaggtccaggtgggttttcgctatacattttttagtactagcacctcaaggctctcaggcagaaataattaatatcagcaaatattgttctatgaccaaaagaaagacacacaaaaattcttaaaactaaaacaactgcaactctaaaacctatgaaaatattttatgactta

SEQ ID NO: 267982 - DNA, 768 bp, Homo Sapiens
  misc_feature (311)..(311): n is a, c, g, or t
  misc_feature (653)..(653): n is a, c, g, or t
  misc_feature (729)..(729): n is a, c, g, or t
aaaaaacactagtggaaatagattatatgagtcttgcatttagaagtgccatctgttcaactttgcaccctcgcagtcagagtgttaatatctcccgtgcagagataccatttgtcagcattttccgctgtgtggagttaccaaacagttcactttttaatcctttggcctaagtcagctaaaattctctgagcgcacatgtcttgagctttgtgtgtctttactatcaccttcttgtttaagaaaatttcctttcaaaactctattaggagaagggacagaatttggagctaactctgcctatggcagcnccaaggcatttgggggaaagggggagaactcagaggagtagattccccgggagaatagctagtatctatctttctgattaacttcttgcaagacttaaatgagtttttaaaggccctcataaaagaacaagggaaagtcattggggaaaggaagaatacaatatttctgtttcaactgccagtgatctttataaaccctaattaagccctgatggggtataaaatatcccaacttttataaatgactctgtcaactagacaatatgcaatgcttaaattcccacaagattcacgttcattttcaattgcattttggtgaagggaagaatataaatactcagnttgaatagtatttcactgaaaggagaaattaacctatgacttatttccgcactaaaccaaatggtttcttgggagnttgggcttttcctcttagatttgcaaagacaaatcacac

SEQ ID NO: 267983 - DNA, 732 bp, Homo Sapiens
  misc_feature (465)..(480): n is a, c, g, or t
agggaccttccccccacccccaatgccacgaacaaaaagggaactaaaagccagagcagcaagtgtgtgagcttatatcccaggaactctggagatgttactggaccctaaaataatggttgggtgcttgagtattaatacagagactggatatgagacttgggtagatgtgaggtggggatcaagcctttgcagaactgcaatttcagtgaaactgggactcaaacaattgcatccaccagaacaggaaaaaaggaagctggtctccatgtgggactcccatgagagattagaattccaggctttccccttataaagggatctgaatttaccctatcagtgttgatgcaggaaatcctaagcttgaaaaaaacataaagatttggtctcaggttgctggaacccctggagcaacaagcacaatttctctagagggacagtttcaccaccaaggccaaaagaggnnnnnnnnnnnnnnnnaaataaacaaaactctgaagttcttttcttttcaagtttcagttaaaattataacataagaaaattataagtgagatgcaatatagatcacataagataattagaataagggcaaagaagaagagatttcatagtcatggattttaaattaatgtcagaaaagatagtcacagttaacatcctgaccttacacaagtcacttagtccctaagcctgtttttcttaggttcctggaataagttatcacacttg

SEQ ID NO: 267984 - DNA, 744 bp, Homo Sapiens
aatgccatgcgtgctttctctgtggttggaacagggctgctttttaatggtggttttgctcatctgacttagaaagcagctccagactgtgctggtcagatacttaattctgcatccaggtttagcctgagcatctatggttcattttctcagcaagtgattaaatgcttccttttctcttaagacccaacagggctaggttctgagcctctcctcatcaggcccagcgtaagcagtttcttttcattcttcaggatcacaactgtgtcctgctaaattccgtgtcccatctgcagggagcagagacttgtgcagagctggccgttatgcagtttcatgaagtgatctgtgcttcctcctgtttttgtttctatttccttccctctcactcttgagtcacctctgacttcaggatgtgaaatctgtttaggaaccatcacctcacggttctaccagctggtcccttcctctcccaccccggttcttctacttcctgattgccagttactatagcatcattggcacctactacatgccaggccctgcattggtgcttcacagagcaaggtctccctggatcctcaacaaattaacagggtaaggcccacctcagactcacctgtgatgacacccagccactgcaggagaatgtgcttagccacagtcacacagcagcaagaggccagggaggctgctaaatgctgtgcttccatcccagaggtgttgcaagcaatagggtagttt

SEQ ID NO: 267985 - DNA, 776 bp, Homo Sapiens
  misc_feature (60)..(60): n is a, c, g, or t
  misc_feature (144)..(144): n is a, c, g, or t
  misc_feature (763)..(763): n is a, c, g, or t
ggaatcaccacatgagttacatataataattgcttaatacatgtttgctgaaaatgaatncaagagagcaaagcagaaagcactgctattttgaagccacatgcaacatttcctcgaactgcattctttttggagcagatatcnctactaatgcaaaagtccaagttctccagctggctaactggtggtgtcttgttttccttttcagtttttaaattaatctttctatcaatctttttaaggacattcccctttagagattattattgaatgttaataatggatatatttgatagtctctaaaatgtatgaattcactaatttattcagatttataagcctatgttttcaacttttagaaattacttcgaagaagaaaaaaggaactcttttggaaacactttcctacagattttagttaaaaaataactttatggtactgcttttcacagtggcttttgaaaaattctgtacatttaaacaggttatcaaagatcttcatggaacttctttgataaagaagttgaaccattcaataagaaccttagacttccaccactggctgaattctgtaataccctaagaaccgtcatccaattcacacccctcccacacagacacacatatccatcttttcatataatattttgagttgaaaactgagaaagctcatttgtgcttgtggcataagctgctttttaaaaaacacaataaaattgaataaatttaaacagcaaagacattaatttaaaaaaatgcaccncggcacactgcat

SEQ ID NO: 267986 - DNA, 261 bp, Homo Sapiens
  misc_feature (66)..(66): n is a, c, g, or t
  misc_feature (166)..(166): n is a, c, g, or t
acaggagtgtcagttgtaacaagaacctgctgataggtcaagcaagatgaggactgaaaaatagcntactggatttggcaatgctggtgtcactggctgtcttgacaagaatagtcttggtggagtaggttcaagtaaagaagaattggaggctgagtatatacanctcttccaaggaggtttgctctacaggaaacaaatggcaatactggaaggggaagtgggattaagatttatacattttttaaaacagcatttggt

SEQ ID NO: 267987 - DNA, 679 bp, Homo Sapiens
gtcagcattgagccaatagtggttggatgagggagtaagttaccatcagcgtctctgcctgcagtaattatgcacggcggcggctgtcctgttgctgtgccagggtatttgcagaagcttcatgattccagaggaacaatgtcacactttgtagaagtgccacacttagcttggcccagtgaattgagtcgttagcgtagccaggctgtctcctgtaatggagtgggaacactggaagggggctgtcttctgtgatggaatggggacactggaagaggcactttcttttggctgcctcagctgcactttcttgcctcacttcttggatcatggcctctcacacctcggctgatggactgagtctgtgttcccccattttgccgatggacaccagcacctctgaggcaccccagggccgcccctcctgctgtttgcatctgtttctgagcatcttaaaatcaactttgaagggaaaagtcctcacaggaacaaccccccttgtgccttacagacaaagaagtatgccgatgtgatcatcccgcgaggagtggacaatatgggtaagaagctggcctgctgggctgtccccccgcccctcccagagcttgaggcagggacagttccaccagtgtgcagttactgagcactcccctgcgcacgcgggctgccagtgttgatc

SEQ ID NO: 267988 - DNA, 369 bp, Homo Sapiens
  misc_feature (11)..(11): n is a, c, g, or t
  misc_feature (26)..(26): n is a, c, g, or t
  misc_feature (32)..(32): n is a, c, g, or t
  misc_feature (42)..(42): n is a, c, g, or t
  misc_feature (50)..(50): n is a, c, g, or t
  misc_feature (75)..(75): n is a, c, g, or t
tgtgtcccccnatttgccgaatgaanaccaanacctctgaanacccccgnggccgcccccctccctgctgttgcnacctgtttcctgagcatccttaaaatcacctttgaaggaaaagtccctcacaggaacacccccccttgtgcccttacagacaaagaagtatgcccgatgtgatcatcccgcgaggagtggacaatatgggtaagaagcctggcctgcctgggctgtccccccgcccctcccagagcttgaggcagggacagttcccaccagtgtgcagttactgagcactcccctgcgcacgcggcctgcccagtgttgatctgcggcacagggttaaaatatgcttaaaaatgtatgtagctg

SEQ ID NO: 267989 - DNA, 1039 bp, Homo Sapiens
tgtttctttaagttggtttagccttgtatacatgtgataatgatactgttttaaagaacaggtgtgaaagtctaagagtttaatccagactctgcacaagaagttaatctgccaaaccctaggattctccttctgaaagctcagaatatttcttccccttccctatacacacagggctcgaagggttagagaagaaaggcagacaacagcttctgagctttggactaatcacagcctctggttctcagcaaggagccccaacactgagaccagaaaagatggtgctatgctttcctcttcttttactgctgctggttctatggggaccagtgtgtccacttcatgcttggcctaagcgtctcaccaaggctcactggtttgaaattcagcatatacagccaagtcctctccaatgcaacagggcaatgagtggcatcaacaattatacccagcactgtaagcatcaaaatacctttctgcatgactctttccagaatgtggctgctgtctgtgatttgctcagcattgtctgcaaaaatcgtcagcacaactgccaccagagctcaaagcctgtcaacatgactgactgcagactcacttcaggaaagtatccccagtgccgctatagtgctgctgcccagtacaaattcttcattgttgcctgtgacccccctcagaagagcgatcccccctacaagttggttcctgtacacttagatagtcttctctaaggcatccactgcatttcctttcatttgacatagcttctgttacaattgcatccacgttttcttttcttttgttgattttcttgttcccgtagaagaaagaagaaaggtgtttggagaattcgagtgcctaggatgccagaccagagttgagacaaaaagaaataagattattttctgctttgtagttctgtacttttcgagagaagggaatagggaagacagcaaagaaagattcagatttctaaccctgcaacttttgccaagctttattgccctgtgttcacagcaataaaaccacttcctgctgc

SEQ ID NO: 267990 - DNA, 725 bp, Homo Sapiens
  misc_feature (658)..(658): n is a, c, g, or t
gagctactgggcctgtttcatgttttttatatccataggttcgcaactcttatacttttcctttgtggcacccatcataaatcgcagtcatttgtactgccatgatctgtgtactctcccacaccagcctagagacttctgcttattttctgccgcatcctcagttcccagctctgtaggtgttcacaagcatgaattcaacactgtggcgaaagaactgaagctcacgtagtccacaacttcccccagtgtggggtgtgtgccaccagtgctacacaaagtgttaggtggtgtgcaaacattttgtattttaatagttatacacttgttttaatgtgaattagaaaaaatataagaaagacaacaaaggtgttatagatactaataattaggacaagttgaaaggtttaaaaaaatacgttactaagtaaatgatggtatagagatcatttaagcatggcaaatgtaataaaaatgacacacacacaacagtttaagtaaaactgactcagtggcaaagaaaaaagatagaagcctatagacagttcctcacacagcagcgaaatgagacactgcaactaggagtcctgctttcgttccttggtatgtaccaacttgctggatttctctggggactctgtaatttcccacggcttgnaaatataatagttaccgctcttacttacagagttatcaagagctttagatttatcatacttaaggaa

SEQ ID NO: 267991 - DNA, 608 bp, Homo Sapiens
  misc_feature (240)..(258): n is a, c, g, or t
ggccgcttaattaaaaaggaaacaacaaaaaacactgctcccttctgatcaaaattattccatttatgcttaattagctttaatccacgtctacatatttaatgatggggatatgacaattcaacccatttgcatattttaaatgccttttctaaactatactttgtaacagatttagaagaacagtctctttctcatgccaatatgccacagcataaatcaggaggatacaaatgaggnnnnnnnnnnnnnnnnnnncaaggcctctcagagccagggatgtgctcaggggggtggagtaatttacccaggggtgggggcaatttacccgccacatcacaaactacaatcctttcagcccaccagaccgagaagcattacatcacactctcacaatgatagggggaggaggctctgagaaagcaagttttcagctttctttcctccctgctctcaggcttccagaatcctgcattaggagtaatggaatttaacttcaggcactgcacagcttcaggggttactaacaatcacatagactgctacttatacatgtgaccctaaatgaacacttcgcagtggatacatggccgaaacaggcaaccacc

SEQ ID NO: 267992 - DNA, 434 bp, Homo Sapiens
cttcagccactttaaccagaaatcggcgatatctagacaccgcttctctgaggacactttgacaacgtgacaaaagacattgccagtctaatgatgggggtggggtggaggagacaaaagtacagattcagatttgcatactgaaatccttaattgcacacaactcggcccgctttattagagttcgggcggaagtgcgacaccgagtcctccaaggctaactggagggttaaattatacggttactaatccgccgtgcttgtcaagggcctaaagggactctgcccctttctgctgcagtgccatctgctggctgcagcctgcttggttacccagagggaaaactgccaaagcatcctctggaagctggcctggaaagacaagccaaagtctagtgcaggacagatgccttgagaaaatatacatacatggag

SEQ ID NO: 267993 - DNA, 773 bp, Homo Sapiens
  misc_feature (56)..(56): n is a, c, g, or t
aatatttgctcaataagatagtaaatcgtctaccatttagccatctaaattgtctncaattccaacctatgcttatcatcatttctcaagataaagctgtggtaaaacataattccccctcatcatcatccatgaatgggataagtgttttttctcatcctcccttcagattacaaaaacccttgctctctaaacattttttctattgctttctttaatttctctattaatttttaggatgtaatacatgcagaaggtaatattttacaatagagcacagtgtaaagtttacatgactttcaatcctgtgtgggtcttagtcctgtctataaagaatcagaatacatatgcagctgtatttgggtctctccaattatttgttattctatagctaagtgtcttcccttgatgcaaattattctgctttttaagagatcacagttttgtttcataatccccactgaatgaaatttttttcctttgcaggataaatttattttaaaacaaaaccaaggcaaaacaaaaattgatgttacggttaatggtttaaggggtaaagattctcaattccagttctgctatcaaatcagaggcaagccaacaagcccctgagaaggggagagccctgttaagcaggacactgtcctaaaaccacggaactgcatcatcacggtaatgccctatggtggacactttgttctagcatgtgtagtgggtcactgctttttaaaggtaaattccaccccccctcagaaaacgtgtcatgtgaccat

SEQ ID NO: 267994 - DNA, 661 bp, Homo Sapiens
aaatgaaccacaaaatgcccatatatatttcctcggatctctgttgcctgagtcctatctcctgcctctcagattgtttcagcatcatatttaagatagttctatttcttgaaatcaaaatgtttaaaatcccatttcctgcttgctctatttcttgatttttatattttaaaacattttgagggtaacacttaggttcaaaatatttaaaagcatatgaattatcacaaaagcctggtaatttataatttaattatatgtttccacatttcatccttactttatcagtaaaggatacaccttagtcacttttgcaggcaacgtggatttactgtaatctgtctacatttattcacccaattccccttgtaaacaatggcatgaagctcggcagctgattaaggcagtcaaagggtagagcaagacctacaggctttgcaggaactgaacctatcagcctgaaaataattagtatttcattctctctggcacagcctttgacctggtacatctataggcaaacctgtaattcagtgatctgggtttcagaagaaattacttgtgagcttttacttgagtcatgaaagacattatgttgtaaactgatgttttccctgaaacatctttttgcactatgtttgtatgtgtatgtatgtgtatg

SEQ ID NO: 267995 - DNA, 499 bp, Homo Sapiens
  misc_feature (58)..(168): n is a, c, g, or t
tgtctcagcctccctagtagctgggattataggcgccccccaccacgcccaagtaacnnnnnnnnnnnnnnnnnnnnnnnnnnnnnnnnnnnnnnnnnnnnnnnnnnnnnnnnnnnnnnnnnnnnnnnnnnnnnnnnnnnnnnnnnnnnnnnnnnnnnnnnnnnnnnnggcatgagccaccactcccggcctgctttttgtttttgaagacaggacttagggtctcctcctcccgaactctaaacctgcgtgtgtggctgtgcaccgctcgtttgtagcgtcacctcaggtctggggaagtctgtgctggcatctcctcattgtgccttcatcagagctggtgccttcgggccagaaagactctcgttctttctagatggtgggatcaggggcctttgctgtgtttcccttggtggatttttgtgttttgtaagttgtctattttgataatgtattatttttataactgtaaaaaaagtaaatagcatattttaaagtg

SEQ ID NO: 267996 - DNA, 628 bp, Homo Sapiens
gaaaaaaaatattagattactaataagctattgaaactgggggagatagcaatataaaaatacccactcatggaagacactgcttaaaatagagaactagcctctgttcatagtctggtttcaaagcccaaagttacgtttccttttgttagattgctagatgatatggctctggactttaattctccatgtttaaaatagcatttctgtatttaaaatagcatttcaatagcacttttaaaacttctaaaatcatttctgtaatactcttttttcagtgagaaatagaacaatgcttcttccctctctattttagagatagcaaagcgctaaagagatgaatttgtgttagaacatctatatattaattcagaatatcctaataagcaaaaggatattgctaacaatttgtatgcagcaaggcataagttttggagtcttctcaatttagctattccacttatgctagttcacccactcccttccctgtgacgggttcccctagtgatgaatggggcatgtagattatcagatgagtggacaggaaggaagacagtctagagtggaagataaagataaccaacccatgatggaaccaactcagaaatcaaccccaccaagagaaaac

SEQ ID NO: 267997 - DNA, 420 bp, Homo Sapiens
  misc_feature (328)..(328): n is a, c, g, or t
  misc_feature (367)..(367): n is a, c, g, or t
  misc_feature (382)..(382): n is a, c, g, or t
  misc_feature (399)..(399): n is a, c, g, or t
  misc_feature (405)..(405): n is a, c, g, or t
catccactccgctgtcgggggcctgtacgctgccgtgtacccctccacccagttcggcagcctcacgggactgcagtctctgatcagcgcgctcttcgcccttctgcagcagccgctgtttctggccatgatgggtcctctccagggagaccctctgtgggtgaacgtggggctgctccttctcagcctgctgggcttctgcctcccgctctacctgatctgctaccggcgccagttggagcggcagctgcagcagaggcaggaggatgacaaactcttcctcaaaatcaacggcttcgtccaaccagggagggcctttcgtgtagtnggcttgccggcttcggaactgcggtgttcctggcctgtngctttcagttgactngacccctgttccttggncccttncagagttaacccaag

SEQ ID NO: 267998 - DNA, 761 bp, Homo Sapiens
  misc_feature (14)..(14): n is a, c, g, or t
ctggaagaattaanggctactcaccctgaaaactgctcttctctctctgaagacagcacacactcaccagtccccgctcacaccgcaacacccggtgaggaagcgccctccaactctccctttcgtgctcggccccggggggcagtcagttgagccccgcaggccagcccgctgcgtcctgcctgtctggcaccgagcgatgttctgaccacccctcgccagggcaggcccagccttccctctctcctcccagtccccacccacaatggcttcccctggatgctccctgcctgggctccaccccagggcctcatcgcggccatcccctgccacctgggattgtcccctcccagcctcccctcttagggcccttcccaccattcgagccactggatgcctctggggctcccctgtctgtcccctcactcctctagaacacatacccctcgcagaccgatgctgctgtactggcccctgaactggacacagaggccctgaggttcaggccaccttcttcccctgcagctctggggcaagcactggcgtctatccaaccaccagctgtaaccttccctcagcccgtggggctaggagtccaggcttcagccaaagaaatcgcaaccaagagttggaccccctttttgatgttcgactgctggaggtgtttgagacgacccactcccctcccgcccacatcccagtgaggtgatgagggccctggggaaaggtcaaaccctgcaagcctcagcccctgctcaccc

SEQ ID NO: 267999 - DNA, 763 bp, Homo Sapiens
  misc_feature (270)..(270): n is a, c, g, or t
  misc_feature (531)..(578): n is a, c, g, or t
  misc_feature (705)..(705): n is a, c, g, or t
tccatgttgcagcatgtataagagtttctttcctttttaaggttgagtaatattccgttgtatgtatataccacattttctttgtccattaattggttgatggacacttgagttgctcccactttttcggctgttgtgaataatgctgctgtaaacatgggtgtacaagtatctgtttgagtccttgctttctgatcttctgggtatacccagaaatgaaattgctggatcatatggtaattctatgtttacttttattccccccagcangtgtacaagtgttccagtttctccacatctttgctaacacttgttattttcccgttaaattttaaaaaggaatagccattctaatggctggtgaagtggggatttctatataattttaaatgatttagatatgtctttggattttttcttaattgagcacctcttgttcagaaatgacacttttcaattctcccagatttcttatgactcagaatctgtattccttaagttgttctagatgtgctttattctcccaggaannnnnnnnnnnnnnnnnnnnnnnnnnnnnnnnnnnnnnnnnnnnnnnnttccaatgctgtgtgctgatgtgaatgattcttcaattaaacacatgggggctgcgaaacttatcattttgggaaatatttcaatatgatcatattgttggagtaggattcagaagacttggggagnttattaaccaattttatgacattagcaaatcaatctacttctctgaagtctcagtttc

SEQ ID NO: 268000 - DNA, 311 bp, Homo Sapiens
tgagccaccatgcccggccaacaattttcaactcgtgtcaaccttgtgtcatctaaaccctgtataccttctcagctcccatcaggcactgaattattatgatgcagatctgtgatatgtcattttattcataatgttttaatatcaaacatacattcaaaaccttttttcccaacaaagtctaatccatatctctgacatccttccaatcaagaaaaggatcttacaagaaaatgccttaactacaggttgcctaccccagataaacacctactgcctgattgattgattgagacagagttttccgctct

SEQ ID NO: 268001 - DNA, 709 bp, Homo Sapiens
  misc_feature (31)..(31): n is a, c, g, or t
  misc_feature (493)..(502): n is a, c, g, or t
  misc_feature (525)..(664): n is a, c, g, or t
ccggcctactataagaattctaccccaaagnaggcaccttatattacctggtaagttacccattcaatccatttcttccttatgtttagaaacagggataggaacaagaaaacatacaccgtattttcatctatttattgttacaagtatgatgtgccaggtactagatgttatcccacaaataattttaaaaatctggaaaagtattatttctactttgaagtggagacagctagctaaaaatagcaaagctgcaatacaaacacaggctaagtgactcttatgtccatgcacttaactactgcttcagaaatgacaagacagaggccaccaattaagccatagctttattaacagtgggaaaagataggcattagaattatcagaagagataaactgaattaccagaatgagtcaccagaaaagagagtaatgtctcagtattcagcaaccacaaagtttctgttttccgcaaagtaggtatatactttannnnnnnnnngagatggagtctcgctctgccannnnnnnnnnnnnnnnnnnnnnnnnnnnnnnnnnnnnnnnnnnnnnnnnnnnnnnnnnnnnnnnnnnnnnnnnnnnnnnnnnnnnnnnnnnnnnnnnnnnnnnnnnnnnnnnnnnnnnnnnnnnnnnnnnnnnnnnnnnnaaatatactctaattactcaaggtaacctaagcacatctccgttc

SEQ ID NO: 268002 - DNA, 327 bp, Homo Sapiens
  misc_feature (38)..(38): n is a, c, g, or t
actggagatatttctgaacaccagaacctttggttcanggaattgccaactcaactccttaggtatgcacagactgggatccaagcaggttctaccttctctttcagtcttcctgtctacctgcagcttccaatataataccttctacaagcacatggatgatctgccaatatataatgtaaaaattattttaaaatgtactcctcacacttagtttcccggtctgcgaaatgatgtcagtcctcagatgtgaatatatatacatacaagtacacacatcatgggactgtgggtgcaaacagtcaaaccttcagccaaggccggaca

SEQ ID NO: 268003 - DNA, 776 bp, Homo Sapiens
  misc_feature (237)..(237): n is a, c, g, or t
  misc_feature (397)..(397): n is a, c, g, or t
  misc_feature (525)..(550): n is a, c, g, or t
  misc_feature (635)..(635): n is a, c, g, or t
  misc_feature (723)..(723): n is a, c, g, or t
atgccacttgccttgtaaggctattgtaaaattaaacagcaagtgtacaagcagtcagcacagccctagtacataggtgttgcacaaatgctatcattcaatagaataatttgtaaataccttgcgcctccttcaaagttagttctcacacaagcatctcatttttaaagtgtttacatagtatatattgtaagaatgtattgtgatttatgaaacatagcctttttaaattttgtntacttttctgtcatttaaaaataaaagcaacaaataacaggatagcttcctactatgtatcaccatatttccctcccaaaggactgtactaatttgctgctctgtcagtttagactttatcacttaaatatttggtgaggggtgatagtgggtttaaaantaaaagttgtttttgttttagttaacattttattattattcaccagccattaaggaacacattaattactatttattctttcttgttgaatctgtgcaattttctgagaagtaggtaaacccgccccnnnnnnnnnnnnnnnnnnnnnnnnnnagatgcaatttgtgtggtgctagaaattgagaaattatggtaatttcttattattcctggtcagggatccctggcatatcaaaantgtctgcaatctatagccactattttcaagtctatagggtccctgggagaaatatttatattaaatatttgcactgacaaacggacancaaaaggactctacattttattcttaactaggacttggccaccaaactccagg

SEQ ID NO: 268004 - DNA, 814 bp, Homo Sapiens
  misc_feature (29)..(29): n is a, c, g, or t
  misc_feature (34)..(34): n is a, c, g, or t
  misc_feature (707)..(753): n is a, c, g, or t
ccccaacacccctgcaagaggcctaaacnggggnaccccaatcaagcctccccaactaacccgacctgggcctgcctccctcctagcgccctaagtacctcacccgtccccctttcctccatgggagatggtgtggtaattggataatccacaatacaaactctgaaacaagtaaacggacaataaaactcatatttgccctaaaatgagtttcgataaggatctcggtggctatcttgttagatcttagaaagctgaggcttattgagaaagcccttttccttcgggaaaaggaatttttgtatggttgggaaaaggttggtcactggctgatctataaagtccttttcattgtaagattatatgattttcggtaaactgtatattttttaaaaacagtccagaatatccgcaagtgttttaccacgtgcttcttattgttggagaagctgagcaaacatcctgtcataaaaagacaaggatgttgcatcatccctgggtccctgtagtgagtgtcctgaagataataagtaagaggttaccagaggctagccaacatggagtagccaggaaagagccagcacctgctctgagacaatggtctggttgccatcctgcccataacaacatcaattaaaaaattattaaaacctagttccacagtattattaggcactgtggaagaaacagggaaatatactgtgctnnnnnnnnnnnnnnnnnnnnnnnnnnnnnnnnnnnnnnnnnnnnnnncccaagaattagttaaccattgagtgttcacccatgtggtactgaaccaagtgaaacagga

SEQ ID NO: 268005 - DNA, 776 bp, Homo Sapiens
  misc_feature (126)..(154): n is a, c, g, or t
  misc_feature (185)..(247): n is a, c, g, or t
  misc_feature (257)..(309): n is a, c, g, or t
  misc_feature (384)..(615): n is a, c, g, or t
  misc_feature (649)..(649): n is a, c, g, or t
agaatttcagtatttggtcattgctactctatagacatgaagttgatttttgtgtattgatcttgtatcctgcaacttggctaaattcacttattttaatagcttttaggggagattccattggannnnnnnnnnnnnnnnnnnnnnnnnnnnngagatggagtcctgctttctcacccagactnnnnnnnnnnnnnnnnnnnnnnnnnnnnnnnnnnnnnnnnnnnnnnnnnnnnnnnnnnnnnnncgtggaaacnnnnnnnnnnnnnnnnnnnnnnnnnnnnnnnnnnnnnnnnnnnnnnnnnnnnnctctttttagcttttatagcttttgttgtgtctaaggaatctttgcctaacccgagttcacaaagattttcttgnnnnnnnnnnnnnnnnnnnnnnnnnnnnnnnnnnnnnnnnnnnnnnnnnnnnnnnnnnnnnnnnnnnnnnnnnnnnnnnnnnnnnnnnnnnnnnnnnnnnnnnnnnnnnnnnnnnnnnnnnnnnnnnnnnnnnnnnnnnnnnnnnnnnnnnnnnnnnnnnnnnnnnnnnnnnnnnnnnnnnnnnnnnnnnnnnnnnnnnnnnnnnnnnnnnnnnnnnnnnnnnnnnnnnnnngatatgtttaccttatctttatgcctgtaccacnctgttttactataacttgaagtgaggcagttttagtcctctagctatattcgttttcaaagttgttttaggtaatctaggttctttgcatttccaaataaattctagaattagcttctcaatttctt

SEQ ID NO: 268006 - DNA, 742 bp, Homo Sapiens
  misc_feature (130)..(478): n is a, c, g, or t
atcctaggaactgtcctgcaaagtctcttgtgggaaaaacccacattctatagagaattccctttcccctttgttttccttccttcctttccagatccaggagataatcaattaagagccaggcactctnnnnnnnnnnnnnnnnnnnnnnnnnnnnnnnnnnnnnnnnnnnnnnnnnnnnnnnnnnnnnnnnnnnnnnnnnnnnnnnnnnnnnnnnnnnnnnnnnnnnnnnnnnnnnnnnnnnnnnnnnnnnnnnnnnnnnnnnnnnnnnnnnnnnnnnnnnnnnnnnnnnnnnnnnnnnnnnnnnnnnnnnnnnnnnnnnnnnnnnnnnnnnnnnnnnnnnnnnnnnnnnnnnnnnnnnnnnnnnnnnnnnnnnnnnnnnnnnnnnnnnnnnnnnnnnnnnnnnnnnnnnnnnnnnnnnnnnnnnnnnnnnnnnnnnnnnnnnnnnnnnnnnnnnnnnnnnnnnnnnnnnnnnnnnccatggtcactcatatttggctcagaataaatctcttgaaatattttatagaatttaactcttcatcaacagactcatggtatttaaccaaaacttttaataaaaatgtgaccttttaaaaatcagtgattatatctaaaaattcaaatttcttactattcttaaaaaaacaatatgacactgttaccaactgggaataggggaaagtagcagggattgcatagagaccctctccttgtggccttcccaacactgaggcagaac

SEQ ID NO: 268007 - DNA, 367 bp, Homo Sapiens
  misc_feature (167)..(228): n is a, c, g, or t
ggcacgaggaaatttaacaaagttaaagggattaagtcattaagtttacagcttcggaagaggtcggtttaaactagacgaccttgaagacctttcccaatcatataagcgtatctttaagtacctgggttttgtttttgttttgagacaggtgagacagggtctcnnnnnnnnnnnnnnnnnnnnnnnnnnnnnnnnnnnnnnnnnnnnnnnnnnnnnnnnnnnnnntggctcaggtgatcctcctgcttcaaccccctcttcccccaccaccactacagtagctcggactacaggtgtgcaccattacacccgactaattttttgtatttttagtagagaccagattttgccacattgcccaggg

SEQ ID NO: 268008 - DNA, 746 bp, Homo Sapiens
  misc_feature (73)..(113): n is a, c, g, or t
  misc_feature (717)..(717): n is a, c, g, or t
actatgaaaagataaattgccatctctatgcataaagggtttgccatttaataaaagagactatatatttgcnnnnnnnnnnnnnnnnnnnnnnnnnnnnnnnnnnnnnnnnngtttacattaaagaataaaaggtataagagggataagaaaaattgagacagagggaagacaggtcagtttgagattaacgaatatccccaaagaaggtattatctgagattggccttgaaggatagttgtgattcaggaacacagaacttgcagaatgagaaggttgttacagaccaaaggaacagcctgagaggcgtgagtatgcaggaaaatgagggccatgcctgaaagtactggtggtgttgaagatggagccaggcaagttggtcacagagggagaggaccttgaatgtctaacattgtggacagaggctcaaaggctcaaattccctatttttaccttgagttcaatccttgtggcaatgaaacctcagtgaagctttatttaaggctaaaagtgtcttttaaaaatccctcttatataatatcctttgcatgttactcttgttgtaattaggagaaagcaataggatctaaagttttttttcacagcatggttttggtttctttaattctaaggagctcacctggtgttacgttggaaaaaacagcttttatatctcatttatattccatatgccagtctgcagtgacatatctatnctgaggtttacagtgttagccctcgtgcc

SEQ ID NO: 268009 - DNA, 496 bp, Homo Sapiens
ctttggggcctcttaagatggaaactaatccaaggccgactaagttctgggcccgttaggtggaggggattgcgtgagggctttgtgtttggcctaaatgaagcgcttttctctgatgccgaaagggcttcccaggcaaaaatctgtatcagtattctattaggacagaccacaaagtcgttaagatgattttgtggacatcgcatttccacgggattgtgaaggagaaattggcgggcaaccatttacggcgccgttatttcctttgttttgaggcgttctaatacttagaaccacagcgtgtgttggctacagttttctttcccttaagtttccacctcttaaaggtgttcagtgagggttgattgaattgcgggaacaagacagttctagggtttaaacagcatacgtagctggtctgtggggctctgggtattggattcggaaagcattgaatgatgcgaacatacgaggcttgctagaattaagaggaatc

SEQ ID NO: 268010 - DNA, 699 bp, Homo Sapiens
tgttacaatattaaaccaaatagaaggttagattaaaacagctgcatgatcttaaccacagaagaaaaacctatggggaaaggctggaaagaaatgcaccatagcattagtgatggtgagatagattttgccttcctctttagtgcccgtgaggccaggaggaaccacactcctctgctcaatacttccatcacgcaggtgccattattaggccttttactgaaaaggaaaacgaagtactccccggtcactacccactgcccagcatatagtggaggctcactgatatttgtcaaataaacatctgcatccctttggattagaggtggagctccaagacagcctgggaaggtgggctaagaagatccctggactgagaccaggtagaggtgggttcaaatcccagctccccactttctgtgactgtggacaagtcacgtccccctttgggtctcaacactgggggtaacattgccacctcctgggtggacgcaagggtccagtgaggctgaatgcaagcaatcccacaacgtgctgcgcccatagtaggtgctcagaagtggttactcctcccccactggcccctcccctggatttgaaaacaagtcgggcgggcctccggccctttctgagagttccaccagcacctcaggtccagctgacaaagcaaggtcacctgctgtccatcacttaaatagc

SEQ ID NO: 268011 - DNA, 678 bp, Homo Sapiens
ggcacgagtaacatcatagttgctggaaatagcaatattaattgaagcttacaaggggctgcccaaaaaacttaaaagcaaaatcccatagggggtatagaaaagctctaaaatattcctagagagtcacatgcatgagaagagctgtgcacatgcccaggaaagacctgagaaggtcctaatctctcacctctggctgatcttgaggctctgtgtaagcagagtgtgaaagctaaggcaaagtcataaattgcctgttgaagcattcaaatacatgcccccaaactcacacagcccctctggcaaaggttgggaaacttgcaaggaatttaaggaaatctttgttcagtcattagccagccactaaactaactgagcagatccttcagtgatcacacacaacaaagaatacagactttacagacttagtcctagaaaatcactacacaaacagcaacaacaatgcacctgggactaagggagaggagatgagttccagagttggtatattatttaaatgtctagttttcaaaaacaattataagacacagagcaaaactagaaagtatggcccatacccagggaaaaacaagcaaccaatagaagctgtccttgaggaagttaatatcttggacttactagaaaatgactttaacactagttattataaatatgttc

SEQ ID NO: 268012 - DNA, 695 bp, Homo Sapiens
  misc_feature (31)..(31): n is a, c, g, or t
  misc_feature (73)..(73): n is a, c, g, or t
aaaccaaccttagggaaaaaaaaccccgaanccttttgggataagtattgattttacccagagggctagctanctttatgaatatcatttcaatacaaagactaaaccaaactaagcaagaagagtatatatatatattgagctaccagaattagggaggggtgtcttggccaaaattatacacggatgtgacttcctgaaagtctgaaacgtagctagactaccagaactgtcaatttaatattgaatgcttcatacacttaacagaggaagtataacagctacagtcaagttaggtttagtataatattaatctttttaaacatcactctgaagtctgtaagtgacaagatcaagagcctacaaagtgttatatacaatgtcagtgtgctcaatcctcctaaacaagtagattttcgtgccttgtttcagaaccttctttacaactagatatacacatctgataaaagagtacataattttcagagtatattttaactgtaaaatttcttcaagtgcagtatatgccccagttcatcagaatcacccagggttgaagatgcttattaaaaatgcagattctaggctctcactccagaccacttgaagtagaagctcttgggatggtgccctggaaatcgccatttaaaacttgctctccgagttgattctttccccctccctcctacaagata

SEQ ID NO: 268013 - DNA, 398 bp, Homo Sapiens
  misc_feature (28)..(28): n is a, c, g, or t
aactggagaactgccttaaaaaacaaancaaacaaacagcaaacagtgaaatacttaatggtttaaccagtcttcgtttttcctcatcttaaatattaaattcaacttagccatagttctagaaaaatggctagatatctcattcaccaatgaactctcaaatacagtgatgacacatcccatttctctcatttctagttctctacagtaaagtgaaggggccacttgtagaaagacaagcatgcttgagcactcacaaactgatgttcagaatctctgccaagtgagacactcaacagatgtaacctcagtgaaaataactgtggccaacaatctagctaagaggctcctaaaaccaggcattaaaagcagatccatgggcgggggcacggtggctc

SEQ ID NO: 268014 - DNA, 763 bp, Homo Sapiens
  misc_feature (36)..(36): n is a, c, g, or t
  misc_feature (83)..(83): n is a, c, g, or t
  misc_feature (321)..(341): n is a, c, g, or t
cccaagaaataagttgttaagatggaaattccagcncttcaaaagatggaattttagctgtcagaatccatccactgttgaancctttctcttctattgtagtcaatcacctctctttttctggtctgatttgtactctcctttttggcttaagctcacagaagcatgttaacatcctcatcagagtctgataaggctggtatccagcaggatacaatataagagcacacagaccagctggaggaggaattcaggttggctcaaggtggaaagggatggtctgatcagaggagcagacaaggcaaacagaagtatagggcnnnnnnnnnnnnnnnnnnnnnaagaagctgtgcaaggtgactggaaccagtaagggtggacagacaacccagcccctagctaacagggctggcaggaatgaagaaggaaaacaaaccctagccagcctcctggagccagggttatgcactgtttcccagccactcttccccaacccccactccataaggtaagaaacacaaatatacatgatatccaggcagaagggatcctgcccagcagccccctactccggaaattacctggaagctacatcacaaaggccattcccaaactgagcagttcccatagtaaaggcttcagatgttctaccaaagaggcgaactgtctatccacaactatgtgataaagcagtacaaagatgaaacagaaaaagacaattactacagacagaatgaagcatgaagaatagaacagatgtggg

SEQ ID NO: 268015 - DNA, 690 bp, Homo Sapiens
tctggtaaaatctttccccctagagagtagacatttgttatgaaaaaaagctctgagatgtagagagcagggccttcttaaattacacaggccagtcattgagtttactgagaatagagtccacagacttagggtccaggaccagctgtctttttatcttcaaaatggagcacaaagtagctgactcctgcccatcaccacacatacaactcacaggatatgagagatgcagcctagcagagtatcttaaagatcatggactattggggtcatgagttccagttactactggaacttactatcagctctttgatcttggaaacattttttgaccactccaaatatcaattatcccatatttacagtagatttgatgactctcctttaacttgtgacccccactagttatattgggccaaaaagtatgcccctcatagagcctgaattctctaacaccaaatcaaattctcttagtacaaaatgccaggaggaatgatgtgagaaaagggcaaaaatattcccaaatatggaagttttctagttttctttttgttattaattattgatttctgtataggtgtattgagggtcagagaacatgtatataactgcaatccttttgtatttattgtgacatctttatgacctaataattaatttttgtaaaaatgtttcatgcctacatttact

SEQ ID NO: 268016 - DNA, 481 bp, Homo Sapiens
cccaagtgattcatatttccccctgggctagcacaaatgaattattttgtctcagacagtctgtgatgctggagggcccttggccctcaaagagaattcaggcagggccaaggtccataggccccaatgttagatccagctttccagtgggatattcggaaagaaaaatggttaaaaagcagacaagttatattatttgaagcccaaagagtgagtaagtatactttggattaggtctacaagaacttgcacagaaagaaattatctaaaatgtgatttagaagtaaagcatgtgcatatgcgttagcaattgcagtatgttatacaaatgtactaaaatgatgaagagtatattgaaataatatgtgcaagtatcttaaccctggtgcttttatggtgcttgttcctttgcaggtcttaacaaaagtttgctaggtgaacaaatggttgatagcatttgtttacataacaaacgtctgtt

SEQ ID NO: 268017 - DNA, 826 bp, Homo Sapiens
gactgcatagggctcggcgtgggtgaattaatgcatgaaattcaggattgtactatagcatacttcctccagaacatagcaggaacctggaggcagaagggccagtgcactgactgcatcggcctctttccttctgcccctgaagtctacactgaatgacattgggtcgattttcctggtcagacttagtaagagacttgttaggggcaacagcagaggagggcttgatatttggctctttgctgatttggacgacaaacgaggcaaaggggaacacgttcttatcaaaacatttaattatctagactctccctaagacataaattcttccctgcaaatatctctacatgctttaaaaatattcagagtaacaggtttccacttataagttatgaagtttaagaatggttaagtactctctgtagtctgaaaaaaaatagcattgcgtcctaaaggaagctaactttctctagaagaacaattttaacagtgggggaatctgtccccacacttgggccaatgtttatgacaaaccatcaagctcattaaaactcccagagaagaaagcaaagaggatggtacttggtccttgattaaggttttgccattgaatccttcaacctcctaccactgcttctagctgtcagttccagaatttgaaacgcggtggaagaggctagtgggtgtacagaaaaaccttccttgtgaagcagggcagtttcctcacactctgaccacaatcaaataccattaacttacaaaagacacaggctgcaaagctgaagagaaggagaattgtattccccgagacgacctgaaacaggca

SEQ ID NO: 268018 - DNA, 429 bp, Homo Sapiens
  misc_feature (45)..(45): n is a, c, g, or t
  misc_feature (364)..(364): n is a, c, g, or t
  misc_feature (390)..(390): n is a, c, g, or t
  misc_feature (397)..(397): n is a, c, g, or t
  misc_feature (410)..(410): n is a, c, g, or t
gactgcatagggctcggcgtgggtgaattaatgcatgaaattcanggattgtactatagcatacttcctccagaacatagcaggaacctggaggcagaagggccagtgcactgactgcatcggcctctttccttctgcccctgaagtctacactgaatgacattgggtcgattttcctggtcagacttagtaagagacttgttaggggcaacagcagaggagggcttgatatttggctctttgctgatttggagacaaagaggcaaaggggaacagttcttattcaaaacatttaattatctaggacttctcctaaggacataaattcttcctggcaaatattctcttacatggcttttaaaantttccgggttaaccggtttccccttnttagttntggagttttaggntgggttaagtaccctctgt

SEQ ID NO: 268019 - DNA, 453 bp, Homo Sapiens
gcatgttcccattggaaagtggcagctacacattgaattcacatgaaccagaggcactggagatcactagacaggtgagacaggaggggcacctgggctgaaaaaccacctgttgggtaccatgcttactgtttgagtgatgaggtcattgggacagcaagcctcagccttccaaaatctaccccatgtaacaaacctgtatgtgtaccctttaatctataataaaggttaaaattaaagattcgtaagtaaaataaaatgacatagagccctccaaaaaatggggttaactgagtggaacgagagaactttgcactatgaacgctaacccagatcaaaaactaaactctagtcatttaaaataatcgtaagttgtatatgatgataattgtataaaagttatacgtgaaagtgccaaaccctaaaattaaacactgtataatgaaattataa

SEQ ID NO: 268020 - DNA, 567 bp, Homo Sapiens
tatgtcttctggcttgtaccccacaacatcttatctaatggagccagtcttggtgctctgtgttcacctggttcatctgaggagctgcatctaccctgcccatgccatagatcctgccctgtttgcttctcctgttgcagctaatcgacatggaaggacagaataacgggctcccagattcacaagccccaccaagaggatcaccccaggaatgcttggaggctgaggagttcactgaggctactgcatcttgagactcaggatgaagacccagcttggggctgtcaaaggttttttgcatgtctgacacccatgactccacctggaccttatggctccacccagaagcaattcagcccaacaggaggacagcttcaacccattacgatttcatctctgccccaaccactcagcagcaagcacctgttacctgtccacccccaccccttcccccaaactgcctttgaaaaatccctaacctatgagctttgaataagatgagtacgaacttcaatcgcccatgtggcgtggccggcctcgtgtctattaaattctttttctactacg

SEQ ID NO: 268021 - DNA, 445 bp, Homo Sapiens
  misc_feature (391)..(391): n is a, c, g, or t
ggcacgaggttaaataaaaatgctttgccacagctgacctatgtcttctggcttgtaccccacaacatcttatctaatggagccagtcttggtgctctgtgttcacctggttcatctgaggagctgcatctaccctgcccatgccatagatcctgccctgtttgcttctcctgttgctgctagtggacatgagaaggacagaataacgggctcccagattcacaagccccaccaagaggatcaccccaggaatgcttggaggctgaggagttcactgaggctactgcattcttgagactcaggatgaagacccagcttggggctgtcaaaaggtttttttgcatgtcttgacacccatggacttccacctggagaccttaatggcttccancccagaaggcaatttcaagccccaacagggaggacagtttcaacccctttaggg

SEQ ID NO: 268022 - DNA, 531 bp, Homo Sapiens
  misc_feature (28)..(28): n is a, c, g, or t
  misc_feature (44)..(44): n is a, c, g, or t
  misc_feature (52)..(52): n is a, c, g, or t
  misc_feature (84)..(84): n is a, c, g, or t
gggccaaaaccaagggccctgccagccngccaaggaggaaaccngaatttangagaccagatgcccacagctccggaaagggancggcctgacccctgccgcctggaaaaggggccatcccccggaagtgctggcacctaaggacactgttggttgcctatttgcaagtggccataaggatgaaggatgatagccagcccctatagtgatataagggacccatcatgaatggcatttccaagaaagaaagcaggaaggaatgaggaaccagagttctctgtttttatcaatcccacaactgtgaaatttatgaagaaagtttactctcaactgacaagcattcacatatggtaagaggcacaaggggtcgaatggtacctctgtgactaacagtgtaggagcctgggagatatcactttaaatgtcaagtatgggaaagaagaaagaataattgcaaggattagtccacaaaagtgcttgagtttagagaaactgtattcttctcctttaagataattaaaacgaccaagt

SEQ ID NO: 268023 - DNA, 724 bp, Homo Sapiens
  misc_feature (320)..(320): n is a, c, g, or t
tgaggttgatctataagagctaaatcaagtgggctctgatgtcctctggcttgaggcttggttggagaccagagggagaaaagagagtgaggctggagtatttatttccttggctccttcagcaaaaagtcactgttcttttaaaggcgaataactgtgtctgactttttgtctcctgttgggttatagcaactctcccctcacatgttttattccttttgttttctctgcctctgttcttttgtatataggcttcctaaaaatctcctgggaattttcctattttgcatggcatgctctgttgtaaggttgagatcccngatggagtaaattttattaggctacattctttttttgtctcccggacccaaaacagtgagaggtggatatgaagcctcattttattgatgagggaactgaagctttggagtttgccgtaggtcagtcacccagctgatgagtagccaaagggaattcaagttctctctctcattcaaaagtacttgctcttcccaaaaacgtattctttcaatctaaattatttggccaggtgtttttccctgaagcatactttataattttattttcttcaaggttgtatctagagaagcttctgatctagtatgtcccatgcagcactaagaaacttagttttaactttgagccattaggtctcagtttccttatctgtagactgaaatcatgtgttctcttcctcctgacg

SEQ ID NO: 268024 - DNA, 694 bp, Homo Sapiens
  misc_feature (352)..(361): n is a, c, g, or t
acacaaaccgggggtgtaggaacacatttgccttctgtggaaaacctcgcacaatattcatttaagttattccacccatggcaatgtaatctcgccccttcttcaagcctgtgattaaaacaaaacaaagagtaccagatgacagaaaccctttagtggctcaactaatcagaacacaagtcaccaattactggcagataataacttttatgttccatctcctcacttggcagctcctgcagcattctaaatctgagctctctccaactgggcccagatactatcctttcactcctcatctttcacactcgcagttctctgaaaacaaggaggggttaaaagaaaggaaggnnnnnnnnnnccgtgctgaaggctgcttgggcacagatagcaacactaattgctcccattctctagctcctcgtgaggcagattgcaggggcctgcatctccggagaaagctctcctatcttcgcagcagctctcagcagagcaactcaagtgcccttaattgtttatgttcttaatgcagaggctcttgaatgcattcatttttaatagcgggcttgagtgtggggcccatcaaagaatgacaaagcaagctctattcattggttctccttcctgcaatgatggtcttttgatttatttgcaaatgacaagcttgccaggccccacttgagggctgccctca

SEQ ID NO: 268025 - DNA, 527 bp, Homo Sapiens
  misc_feature (105)..(105): n is a, c, g, or t
caagtccgtttcatccctgtaaagcaaatgtcttttcacgcagaaagtgccatatagacgagataaaggcagctaaaacgagggcagtagagagcacttacccgnaccccaaggtgcccagagaatgccctgaggatggtggttaaggaaacaggagcaggaaatgtacacacagattcctgtccctttgccaactactccttccccatcaaagaaaaacacttgcacacagtaactaccagctccttctctcaaacttgtatttctcctggaaatgtatctcagaaatgacctcctctcccaaccacttcaacgattctttctttgggtttggggttcttgcagttctatcatctaaaataacctttggactgcaggtaaaatgcaattaggacaactaaccaagtagacgaaacaagttcccctaggcaggggtgtccaatattttagcttccctggaccgcattggaagaattttcttgggccacatgtaaaacacactaacactaaccatagttgatgagctt

SEQ ID NO: 268026 - DNA, 1003 bp, Homo Sapiens
gcgctttctgaaaggtgtaactttatttaaaactgtgctgctgtgaattctatcatgccacagacacctctgaatcaacagtctctgttggcaaattgttatgctgacaaattctcacaaagactgaaaatttccattttgtaaacaaataagtgggttcctaatgatctagcttaccacctagaactttgaaaagtggaaccctggcttgagtgaccctgaataatctatttctcacattagcaaagcagattcaattatttatcacccaaatcatagagccactgtatgaatgtaatattaagtcttgatactcttcttcaagctagggaagcaagaacagcacatcactgactttcactgggtggagtccctaaaatagtaagagtggcatgatgtgctaatgtggtcttcttcatgacactaggggctctatttcacttctatccataacagaacaaatttatttcatggaagaatgatccacaggtttcctgaccaggatatttgatgtacacacatgggaatgcacctgcaggcaaatacaggttgggtgatgggcactctttctgctgggtcacagtcaatcacagggactctagttttgtgccttttgatcactacctccagcacctacgaggaatgaacttggacatgtgacatagcccacgaaagctgggggaaaaatcatcagccatcacagtgaagggaagtaggtgaggtacatgtgcataccatagacttcggagcaagcaaagtgcacatatgttacaaaaggtaatgaatgcacataacaaaagatatacaggaacagtagtgtccaagaagggatgtcagacttggagataggaggtgctgggcccagaccctcgatgtagtgcgattaaatgagatgcctattaaaagcctaacagcaggtcaagaatatgggaaatcctcatatatcagtattattaagaagtaattttctttccactcatttaataaaattacaatttgggca

SEQ ID NO: 268027 - DNA, 568 bp, Homo Sapiens
aaagatcagtgacatcacagacaacaccaatttcaacgggatgagctaggaaaggcttacagcttctcggagacacagcttcttcagttcctccagcctctgacgcagggtttcctccagagcttcctgcctggacttcaaggcagccagcatgtccttcttggccgactgcgagctatctgattcctgagaacctgtcgataaacagtggggttacttggccagctgacaggggacacacatctggaccactaatgaatttaactggagcccatgctgcggagatgggatttaccccaggaatcaagggagtgtgaaataaaacaggtgctcagcactctaactgtgagaagcacattccagcactgcatggaatttatagccagtcacaagaaatggcaggaagatggaccctcctgaaaaagaagtttatctttctcaattatcttaagaaatgtcacatacctttttaaattttactagcaaattctaatagactttacacaagaaagggggaaagaaaagctcatgtcagcaattttaatacgtattgagttatttatctttg

SEQ ID NO: 268028 - DNA, 787 bp, Homo Sapiens
  misc_feature (766)..(766): n is a, c, g, or t
tttagctcttgtgaataatgctgctgtgaacatgggtatatctgagttcctgctttcaattccttggacatatacctaggagtgaaattgctaggtcatacggtattgctatatttaactttatgaggaactgccaaactgtttcccacagcagctgcaccattttgcattcctaccggcatgtatgagggttccagtttctccacatcctccctgggcacttgttatcatgtctctataattatagctaccctagtgggatgtgaagcagtatttcattgtagttctaatttggcatatttttgatgggctaatgcatatttctttcctggataatttgtttttgggtaaggaaataagccgctttttcctacgttcttccacactcctgtatggaaacaagtagggggagagccaacttgctagacattgactctaaatgtgccagaggttgtcatcccagcatgtagattgtctgcccctatttctcctccctctgcatgactccctggatcacctgccaacaggggaggcaaacacctcagatatcactaatgttttccaagcctaataccgtacctaggaaagtgagaaaatttaaatgaaaggtaaaatacagtttaaggcagtagtgaaatgaatttttctacgctctctttagataccatgagaatcagtttatgcctatgctagccataaagttcttaggatatgagagcctggcattacatgctacagcaggagaggtcagagcagccggtgaggntagggcttgggccgtgggtct

SEQ ID NO: 268029 - DNA, 465 bp, Homo Sapiens
  misc_feature (12)..(12): n is a, c, g, or t
  misc_feature (47)..(47): n is a, c, g, or t
gtagattggccngccccctatttcctccctcccctctgccatggacnccccgggatcaccctgcccaaacaggggagggcaaaacacccctcagatatccacctaatgttttccccaagccctaatacccgtaccctaggaaagtgagaaaatttaaatgaaaggtaaaatacagtttaaggcagtagtgaaatgaatttttcctacgctctctttagatacccatgagaatcagtttatgcctatgctagccataaagttcttaggatatgagagcctggattacatgctacagcaggagaggtcagagcagccggtgaggttagggcttgggcgtgggtctccatcttctcccacagcttattgaggtctcctttttataaaacataccatagttaacttcatgattagagcagaatgaaaaaaaacattcatctagtgcatggttcacggaggattaaccaa

SEQ ID NO: 268030 - DNA, 554 bp, Homo Sapiens
  misc_feature (218)..(256): n is a, c, g, or t
ctaatacacattagtttcatttacatttcgctggtcaagattagtgttcacatgatcttgcttcactagagcaagagactgaaatccttttacaaggtgagtcactgaatatttatgagttatacagtttagatacacacactgatgtgtgcagacattagaaaaatcatagtcatatataggggcattcaatagcttgaagaaagtaaaccaagacnnnnnnnnnnnnnnnnnnnnnnnnnnnnnnnnnnnnnnntccagaatagctgactcctgctatcagtggaattaaatggcttctccctggagctactttttctccttctaacacccagggtctaactgcccggggcccttcaggtagcattggactgaacagtcttctccccagattagacagaagcaggactcttctgagactgctggctctttgatccttctctgacatagcactgtcagcttacagatgtgtccctttgcctatatcataatattttacatcatcctctcaagaacccaaagcttcaggctgggcatggtggctcatgcctatc

SEQ ID NO: 268031 - DNA, 562 bp, Homo Sapiens
  misc_feature (389)..(490): n is a, c, g, or t
  misc_feature (499)..(499): n is a, c, g, or t
acagactagaaggtaccagaaaccagccaggagggaccgaatgcaatggtccttcagagaacagatacagtttctgaccaatgagctatatcccttgacagtgaagtgaattatgcctttcgtggattccaaagtcccacatttctctgaagtgggtttcatgtgccacaaaaagacattggtggcctgtataggaaaggaagtggctcttcaagcaccatatgtggtgagttgagggcagagctgtggagagcgctgggtcagagggttgtacaaagagtgaatcaacctggaagcatgtgatggggatcatgaggactcaggaaacaagactcctggactacagccaagaagaagttagaagtaaagcctatgcggtggctgacacnnnnnnnnnnnnnnnnnnnnnnnnnnnnnnnnnnnnnnnnnnnnnnnnnnnnnnnnnnnnnnnnnnnnnnnnnnnnnnnnnnnnnnnnnnnnnnnnnnnnnnttagctgantgtggtgatgcacacgtatggtcccagctacttgggaggctgaagagggaggatcacctgtga

SEQ ID NO: 268032 - DNA, 412 bp, Homo Sapiens
taagttgaactgagtcatcttcttaggcatcagttccagtgattattagtactgacaactttgctgattccatttttaagatgattaagctagattttgaggcccagaagtaatacagcttgtccacattttcacttgatggagccaaagactgtgtagtatgagctcatgtatgcacacagctactgttaggcagaagccctgtgcatgaaattccagaaaaatcttcattatcatagtaactgccaaaaatctgtaacaactatatgattctgctttagcaatatccaaaatctaggtgttaacatggaaaatgtccagaggaaccatgggagaacatgtttgtgctaaaaatgaaaggaggaacacacagataacttctaattagcatgcagtgggtcttcgtggccac

SEQ ID NO: 268033 - DNA, 1023 bp, Homo Sapiens
agaaaataaccgcagattgggctcagggacctgctaggcccactgagacagacctgagctaaaactccattgatcacttgacttcataagcccctactctgactgctggaccacagcgaagtttgggtcccctagaattagtgttagttcagaagccagtgtctagtaatccccaaaaaatcattgtttccccttctgcaaggcaaatagccataggtccctttggggaagggtaggagaaagataaacaggaaagtctcctcaagaggacacagcttccctttcattaaggagattctgggtctgtaaactagctcatttctgggaattgcttaaggggccatgactctcttcaggtgattcaaattatacttctgtttaccagacctagaattcttctgcttatacagatcaagtaagagttagtagactgcccatctatttcttttttagggacaccatgatcaaccacccaatgctataggtctcagcaagtcagactattctgattactgctttggctccactatttattatggtaactatgcccaccttggatttggcatggtgctgctacttgggccctgccaccccgggattcctttatccccattgcatttagggatcccagttgatggtagcagttcccactgtaatttctgacctacaaagagaagcaaccacagagcaaagatgctgggcctcacctcacaaattgatttcctcacagtggtggtgaagggtgcgtcctcctaacccttcccagggtgacctgtcagttctttgctccttttttcttcttcctgctttcttttggattaataattttttattggccgagccaccgcacctggccggttttcaattgataatattttcctgtggtgtcagaaccttaaaagagtatgcatttattttgtatactccccatttttgctattgttgttatacattttactgctacatacattataaattcttgtatatattggtatatttgttttagataattatctcttaagg

SEQ ID NO: 268034 - DNA, 832 bp, Homo Sapiens
  misc_feature (325)..(665): n is a, c, g, or t
  misc_feature (683)..(683): n is a, c, g, or t
  misc_feature (714)..(714): n is a, c, g, or t
  misc_feature (744)..(745): n is a, c, g, or t
  misc_feature (767)..(767): n is a, c, g, or t
  misc_feature (773)..(773): n is a, c, g, or t
  misc_feature (806)..(806): n is a, c, g, or t
  misc_feature (811)..(811): n is a, c, g, or t
agaactcaaaagttaaatatttcaccatgcttctgtatgattttaacatgttaaatgtggctaatttgtcactgttggacttcaggtgacctaatattcaaaaagttaattaggtcactaagggtaaattagaatttgatttggaaagtttgtcaaatatcaaaggattgaaacagtgttacaaaatagaatcaccaatcacgattaaatgaattactcattaagtcaaaaatgatattttaaatatttctaaaaagcaaaaatctttattctttgatatagagaaaggagatacagtttcttaaacaataaggtctaatatcannnnnnnnnnnnnnnnnnnnnnnnnnnnnnnnnnnnnnnnnnnnnnnnnnnnnnnnnnnnnnnnnnnnnnnnnnnnnnnnnnnnnnnnnnnnnnnnnnnnnnnnnnnnnnnnnnnnnnnnnnnnnnnnnnnnnnnnnnnnnnnnnnnnnnnnnnnnnnnnnnnnnnnnnnnnnnnnnnnnnnnnnnnnnnnnnnnnnnnnnnnnnnnnnnnnnnnnnnnnnnnnnnnnnnnnnnnnnnnnnnnnnnnnnnnnnnnnnnnnnnnnnnnnnnnnnnnnnnnnnnnnnnnnnnnnnnnnnnnnnnnnnnnnnnnnnnnnnnnnnnnnnnnnnnnnnnnnnnnnntatagtatgaaaccaagngaaccttactcccctcctctttttttgcagntggcccaaaaggcaaacaaaaatcttttannctctcttaatattaaacaagancctggntcaaaaaagaaaaccaactttacctttgctggnatggnattaatactaaagcaatttta

SEQ ID NO: 268035 - DNA, 721 bp, Homo Sapiens
  misc_feature (284)..(284): n is a, c, g, or t
actcattagaaaatcacaaaggtatacacctcaacctttccatgaggttcatttaatttatagtatcaaacagcaatgatgcagataaagaatctttaaaattattggcttactggatttacctagcaagaaaaattctatattacttattttagtacatctcatgtacataaagcaccagtttaaatgagagtatcaaatatctccagcatctttttgcttagcctagaagttcatttcttatcactttccatggcacactcttaaagccaaggaagataaanctagaatggttataaatatgaatggagaaatccagttccttccctatcatatttacatgtctaaagtaaaacacagatgagtggcaaaaaggtctgactgcattctctggaaacctgccaaccccaagagtagttaattggctactagaggattaacacacagggctgagcaggtcaaaaccagggctctgtcaggtaagggccagtttttactactgagcaactcacaaacaccactggtaaagcaaagaggtctgagtgtgcatatagctcagggaaccctgagtttacccttagttaccactaaaaactaacaaatgagactccactgaggcttaacttcatatacaaaaatcaacacctttgcctctttgacagtggtaattattagcatgcccttcttaggtataaaagggataatggtcctgtgccgaaat

SEQ ID NO: 268036 - DNA, 766 bp, Homo Sapiens
  misc_feature (442)..(455): n is a, c, g, or t
  misc_feature (521)..(536): n is a, c, g, or t
catcaaaggagaaccccaggttctagaggagtctgcagatgcccatcagagaccaggaccaagtagtcagggaacctgacaagtgtctgctctatggctagaagcttctgaactgggtcaccaccgactgtgctaccacactcctacttactgcatgatgcaaatgagccacgtttccattcacagaattcagctcaactccacaacatgtgcacacaattaggaatgatgccttcttttcttaaacataaatgattgtctcctgtaccctagtgagttttcacagaaatcattagcatttcggcaaaagacatacacagttttccatttgccctgcccacaggcaaggatgttgcttaacgttacacatttgataagtgcttaggaaagtgctaatattattaccctggtaattagtatctataattccaaggactttttnnnnnnnnnnnnnncacacatactattctctcaggttctttcagttttctttaatactagtctctgacattataaaaccnnnnnnnnnnnnnnnngccctttgagaatttctaaatacaaattgagttaaaagattgttccaaaatctgctgcttcatcaaaaggcattaaaacatttcttatgtcaggaaaggatcctactagtcttttaattgctattgtctgggattaacagataaggagaaaccagacaggaaatggctaacatatggaaatatttgcacataccaaaataccactacttttctttgtatgtgaacggtcc

SEQ ID NO: 268037 - DNA, 286 bp, Homo Sapiens
ataagattattagtataaaagggaagacaggcaggtgcttattctgggccagaatgagtgaaccaaggtgcgagaatgggcggccacacgtgagggctttggtactgttggaaacatctataaagttctagtgaagagtcccagagcacaggaccctgacctcaggagagaaccgaatcagggtttgtatacctgcctgcatgctctccctcccctcaccttacacctcctgcccccctccccaaaatgtataaaggaccaattgtattgcaaacaaagaccatgt

SEQ ID NO: 268038 - DNA, 617 bp, Homo Sapiens
  misc_feature (481)..(481): n is a, c, g, or t
  misc_feature (490)..(490): n is a, c, g, or t
  misc_feature (501)..(501): n is a, c, g, or t
  misc_feature (523)..(523): n is a, c, g, or t
aaactcagacaataggcaaagtccagataggaaaaagccaacattaatgcaggtggttttccaaaaccaatgttctgtggttgggaagcgggggccattgctagagcctctcttacccccagccccgtgtgctcatcagcccttggagagcgtaaaaactgccctttcacacgccaccaacccagtccttcccagtcttcatttccctaactgctccctgctccgtgaaaatctccattccggataacgttatgtcctccttccgcccacatcagggctatttgtatttacacagctgtttactcgcttattctcggctctccaccttgtggtgcacactccacggaggcagggaccttgtcaagcttgtgctctgttctcaaacgcccggaggagtaacggctctgtaactatttgttgaatgaaagaaataacctatgagaattcctatcatcatctgcatttcatagactttttcagnaaacgaggnctcagagaagnaagcacatctcccagggtcacncagcctggaagtgaaggagcagagatttaaacgcaggtattcgtgactaagcccacactcttattaaccatgacacacagtcactccaggtgtg

SEQ ID NO: 268039 - DNA, 793 bp, Homo Sapiens
ctggagggtagtacagaactcaggaaagtttagattttctcattatctcattaagattgaaattctacactcttctcctgtgaatattttcctattacttattctacatttttatgtgatgggattggaatataaaccaatagctgccatcaatagctatgacatggtatctttttttatagttgcttttatttatgcatattgtgttgctcggttagttgaggaacccactttgtatcccaccttcctgagtaaaaaaaatgatttcacatggttgggagtaagaaccttctttttcctccttcatgctttcatgtggtgtgacatccactagttcaagagtttaaaactcttagtcgcagggaggtggtgtggctggggaggtgagtgaaccgagtgtgtatgtgtctgccctgttctaatagagagttcatgctgtcgggtttggctgccagctatgtggcacgtgctactctgaaggcctgcttcagtcgggagaggagagtgatggtcagagcttcctatgattaaatggctaagagtcataacaaggttcagtattaggatgcgtattgtcatgtgcataagccacatcttccattatagtcttcactgattttctgaaaattgatattttgctctgcatttactggatttctctatatttacttttcaattgattacaaactcatgtgagggaaaagggatgttataatgacttattaaaacatagaaggggagaatgggataagcttaatgagacatataatgggataagcttaagattctccaa

SEQ ID NO: 268040 - DNA, 185 bp, Homo Sapiens
ggggaagggggggaccagttaagccaagttagaaaaggctgaagacagagagatccactgccacttgcccgagatctaacagccaagagaacacacacatttctactgctaggttttggtgtcctgggagagaaattaattacaaagttgtactatttgggggaaatgcaagtcaaggagtaaac

SEQ ID NO: 268041 - DNA, 791 bp, Homo Sapiens
  misc_feature (42)..(42): n is a, c, g, or t
  misc_feature (66)..(66): n is a, c, g, or t
  misc_feature (152)..(152): n is a, c, g, or t
gaaaaattaaattatgtcccaaatattgttactgaaattagncatttaaaaaaataatccctatanctaaagttttcccttgaagaatttaatggtttcctggacaaaaggacaattttgttctacctgtcccttgatacaatgaaagttancttttcctaattatcctaagcaagactagtctagggattcacccaaatgcaatgtgataaattaacacaatgcttccagactgagctgcagagctgaacatcggcttgaacatgaaaacagcagaagatgccatacacacgggttttatccaaagtaatgaatgtagtgtttaactggaacttagtaagactctatgagttcctagtcacccatctgaagtcaaagctacaatcataatactgcaaacctctgaagaaaagtgtaatagaagtaaaagaagatctatgaagggaattcacagatatatacttacagatcctcggagaaataaaattggaagcccaattccaaatttttcgcctaagatgtccacagcagacaaaagcttaaatgcttgtggaccaaagtcccaggatgtatcctctgagtcatccatggaatagcaatgatccaatctaaataaaaataataacatttgaagaaagcttagcaaaggcatgtatctttagaaatcaaaagatttagcataacaattagccaagtaaaaaatatctcaaatgtgccaactgcttcagaagctatgaataaagttcattatacccgagtatgtaaagtagctaaaatatgctgtgccgaat

SEQ ID NO: 268042 - DNA, 534 bp, Homo Sapiens
  misc_feature (37)..(37): n is a, c, g, or t
aagactagtacttctccctgtttaaaatagcttcaanctgcaatttctctataggaaacttgtacttacaaaacttacagaagttcttgttagctattattaagtataataataaaagaagcatttcagttacaagacataaaaacaaacaccttctaaggataagatgcttaggtgttattgtaccttcagatttaaacaatgactaagtacttcaaaataaggtgagaaattctgtacttacatgtttaaaacaggtaaccggagctgctataaagctattgctattgatgtagttaccccagctgaaaaccttccatggagactgctaaaatgaaaacaaatttagatgtattataattctcaaatcttttatttataagaaggttatcattgttaaaatgtgtgaaaggacataaaattaatttatcccatttaaagaacgttttctttatgtaaagatcaaataacttctctaaatagcatgagctttggcttatatcatatttgcaaacaaacaggagtttctttatg

SEQ ID NO: 268043 - DNA, 701 bp, Homo Sapiens
  misc_feature (24)..(24): n is a, c, g, or t
ggagcaccaggtgtggtcaggagncagcagcagaagcaggggaaagcccaggccagagcctgtattaggcttccttgggagaggcaaggcagggcagagtcagcagtttaggaatggcaaatctgagtaaaaatcagcaggctttggggtatggggagctctctagttggctcgtacctggccctgcgatgatttaaagcaggggaaatgttggcgtggtatgtgagagtttgataaaggggagtgggtggtttgcattttagaggcctgctcccaagttgtttactattttgagaaattagctagccctgggagggcagtctctccttggccagcaagatttttaagaagtcaagacatcataagatactgaaaatgaaaacataataaacactgatccaaaagagaaagcttccaacatcccattcaggttttttgtttattttgttttagatatcctttatcctaaaaaggttcttttctattcctcagttttcaacagtgtttttccctaattatgaacagatgttggattttatcaaatatttttccctgaatcaattgattatatgactttcctcatatctagcaatatgaatactcaatttattgaacttttaacgttaaccaatatttttatttctgagaataaacccaacttggtcatgatgtactcatttttatatatcgttagatttggt

SEQ ID NO: 268044 - DNA, 388 bp, Homo Sapiens
  misc_feature (51)..(122): n is a, c, g, or t
  misc_feature (136)..(242): n is a, c, g, or t
cctaaagaaaattttgacagtaagcagatgttaacttttgagtccaacagnnnnnnnnnnnnnnnnnnnnnnnnnnnnnnnnnnnnnnnnnnnnnnnnnnnnnnnnnnnnnnnnnnnnnnnnatagacagagtctnnnnnnnnnnnnnnnnnnnnnnnnnnnnnnnnnnnnnnnnnnnnnnnnnnnnnnnnnnnnnnnnnnnnnnnnnnnnnnnnnnnnnnnnnnnnnnnnnnnnnnnnnnnattacaggcatgagccaccatgcctcttaggcctggtttattttgaaaagtatcattgctactgtgtgtgagcagccctaacttcaccgaagacagaagaaccaacaaaaagaagtataaatttttatttacttaattaagcggcc

SEQ ID NO: 268045 - DNA, 329 bp, Homo Sapiens
  misc_feature (289)..(289): n is a, c, g, or t
  misc_feature (299)..(299): n is a, c, g, or t
aggagtattccagcaaggcagcagcagtgaaaaacgaggaagaaaggacaggcttcagggctattcctcaactgaggcaactctttcgaaacataagagacaatgagtgagaaaactgatacagtggaagagagcgctaattctgtggtcagaagcttgggttccaggtaagaataagtcactcaggtagggagggtgggcctgggtcacagacacaaagaccacagggtgctcatgaagatataaaagatcaataagctttaaaaactattattaattgaaagtattnttatacacanaattatccagttctagtcaagccaaaaatt

SEQ ID NO: 268046 - DNA, 577 bp, Homo Sapiens
atcttgagttgtataaagatatttgagcaggtgtcttttacaaaacagcagaattctttattgaagctataaaataaggaaaagtgcataaatttatagttcaacaaactgtaaagataattcttgtaaaaaattttattccactaaaattactcatgattttcctttccaaagataaacactattaccatcttgatttatagtcctctagtctttttaagcatagatttatgcacaaatctagatgaaggattgcatataaacatatggcattcatagcaccgccactcaagtcaaggatatgggtattccttactaattgcagtcccctacctcggtctattattctgacatgtgtggtttgaaataatgctttttaaactctttttcatcataaaatagatcagccttaaacatttggaaaatatggcagttctttttatggaaaactcttgcataattaaaaatgattttaacggagaatttaatgataaagaaaaatgcttatgataaaatgtaggaggaaacaggttatataaatgtataatgatatctcagctatataaaaatttaatag

SEQ ID NO: 268047 - DNA, 143 bp, Homo Sapiens
gtgtgagccaccgcgcctggccaattcttgataacaccataaatttaagttccttttcactttttcccacaagataaattacagctttacaacattttctcagagcccaaccatgactagattctacaaaattaatttcactt

SEQ ID NO: 268048 - DNA, 606 bp, Homo Sapiens
  misc_feature (125)..(125): n is a, c, g, or t
  misc_feature (143)..(144): n is a, c, g, or t
  misc_feature (357)..(413): n is a, c, g, or t
tggtgtagaagcccagcacagcgcgaagacctcaggatgaggccttctctctggatacccatggggatcattaggtggctggaaaaggggagaagggctgtgggtttgtgtaacatttcagaccnccttgaacacaggctcgnncctggtaaccctgcagaacagggtgatactcatacccaatcagggaagatagtaagataatgaggccccagcaagaagacttgcttgatcttaggtactccttgggaacttttgtctttaggcattttaaaaaatctgattacacattttctatcatttcaccactcagaaataagcatgcttaactttctggtgtattcctttcttcgctgnnnnnnnnnnnnnnnnnnnnnnnnnnnnnnnnnnnnnnnnnnnnnnnnnnnnnnnnnataaaaatcattttgtacatgtggtttttaatttttttcacttaacatattaagaacatttttatggtattattctttcatagcattagttttagtggctatgatttcattttgtggttgtaccagtttatctagataattccttgttgatggacatttccatttttttcacccttataaaaagctgtaattc

SEQ ID NO: 268049 - DNA, 715 bp, Homo Sapiens
ccgggggtgaaggctgggggctgctgctccctgaagtcactctgatcgctggccctgccagtttttcggaggagcaggaaacacacaagtgcagccaccagaagactcccaaccaggaccccgatcaggatgcctagagtgttgtcatattttacagtcagcttgagggggtcgctcctgttggagctgactgggttggagacctcacactgatactccccagcgtcctcctgcctgatggggtctatggtgagcacatggttaaaccaggacagcttcatcctcttcgtgacctgcagacgctggttgttgaaaatccactggaaagaggttccagtgttatttgtgtggcaggtcaggaccacggagcccttctctgtgactgtggtgctgctggcttggatggagggctgagccactgactctgtggatagagtgaccaacagaaagtgtcttggggccatgctgcatcctcagagatctcagagtcaaatttagaacattccccgtatacacggagatggtgagatgcctgttcaatctgagaatttctgtatgtgacttgtaggttgtagtatcccgtgtcctctagggtgacgttctggaaatgcagatctccactgggtgatattgtctctcgaccgctgtatgcaggccctggagtcctaacgtgagtgtctattacatatgctgcgattagctggttgggctccac

SEQ ID NO: 268050 - DNA, 599 bp, Homo Sapiens
tacagactgtcttgttctcctgagggtctgcattcaggaagaggctgcctaacgctaaacaactgggttgtttgtttgccataggcccagggaagaataggaggtggagaaagtctaatcgaacccaggatagaatcctgtgtgagagagaaatttgctactctttcagttgaaatttgaactctgaatcccaagagaaggcaccagtaggtcatttaatacttcttgttgaggcttgcaaaagacactgcatttctaacaaagcgtttgcccatccaaaagagagatcctgatttggcatataaaactactgcctcttctggttatctttcatcacttgcctgagtttaaaaaggtaataaatggtttgtgttctaagggaaagagggctcttcccaagacctgaggctttctcattcctaccagctgggcccattgctaaaatgctttccagtgggcttgcttctgcctggccagcacctgggctgccccagcttgtaattagcctgcctttgcttcataagcttcccagggtgtggttcttcttctaaaagcttgtatgaattgctgtactgtctctttatagtttaaaaatgaat

SEQ ID NO: 268051 - DNA, 706 bp, Homo Sapiens
  misc_feature (32)..(32): n is a, c, g, or t
ccacatcttcctactaattttcatgttaaaancactttaggaaagacagaattacttttaggtataaaatgttctgaatttgcaaattctatagtgcttatgagaatttatattggcttttatattgtttgataaggttgtctgtgccccccagacttccatcttcagttgccacaaaggcaaattctctgtgaattgttcgtaacgtgaggttggtgtcaacatgctgcaatcagaggccttctaggattcatcttaccatttgaatttactgctctagtttggaattttcctgtcattatcgagtttaaaccaatacatgtgttggtctggtttccatggtctgagaacagtattctgtgctctttggaatcagatctcgtgataaatcatatagctcaatttcatcacatatgttttccaaagatttctaatctccttgtaaagtcttcaatactgagcagcagctctagctagcacctatgagctgcattaggaaaaggctcagataataaaaagatagtataagggtttaggaaaagcatcaatggcagaaataaagtgtaggaatcttaaatttaggcaactacttaagtccagaaaatatttccttccagtacaaaaggttaaggctctttgaagaaaatgttatcttcaacaatggaaacatacgattgaaattctggtccccaagtttttaagaaaa

SEQ ID NO: 268052 - DNA, 847 bp, Homo Sapiens
  misc_feature (210)..(210): n is a, c, g, or t
  misc_feature (750)..(750): n is a, c, g, or t
  misc_feature (837)..(837): n is a, c, g, or t
aaaagccaatcgaaggtttgaatggaggagtgacatgatttgagcctgctttttaactggatcagtctggctctcctaatggtaataggccaaaagaaggcgagacaaaacaggacacaatttaggagatagcggtaatcaggcaagggaagatgggtgacagcttgggtgtctagggtgcaagcagtggaagtgatgaggaagtggctnggactctggctatattgtgtacattgtggaggaaaagacctcaggagttgcttttacctgtgtgctataggatgtaagagagaaaggagtcaagggtggtttcatggtttttggcctggagaacaggaaaatgaggaaaactgatagctgtaggtttgtagagaaagaatcaagttcagtttcatatgctttaaacttgaggtgcctgttaaaatatccagatggaaatatgttcattttaatgtcattcttgtaccaactagatgattctgtgatttacaagaaaaaggaaagagatacattttgaaatacaattaaaataaccagtcccttcagcttatgactcttgaacatatgtagtaatattccttcagattgtctctagagtttctatcttaaaatttcttttttctgtcacaactcttagtctatttctgggattctcttgtgcttcatgagactttgaggaaattgaaaataaatgtttcctctgcagaaaaagctgggatccttggctaatttcataattattattattgnataagcacattttattcccatgtcaaatttttaattttcacattaacaattttaaaaatacttttatttaaaggatttctaatttgntctttaaaag

SEQ ID NO: 268053 - DNA, 469 bp, Homo Sapiens
  misc_feature (17)..(17): n is a, c, g, or t
  misc_feature (37)..(37): n is a, c, g, or t
  misc_feature (56)..(56): n is a, c, g, or t
  misc_feature (62)..(62): n is a, c, g, or t
  misc_feature (78)..(78): n is a, c, g, or t
  misc_feature (93)..(93): n is a, c, g, or t
ggctcctatgtggaagnaaacaaacttgagtctcatnatcccttgcaatgcccctnggaggnacagtgggacctcagnaagggaaaacctctngggtgcatctagaaaaatgtagaagccatggtgtcaaacccagtagtcaattcatcttacttggtccatcaacacagtcaatacatacctccttcttgaaacactttcttcatttggttttaaagatatcagtctcatgcttacttctacttcactgtcttctacacctgtgatggacaggtcctatgtcccctcaagtgcccgcatgtcttagcttttctacctgtaattttcactggtactcaggagttcactcagcccatacacaaggtttaacaccaacaggagcaactctcaatcaatggcatatgagattcggtagataaatacttcagcttactcattccttggtgagaatattttgaaataattttta

SEQ ID NO: 268054 - DNA, 748 bp, Homo Sapiens
gttgctaaatctggccgtcctaaactagatggcagactgagaaatgtgactcccctccccagtaccttgttttctgtgtccttgtagccgtggtccttcagcatatctctgtgctgcagacaacacaccttcctgatggaggtgtccggctgttggagaagtctgggggcttggaaatcatctttgatgtttaccaggccgacgctgtggccacattccgaaagaataaccctggcaaaccctatgcccggatgtgcattagtggatttgatgagcctgtcccagacctctgcaagcctcaagcggttgtccttacccagagtggggatgtccctctgaactttgcccctggtggatcatggtgacatctccttctacagcttcagggactttcacgttgcccccaggatgtggggcactgacctcacagctctgcagaggatggagcttgctccgggggaccgggactgtctgttctcagggaccatctcggctgcctcctgtacccagactctaacctgtagcttcagaggccagtctgggccttggccctgggtgtctgatactcacagagtgaaactgtgaccctctcccttccctgctgccttgcagtgacccctctggaactcaggactcgattttaaggacccaggaggtggggcagaagagaggactgtgtgcctttaacgagagggtgcctgcttcgtgctataaagccaaagccattaaaaatagatttcttttctgc

SEQ ID NO: 268055 - DNA, 741 bp, Homo Sapiens
gtggataaatattggtccttgcctttggggaattcagagtaccgaatagctctttaggccattctctcattaagtattttccaaatttcagctctttgcacatcagcttcaaggttttcgtcatatccatgtactacttgtataattatttacatactatttctgcctagataaactaaccttttttatcttagaaaaaactgaatggcttaaagtaacaagtaagacagctgggcaagtctctgcatgtctcccctgggttcactcatgcagctacagtcatctcagatggtcttacacagctggtgcaggctgttggccagcctcaccctccacattgtctctcatcctccaggacactaacccaggcttctacacatggtgggagcagcgttccaggtgatgagatcagcagctgggagacctggtgaggactagactcagatgtcccatagcattagttctgctgccttctgtattcacaagtcacaatgcccaaacatgattcaacgaataaggaaatggacttcacctcttattagaacagaggcaaagtcacaaggcatatggattcaggaagggaaggagttattgtgtcatttttttgatcaacttaccatatctggaaaacactagcacaaagtgggtgtaggaatattaatatcaaagttgaagtcaaggtgaaaagaaactaagaggaaatatttcttagagataaaagaaacactacaagaagaagat

SEQ ID NO: 268056 - DNA, 766 bp, Homo Sapiens
  misc_feature (24)..(24): n is a, c, g, or t
  misc_feature (54)..(54): n is a, c, g, or t
  misc_feature (716)..(716): n is a, c, g, or t
cacaaagcaaaagcaaaacatgcnctgtagcctcattaccccttcccgccaagnacagtgtcacaggaaccatattcatttgcacacctagggcaaaaaccccagtcaaatataagaagtaatgatttgcaagaccatgagcatcaggcaacaaaggacagtgatcctgagctatgagaaatgaaggaggcaagccctgtcattgccccagcttactgtcttgagagtttccagggctgtggtgccagggagggtggcttagatagccgacccagaggagagaattgcagaaagaaagatctccagagatgtgcccaccaccctgggacccagcagcgtactgaccagcccgtgtaagtaaccaagactggaggacaaaaagggggatgctaagatcttacgccggcttcagtctccccctaccccacacccctgaaccactaaatgattcttcgtatctctgccctttccccctcaaaggaagccatttgcaactacgattcagaagaggacattttgcactacacgggcttctccgagccatgtaatcctcaaaattgagaaaatattctaagaggttggcattggagtcgccgcacatggaacttgactttgttgtggttttctctttagtttgaaaaagatccagtaatctggtaagacagcaaagcagggtgaccacttcctggagtgcttctggttttggggttttttgnttgcccttggatggcatgcggagaaggtagtactgcccagggaagtctgg

SEQ ID NO: 268057 - DNA, 462 bp, Homo Sapiens
  misc_feature (178)..(295): n is a, c, g, or t
  misc_feature (385)..(385): n is a, c, g, or t
tgcgaggctgaggtggcatctccccctggaaggccctgtgtgcccctcccggttactgaccatcccccacaagaattaacctctacttcccatctgtaccactgcacacagacacacctgtgaactgtggactcacctcctctgtgcggctttccctcgacattagcctatgagacgnnnnnnnnnnnnnnnnnnnnnnnnnnnnnnnnnnnnnnnnnnnnnnnnnnnnnnnnnnnnnnnnnnnnnnnnnnnnnnnnnnnnnnnnnnnnnnnnnnnnnnnnnnnnnnnnnnnnnnagttggggctagagtaagtcctgctgctgagtgaggggaacactttctaaggtgagtgtgtgtcccccacttctcctgtgcacacagctnagggcagatggctggtgctcagctttggtggacactgccaaactatcttctaaacttggccgggcgcgggggctcat

SEQ ID NO: 268058 - DNA, 575 bp, Homo Sapiens
  misc_feature (411)..(429): n is a, c, g, or t
  misc_feature (482)..(512): n is a, c, g, or t
caaattgactttaaagaaaaaagttgtggcaaaagatgctaagatgcgaaaatttcaccacactgagtcaaaaaggtgaaaaattatccatttcctatgcgttttactcctcagagaatgaaaaaaactgcatcccatcacccaaagttctgtgcaatagaaatttctacagatacaggtataggggctcaaggaggtatgtcggtcagtagtcaaaactatgaaatgatactggtttctccacaggaatatggttccattaggctggggagcaaaaacaatgttttttaaggattgagaatacatacctgacaacgatccgggaaactgctcctcaccactcccgttcatgcctgctgtcgggcgttttgaccttccacgtggacagttcttcacaattcctttcatcannnnnnnnnnnnnnnnnnnactgcctatgggctgtgatgtatatagaagttgtacattaaacataccctcannnnnnnnnnnnnnnnnnnnnnnnnnnnnnnagaacaaagttttagtttctttttcatgatgtggtaactacgaagtgatggtagatttaaata

SEQ ID NO: 268059 - DNA, 748 bp, Homo Sapiens
  misc_feature (39)..(39): n is a, c, g, or t
accagtatgtagttttgggttgagcagacccagaacgancatccataaatgtctagctactgtagattccctatctctggccaacttggaatttctagttcgtagtccatgtttcattagcttctttataaatgaatgtgccttcctagttcctccctctctctgatcccccaaattttaaaaacttcatgacactgccagataatttttttccaactcagatcccagtgagttattaggcagattttactgctaacacatagctctcccagtttaaactacttttcagttgggtttttcaaaaagctagggagctgtagcagttggaactataggatttagcagagtaaagtgcctgtgcctttctgtcggacagaacactctggcaggcagtgaagagatctgggggaacttcccaaactgtgcagccttggatacaccctgcgtccatccacctggcttttatgttgcgaaaacagcatactcttataatctcaaactctttccagagtttgtaataattcctatgattattaaaactcagataaagttcagcaaggcttaatctcattttggtcttaggaaactaaacctcaccacaagacaggggagaatcctgaagatcatttgatggtggcaaaatcattcacttttggagagtgctattgtttgggtaggattttttaagcttaattcacaaagacattttttaaatattaaaattcatgccctttgattgatcaaggag

SEQ ID NO: 268060 - DNA, 783 bp, Homo Sapiens
  misc_feature (12)..(12): n is a, c, g, or t
  misc_feature (21)..(21): n is a, c, g, or t
accctgcccagnaacccaagnaatcggaaagctaatgctcaaaggaaggtttcgaggttgtcttattcaatctccccattcctcaaacttgttcacaaatgagaaaacaggcccagcaagttgatatggtgagtatcttaagaggaactattaatagaattaaatctccagggacctccatggtgggcctcaggagctcagagctccttttcttgcaaccagcctcccgggagcagggcatgcctttgggcacagtggtcctctgcagcctagcccaatgttcctgaatcgaatttctgtgacccacatgggcagtctagctcactcaagttccttgttagggtctgggtgaaagcccccctggtaataaagggttcctctgctctggctggccccctgtgcgtatatttccacacatttcatgtggtggggaagattggctggctagggacaacgctgtggagtttggaatccgatactccagccacagatttcatctaaaagataaatggctacctcttctgctccaactgacttaccacaagatggtgttttcttgtgtcactgtgactttcattttcaccagccttctgaatgttgccccagacccttcccctgctctagacagccatcctcctggagcactcatctagagaaaactaaatgaaactctctatgactgattgccccatttcatttatttgtgtgcagcttccaaagctttacattatccacagcccatttatttccattaaaatagataaaataattaatcaaatatgg

SEQ ID NO: 268061 - DNA, 387 bp, Homo Sapiens
  misc_feature (372)..(372): n is a, c, g, or t
aaaagttaaaccaaaagaatatatgaagggcatataatgaagggatatctacaaagttgtgacagggctaatgggaagaacaggggatatgaggcagcccaagatcagcaacagtagtgatccagtgtcaccctgtgctggttatgaagatttagtctcttctatcttttccaataccgctttgctagccacctccccaaaccctaccaatagaaagcactggaggaagactagagggctggaaggatgtgaaaagatttcccactttgtttgttgacatcctcacagaatgggttcttcaaccgggcagtggccagttggaatccagttaacaggcagttgggctttcagtttgggagatctttccctggntcctaaaattcaggc

SEQ ID NO: 268062 - DNA, 568 bp, Homo Sapiens
tgtacactcaagtctaagaatatatgagtggatcatttaccgccccccgccccacaacatctataaggggcaaaaagtctttttctaataagtattcttctatggtagtacctacagatctgcccttcttcttctaaagggtaagtcataatctgtgtaatactacaatttatgggatgctcactatgccctgtttctcttctaaacaatttacatgtaatgtctcattcctcacaataacccttgtaaagtgggcatgattaccatgatttttatagttgaagaacctaagacacagagaccaaggcccatgagctcatagggctgaggcaggatttggaatcaggccatgtcttctccagagcccacatccatcctttctctatattgcctcccacagatgtgctaaaatttatttaactaatcctttatcctctatttgtgttgtctcccattttttattattacaatattactgtggtgaacatgcttaaaaatacattccttggatatctgacaacgtgtttctgaaaaacagattttcataagtaataataaaaataataat

SEQ ID NO: 268063 - DNA, 461 bp, Homo Sapiens
ggagcatgtcttttctaaataattctcacttatcattccagaaaatataacaaacagtttgtaagaactcatgcaaaaatgtttctctaaggccataaattggtttgctaagttgcattgttttattcaagtaaaaagcccttctagagaacaaggagtctgtaaagaaaaccaatcaccttcaactcttgggcctgtacacctgttaggagctctatcactctgaaagccaaaagatagaatgctcatttgagcatttgcaaaatgttctctatttatatttttaaaaatctgatacatgtaagtttttctggcagattctttttgtatgttacaaaacaaaacatcaaaagctcagagtaagataagaatgccctttttcttagaaaggtcaagcagatacttcttgacatcatgtcctttatacaatggcatattgttcatataaaaggtctcttatc

SEQ ID NO: 268064 - DNA, 227 bp, Homo Sapiens
tagagcagagttttagagagtgggtaagatttctgcaaatattctctcttatctgcaaatctcagatgcaggtaacaattattccagaaagcagagactaggtactaataaaggtagtatagtcaaagcacattcagagattggagccactggacaacaagaaaacaactgacataggaaaatatactacagttgcaaataaggtaaattagggcaaaattatttca

SEQ ID NO: 268065 - DNA, 698 bp, Homo Sapiens
  misc_feature (287)..(382): n is a, c, g, or t
catacattaacaataaacaattttaaatgaaaatttaaaaacacttccatttgctagagaacttaaagtaagaaataggaataaatggaaagaagtgagaaattcatacattgaaatctacaaacattgatcaaaatgattaaaaacatatataaagatataacccatattgatgttttggaaaaattaatactgttaaatgattacataacccaatgtgattttgattcaacacaatacccataaaaatctctatcagtttttgttgaagaaacaaaaaacagacnnnnnnnnnnnnnnnnnnnnnnnnnnnnnnnnnnnnnnnnnnnnnnnnnnnnnnnnnnnnnnnnnnnnnnnnnnnnnnnnnnnnnnnnnnnnnnnngtgtgagccaccgcacctggcctaatcctcttaacataaacactttaatctcaactaatacttgaactcaatgttaagtcaactcaaactgaactcaatgctgatttgaatctaacatcaattgtgcttgatggtttgctatactcattgcatttgaaattattacctcaaaaacgaatttcctgatgtcctgcaaggagtgacctcagactaaagatcttgccacacatatgacttttgtaagatctctgtctagtatggattctctgatgtgtaatgaggcatgaacctgaaataaaggctttgacacaatcat

SEQ ID NO: 268066 - DNA, 712 bp, Homo Sapiens
aaacctgtgaatgtgacccagtttggagagtctttgtagatacaatcaaattaatgatcttgagttgagaccattctggattgccagggtggcttctaaatccatgtccagtgtctttacaggagccagaagagcaaaggacacacacagaggagaaggcgacttgaagatggaggcggaaaacgaaatgatgcatctacaagccaaggaacatcaacgattgccagcagccactggaaggaagcctgaagagaggcacagaacagcttgcagatggaaccaatcctattgacatcttaactggatttctggcctccaaactgttgaagagagtaaaatttcccctccttgaagccacccaagtttgtggtaatttgttacagcagccccgggaaactaatacagatattttacacatgcttcctcccataactgagagaacaagtggagggagaaaaaaagtctgttctaaaccacattttcctaaatgacatttctagaaaatgaaacaaaataactgtacagtcttttcaagtgcatatgtaacattttaccaaaatcatccatattctgggccataaaccatgtctcaaatgattgaattaatgaaagaatgataactagaagatctccaaatatttagaaattaagcaatgcccttctaaatagcctatgggtcaaagaagacatcaaaaggtaaattagaaaactt

SEQ ID NO: 268067 - DNA, 284 bp, Homo Sapiens
  misc_feature (34)..(34): n is a, c, g, or t
  misc_feature (63)..(114): n is a, c, g, or t
  misc_feature (137)..(150): n is a, c, g, or t
tggtacgtgcctgtagtcccagctacttgggagnctgaggtgggaggaatcacctgaacccannnnnnnnnnnnnnnnnnnnnnnnnnnnnnnnnnnnnnnnnnnnnnnnnnnntgacagagtgaggccctgtctcnnnnnnnnnnnnnnttcttaaatccttccacataagtggacacagggctctgccatcccatgaagcagtttattatgtcatccagctaagcactgctgcatgagttttctaagagaaggcagatacctggcctacatccttttgatga

SEQ ID NO: 268068 - DNA, 348 bp, Homo Sapiens
  misc_feature (50)..(50): n is a, c, g, or t
  misc_feature (127)..(127): n is a, c, g, or t
aggtgaaatatcattactttcaatttagatatgaagaaactaagggctcnagagaggctgttaaatttcttaaagtctcttagcaaaataaagggagtggtggatcccagatgagactccacttccnaaatcaaaaacagaccctcaccactgaaattgccccagctctgcctgttccattattgtcctccactttactcctcttctaatgactacagtgtgacaccgggtccaggtttcacggcctctgactatgtcttcccatagctcgctgctaactctctggtatttccatgaaagaccttctaaatcatcccaccacggctcctgctgctccataaaggaaaa

SEQ ID NO: 268069 - DNA, 749 bp, Homo Sapiens
aaggaaactggaatgcacattcttccctgattgagagcccccctccccacttataaccagaaaatggctgtatttctcctagcagagacacaggtgcaatgctgatctttgaaaattaggagtattgtcttgtcccaaaggacaggtggtaccattggctgggaactgaaatggaaaaggcatcttttgctgtctccatcactgctgcagacacaatcatgacgttttctgctgggggtttgtgtggatgcacttggaaacaggcttttcagtacacttagggcagctgcaccccagttgaaagtgtccccaccaacctggacttgctcaaagggtgggacttatctcttcctccccatacaaagcagcagcatttctgcaccatagaatgaaccagctacagagtatagaccagctacagctgtctatttcaagctgtgggaagaggttttttccagaggccctttcagctgtagccacaggatgaatgttttctacgaaacctagttgcattgcagcgtggagataaaggacattgtctatctgaactgcaggttgtgagcccttgaacaggagtagatagggatgtaagttacatccctaggatgaggagctagtgcaacacccttcacacctctaccacttggcagagacctgtgtgcatcccacagtgagctttcccaccacccccttcagggggagggggcttttgctagtcatcaaattgtcaaaacaacaagccagtgtct

SEQ ID NO: 268070 - DNA, 711 bp, Homo Sapiens
ttagaggcttaagacccaggaaatcccaaggattcctggaaatattacattcagagttttagatcaaaggaggcacaacctgcctcccaattctcattcattctctcatatggtggagtccaccactgtctgtccttggcatttatttgcagagctctttggagtcactgtccccaatttggttgtgacctggtgggcattcacagctgataggaaggaaaaaaatgtggtaatcttacccatttcctgctgtaagaattgtgtttggaaaatgacctgcattcttaagtcaagaaaaagtgagaccacaaggtaccagctggaatgggacaccaggactgagggagagtctggcggaactgaaacctgaatagctaggaaggtatgagcgtgttaagggagtgtgtgtcaagggcatagatgaggtgactgagctgagagatgacctaggagaatcagagcaatggtaagaactagcactgaccatccctactcatgctttaacaaataaagcttcaagatgttctaggatattctatctgtgggttagaaaatacatcttcagagtcagagctttagttttttccactattataaggaaatttctgtccatgtgagcttcatgtaatattggtattgacaatgatgatgatgattatagctactgtctaagtccattcaggttgctacataacaaaataatatagactt

SEQ ID NO: 268071 - DNA, 507 bp, Homo Sapiens
  misc_feature (44)..(44): n is a, c, g, or t
  misc_feature (56)..(56): n is a, c, g, or t
  misc_feature (69)..(70): n is a, c, g, or t
  misc_feature (73)..(73): n is a, c, g, or t
  misc_feature (171)..(171): n is a, c, g, or t
  misc_feature (476)..(476): n is a, c, g, or t
cacttgaaattgtacaacctcatggtattggagaagcaccttgncccacattcagnccaggacccacannagnctacacagtcagtcataggtgggccagaaaaatgtctccctcctggcaaagggagatcacagagaaatttgttccttttcatcacagctccaggtggnggaataaagataccacctgaaaacttgaaactggagggtctgccatcactcattcaaggttcaaatttacatatctacatgatctaaaaaaccagaagccaagaaattaacataaagttggcccgggttggtaatgtgccatactgtctggaaaaaacaaatacggatcctctctgtaatgactcacccttagttaagccttttaaaatactcccagattttaagattgtccaatataggctcagagtcaaaaactgtaaaacatatgtgtaagggacagctaaactgacatagactcctaaggncttataggaatgatcagaaacaaattaacat

SEQ ID NO: 268072 - DNA, 696 bp, Homo Sapiens
accttactccctcaaaaccctgggaaggagatggtaaaactaacccagttttcaggcctggatggttcagtgaccagtcaggaaagggaagacttagaacaaggacccgggactaaagtgctccccttttccatctgtctcacctggctgcaatagtccttccctgaggaaagcacctcattctggggacccaggagaggtaagagcacctgccaggcagcctctgcccctcagagcccaaggaagtgacccagagctggctgtggtggggagcgtttgcactctgcagagaggagcagactggtaggggtgctttcaactcaaccttcctaactccctccctcttacctgtgatgctgtaatgagccacttgctatatttctaccagggttgggtgtcctcactccaaacgaatgtctgagagttcttaggggaaatgctacctactcagcagttcttaggggatgtgctgcctaattctgtgagaggcagcacatcatagtcaaaggaacatcgagttttagggtcagaaagatctaggtttgaatcttggcccttcccttgtgacgctgggttgcctcccagagcatccagccctgcacctctaaactgtggttaatattacttatccttgtcaggctgcaataaagatgaacgagtacagtgactagtacaaggcctggcacacacacacac

SEQ ID NO: 268073 - DNA, 481 bp, Homo Sapiens
  misc_feature (432)..(432): n is a, c, g, or t
  misc_feature (447)..(447): n is a, c, g, or t
  misc_feature (454)..(454): n is a, c, g, or t
  misc_feature (470)..(470): n is a, c, g, or t
tcaaatgttacccggcatggatgcagcactttacagagctctctcactctaggactttaccttactccctcaaaaccctgggaaggagatggtaaaactaacccagttttcaggcctggatggttcagtgaccagtcaggaaagggaagacttagaacaaggacccgggactaaagtgctccccttttccatctgtctcacctggctgcaatagtccttccctgaggaaagcacctcattctggggacccaggagaggtaagagcacctgccaggcagcctctgcccctcagagccaaggaagtgacccagagctggctgtggttggggagcgtttgcacttctgcagagaggagcagactagttaggggtgcttttcaacttcaaccttccctaaacttccctcccttctaacctgtgatggttgttaatngagccattttgctantattttnttaccagggtttgggntttccttaatt

SEQ ID NO: 268074 - DNA, 1131 bp, Homo Sapiens
acctatatcccaagaacaaacacaaggaccaacacaaagcctccttattagaaagttggaagggcatccattatcatgaaagtgaggctgtgctccaggcagagggatgaaagccaccagatgcatggatctggattgacatattagatccttggaagacccaacaatgataggtgcatatgcctagaagcacagagatcactcgtacccgtgctctcaaacaggcaagaatgtctgtggctggtgaacaaatgtgatcaactcttaatcatatttcctcaagcatggtaattctggaagaaagcttttcattgaaacctaaaatcatatccacgctggagtctctaataatgaatatatatcccacctcagttcccttgaataagaattcttaccacacacatcaaaggaaggtctgattacccaggcaatctgctgcaatatttttaactttaatgacaaaaatcttgtcagtgtctttacagtgcgacactgtaattcactgctggtctcttcaagctaggcttcagggaacccaagccacaaaacaaaatccttgacatttcagtaatttttttccattaatatctaaacccttggtttccatagtaagagaaaaatcaattaataatagctatcatcccctccctggagagggagggagggggaagctgcttgcagtgcagttacctcttccttacacacataagcttatcctcaccattcatggtgaaatatttccctgtgcgtcagtcagcccctccaagtaccacagaggtaaaaagtcaagcttctgatggacatccacctacagctattcctagataatttccccaaagaaaaatgaaagcaatcaactaaaagagcctacccataaaacataccccaaattcctaaaagtagacttttcataaactataaatcaagtaatgtccttagaccagagtcagaacaggtctataaagtggcttttaaaatgtcagttaattatgtttcttcaaggcagaaacactggatttggtcccagaagaattcacttcaactgctctcctgaaaggaagatacaaaagttactaggaagcaagaagtgattgatagaggcttgattacgtcaaaaagctccttttttgt

SEQ ID NO: 268075 - DNA, 563 bp, Homo Sapiens
  misc_feature (14)..(14): n is a, c, g, or t
aatggagagaaatnctctgttcatggattagaagactcagtattgttaagatgtcacttctccccaaatggacctgcagattcaatgcaattccgaacaaaatctaagcaggattttttagaaatcaagtgaattctaaaacttgcacaagaatcaaagtacagtagccaaaacaattttgcaagagaaaaggactcacactctgattttgagacttaatacaaagcgacagcaatcaggacagtgtggtgaaagaatagacatacagatcactgggacagagcagagtccagaagtagacccatcccccatgatcaggcggtttttaacagaggcatgggggcagttcagcggagaaaggacagcgttttcagtaaatcgtcctgaatggttaggtattctatgcagaacgttggactttgatatatattttgcagattatgcaaaaattaactcaaaatggatgatagaactagacataaaactagtagttctagaagcaaacaggagaaaatctttgtctcagagtcatgtacagattgtttagatacattgccaaaacc

SEQ ID NO: 268076 - DNA, 1028 bp, Homo Sapiens
  misc_feature (185)..(194): n is a, c, g, or t
  misc_feature (738)..(768): n is a, c, g, or t
  misc_feature (817)..(851): n is a, c, g, or t
cgtggtgtatgttgtgctgtttcatgaacacagattgcttctacaactaaaaattagaaacaaattatataacataatctggacataagaacaaagtataacaaaggaacagcccactaaacatgcttctctgcaagaacccacagagtgaaatcaaagagtcagagcccaacttccaaagtagnnnnnnnnnngtcctcttacatggtcctggatatttacatactctattcaaatgtagaggctatatttatagaactgtcccaatatcaggtttctatgaatcaggttcttctagcacatgaatgaagacctcactgccagcagtcttgttttcttctcctaagaggactactactagagacctacctatctgtctgtatcttaaatacctttcatttggccaaaaacttgccatacttcaaaactggaatgctgctggaatttgctatgtatggggtagtcatatgtccaggtggcctgcagggccaccaagccacgtctctggttatcatcatagttgatgagtcatctattaaacgagggggttgggccctattatctttgaggctcctctaacataaatagcctgcgatgtaaagaatcatgatactactccatacctcagggcccttagtcacagtttgttgttgataatcatgataatgatggcaactaatctctctactaaatgtgttattagagaagtcctgagggctgggcactgtgcctcatgcnnnnnnnnnnnnnnnnnnnnnnnnnnnnnnnccagaagttcaagaccagcctaggcaacatggtgagacccccaactctnnnnnnnnnnnnnnnnnnnnnnnnnnnnnnnnnnngaacaggcccccgtgggggagcaagagcttgaacagtctagactggaatgatacataattccccaaattaacagttcattctataactaaagttgaggtgattaggacccaacagtagccaaaggattctgtatctgtggattcaaccaacaatggcttgaaaatatctgaaaaaaa

SEQ ID NO: 268077 - DNA, 607 bp, Homo Sapiens
  misc_feature (76)..(214): n is a, c, g, or t
  misc_feature (216)..(249): n is a, c, g, or t
aagtactgttattttggtgattaaaatccaaaactttagctgtatttcagtaacaaaaacataccttactagactnnnnnnnnnnnnnnnnnnnnnnnnnnnnnnnnnnnnnnnnnnnnnnnnnnnnnnnnnnnnnnnnnnnnnnnnnnnnnnnnnnnnnnnnnnnnnnnnnnnnnnnnnnnnnnnnnnnnnnnnnnnnnnnnnnnnnnnnnnntnnnnnnnnnnnnnnnnnnnnnnnnnnnnnnnnnngtatcttactgactaaactggaatggaaatcttataattagtgttgtatttttctgcaaaatagtgaattggtacttgggagacttctgttctttgttgaaaaaaattgcctttgttttgaaattatatcacctgtgttctgaactaaaatgatgggagttcattttgtatttactttgcagtaagtatcatgtaaatatgcaaatgttgaatgtaatatagattgtgtcctcattgagtttttgggtgatacagtttataaatataacaattatacaccctcatacattcgtctgattttgagcttgtaagatgagaactgctttttacacatttaataaaaaaaggtctctgaatt

SEQ ID NO: 268078 - DNA, 442 bp, Homo Sapiens
gtccgaaaacttttcaacttttgcaggactcttatcagaatcccaattcttgggaaatcctccgctcattatggaagagggttagtgataacagagaatttctacaaaggttgggtcatttttcaaggctgcatacacgatgctagatattatcacttgaaaagtttttacatttcttcacacctcgaagtgcttggcccaacacacactgctggaagttttccacagagctctccatctggccagctcaggcttcagagaggcaaaaagcctctgtaaacccagggaaacttggtacatcccacaagacaatccgaactggctcctggtccggggacttgtgggacgcagtcctgaatcatgccttacagtaacttacactttaccaaaatctttaataaccagtatctcattcccctgcttacaaaagaatagcccagtg

SEQ ID NO: 268079 - DNA, 408 bp, Homo Sapiens
  misc_feature (273)..(273): n is a, c, g, or t
  misc_feature (393)..(393): n is a, c, g, or t
tgttgtgaacatccatgttattggaaaagaacacattttcagtgtattttagatgtttaaattctgacttttggctattaaatggtttacacaataagccaagaccaaatcaataaacattttatgagattctgtgcctctcaggttaacgtgttaaacagtaacatggggcttggtgcagtggcttatgccgataatcccaagtagctgggactacagacaggcatgcaccaccatgccccgggctaatttttgtatttttagtaggagacngggatttcattatattgggccagggctaggtctcgaactcctggaccttgtgatcctcctggcctcggccttccccaaagtgttggggatttacagggcatgtggccaccgtggccccancagggttcatttttt

SEQ ID NO: 268080 - DNA, 887 bp, Homo Sapiens
gacttgtttgcagggaatcagaaagggattacaacatggattttttgactttgagacaattgatgtggatgaatatgaacattatgagcgagttgaaaatggtgacttcaactgtattgttccaggaaaatttttagcatttagtggaccacatcctaaaagcaaaattgagaatggttatcctcttcacgcccctgaagcctactttccttatttcaaaaagcataatgtgactgcagttgtgaggctaaacaaaaagatttatgaggcaaagcgcttcacagacgctggcttcgagcactatgacctcttcttcatagatggcagcacacccagtgacaacatcgtgcgaaggttcctgaacatctgtgagaacaccgaaggggccatcgccgttcactgcaaagctggtcttggaagaacagggacattgatagcctgttatgtaatgaaacactacaggtttacacatgctgaaataattgcttggatttaggaattatgccggccaggctctattataggacccccagcagcacttcctggaagaaaaacaagcatcgttgtgggtccaaggagacattttccgatccaaactgaaaaatcgaccatccagtgaaggaagtattaataaaattctttctggcctagatgatatgtctattggtggaaatctttcaaaaacacaaaacatggaacgatttggagaggtaagttttccctaggagattctatcttcttaaaactgatgttctgcatttgtttctcagttggacctatataacatagcagtgtcttttctctggatgccacgagtaccaagtttttagaagtagagccatccgtctatatagcaagaagcagaggaaagaaaccaattgccctta

SEQ ID NO: 268081 - DNA, 712 bp, Homo Sapiens
  misc_feature (113)..(121): n is a, c, g, or t
ggggttagcgggggtggggagagaacagcaactgcttaatgaagtttctcacacagaggcaaaaagagaaaagccaaaatatattcagtgtatccagcagttccatgctgaannnnnnnnnccttattggttgaggggggtgtgtaggagggtggtgggaaggatctgaaaagaagctgtgattctttgctgaattaatgatgacttctcactgcaaaatgctgatttataatctcttcaccatactagactgtttccagactcagaggggggttaaagtttgttaaatgtattcataattacatgcacagtttcagacgggctgaatataagtaatgcttgtgctgttgcgaatgctcaccattaaaagcagaaattgtttcacatttagcactaaattctgtctgattttgcacacttaacaattcagtaattttaacattcggcttcgtcgcctccattatagctcagtatcttggagaaacagtcagtgttccggcctcgttaattcatgtaaaacaccctatttgtagaagtatcattaaaggctaatttgatgagatatccttatttagcaaagcaaataggatttgacagtcagctccgggtggcgatttagcaaagcacaaacacaattcacaacgtgacaatttcccatccacgcgcctcgctggaattgtggactcctgaaaattgtgctgtttcatcgtgt

SEQ ID NO: 268082 - DNA, 903 bp, Homo Sapiens
taagatcttaaaaataaataaataaataaattcatactacatatcaaaggaggagaaaatagctctgaaaaaccatcaataggtaatgcacagattattatcttctaataaatttcagtgagaaaggaaagaaaggacactcatggatttcaatgccataacattttgaatatattttattttgtgcttcgggaatcatgtgttaaagggattttattttctctaaggcctcataacacagtcaagacttttccaattactttcatttcatctggatcacttacacttaggaaggatttaatgtttcaataataataattgggaaacaaaacatgtcacctaaaatttggatcttcttttttggttctgtgttgactttatatactattctctactccttctctgattatctattactgcataacaaactgcattcaaaatttgagaatttaaaatagtcttgtttacaatcttgtgtgccagaatttgggaaggactcagctgggcagctcatttctgcttctcatggaatgagctggtgtagctctacaggtcctggagaattcacttcccaaggtggctcacttccacggtgcaggctgctgggtaggagccctgctggggctatcgtctggggcggttggttccttttcacgttggcctctcctatggcagccaggtgtctagagcaagtgttccaagcagacaggccagaaaccgtgtgtcctttttgacctatgatctataatatcagaagtctcaaaatatcacttgtactgcattctgttgttcaagcaaggcttacaaaactcagccaacactcagggagaggggaactaaactgtacttctcaatggcagatgcagcaaagactttgcagacatctttaatctatcacaaccg

SEQ ID NO: 268083 - DNA, 554 bp, Homo Sapiens
  misc_feature (18)..(18): n is a, c, g, or t
  misc_feature (51)..(51): n is a, c, g, or t
accccctcctccgaatancccaataactgccataaacaaaaactgcaatcnaaaaattgaagaaatttaaaaaataatcctggtttaacaaaccttgtgtgcccaagaatttggggaaaggacctcaagctgggcaagctcatttcctgccttcctcatggaaatgaagctggtgtaagctcctacaggtctggagaaattcaccttcccaaggtgggctcaccttcccacggtgcaggctgcctggggtaaggaagccctgctggggctatcgtctggggcgttggttccttttcacgttggcctctcctatggcagcccaggtgtctagagcaagtgttcccaagcagacaggccagaaaccgtgtgtcctttttgacctatgatctataatatcagaagtctcaaaatatcacttgtactgcattctgttgttcaagcaaggcttacaaaactcagccaacactcagggagaggggaactaaactgtacttctcaatggcagatgcagcaaagactttgcagacatctttaatctatcacaaccgcaaaac

SEQ ID NO: 268084 - DNA, 479 bp, Homo Sapiens
  misc_feature (311)..(358): n is a, c, g, or t
gcggttgtgatagattaaagatgtctgcaaagtctttgctgcatctgccattgagaagtacagtttagttcccctctccctgagtgttggctgagttttgtaagccttgcttgaacaacagaatgcagtacaagtgatattttgagacttctgatattatagatcataggtcaaaaaggacacacggtttctggcctgtctgcttggaacacttgctctagacacctggctgccataggagaggccaacgtgaaaaggaaccaacgccccagacgatagccccagcaggctccctacccagcagcctgcannnnnnnnnnnnnnnnnnnnnnnnnnnnnnnnnnnnnnnnnnnnnnnntacaccagctcattccatgagaagcagaaatgagctgcccagctggagtccttcccaaattctgggcacacaagattgtaaacaagactattttaaattctcaaattttgaatgcagtttg

SEQ ID NO: 268085 - DNA, 785 bp, Homo Sapiens
  misc_feature (39)..(39): n is a, c, g, or t
ttgtctgggatacctgaaattaagccaggataggaatgncagggaaaaggtgatctctgttacattaatggtacgtagcattagaataagtcatccagtattgatggttcatacatattaaaataaatgcatattaatattttacagttaagaatgtcttcaattggttccaaaaaacaagagctcccctatgtagaaaagacaattactatgcatgatttaccgtatcaaatacatggctcttttgcaaagcatcataccaacctgaaaaagaagagtatgtattcttcaaataaacacaagataagccaattaatcttgaataagtagtaacaactttattttaactcaatgtgttgaaatgcaaaaaatattttcagcaacaagatacatgtattatgtatcttatcattaacatcagctaattaaaaacgaggctgaaaagttcaatataagtttttatacacttgaatcttgaaaatcaatttccccaagaactaatttttaaataatttttgcagaatttcattttcaaaaatgagactcaggtaagttacatcttcattttttaaaactgaatgcaaaatttactgggttacagtatacaatgataaactctgacaacaaaaaaatttaaatataataatttcttttcaaacataaagttcacatactgcaaacagaagacactgtgtgatttcattcctagtaaggagttagtcttgcatatgataggcactcaatatttgttcagactggacctaaaatttacatcattccatgaa

SEQ ID NO: 268086 - DNA, 675 bp, Homo Sapiens
  misc_feature (13)..(13): n is a, c, g, or t
agctgactttagnagaaggcagtcagtctttacttaatatgtcatctttatgtcttatttgttatgttttgtcttttgaggagtcatactggtagtcttaaaaatactgagttttatcactcaaatgcagctacaatgtttaagcagatgacttaatctccgtgaggcatgaggtgattaaaaaatgtatgtatatgctttttcaaatacagagtaaattgcctggcagacaagaagagcttcataaatattatttagtgctttttattctagatttttgaaataaattggactcgacttgatgcaaaggatttgtactataagtttattataaaattattaaccgctagcttttgtaaatagtaaaattgatttgcccattatacatttctttttgttatgcataaaatattttaatttttaagtaccaacataggatggatttttaaatgcttccccatgttaattttttaataaacatagaatgaatactgtgtgaaatattttcccactttattggctctgttttaactcagtagactctatagttagattgtctaggtgccacttaaaagatggtaactagataccagaatgtgttacattatatgttgattgtcaggaagaactgaatgcatgaatgcttccctaagacattgttagcatgccgtggtc

SEQ ID NO: 268087 - DNA, 515 bp, Homo Sapiens
  misc_feature (364)..(364): n is a, c, g, or t
  misc_feature (421)..(421): n is a, c, g, or t
  misc_feature (435)..(435): n is a, c, g, or t
  misc_feature (447)..(447): n is a, c, g, or t
  misc_feature (474)..(474): n is a, c, g, or t
ttccacagaaaaacacggacaacattcctagttgtcactccaaccagccacactaggagggcacagcctctggtaccctttctgtctcctgaaggcatgtacagcggcttctacagcaagcttgcttacctcccaggattcacctcatggtttggacactgattcctgagagagccttgagacacacaaagcgaaaaaaatgtcaagcaggaatgaaagctctagttttttgcttgttggtatatgtaaatttgtttaaaaagtatccattctgtcgttggtagaagttttgctttggttgataatagagattctgatgtactcttataaacttaggttttctcaggaaattaagtaggcattngaaggatccaatgttaatacagttttcaaggcaggttacactaatttatatttattngattgctatagganaactaaaatttntaggttgagggtttcagggttcccttnttgggttgttaaaaaaatttcctgtttcctttccttgggtt

SEQ ID NO: 268088 - DNA, 1109 bp, Homo Sapiens
cagaagaagaagaggaagagaaaagcagttgagaggacaagtgaagacaaagttattgaaagatgagattcattatcagaggaaatatgggaaatatagaatgagtgtttaagaaaaaaaacaggaaggtatctcagctacaacactttgtaggcatgcagatattttcttgctgaaaatttacatttctacatttgaagaaaaaattctctgacctatgacctgtgctttcgtttgtccacgtggtgaagtcccacagcctcccctgacactcagggagaatcctcttgtgaatcaaatacaaaagcaaacgtttgttttgtattttcatttatggctgccttaacttatacaagaaataggcaaaaagtcttaatcacattgctttgagcgtatgtaacatctttaaagactgttaattgatgtcatactccttaatctttaaaaatatcaccctgaggaggagatttgtagttttacccccattctacaaaaataaaaataaaagattaaatcatatacacaaagtctagaagaggaatgattagctttagtcgtcttgttttaatcaagcatgagaaaactaagctaattccatacattgggactgatgaaaatgtgtaaagtaagttggtccacattacaagtaggttcaatttggccaaaagacactatgtttcaaacttaatcccctgagtgcaaaactgtaaggattatgctccagttagccttttagttctgtttctttcatttcaagattccttttgccctaaatagtagcctatacttgctattgtcttttgacatcattgttttcactcgtacgcttaggctgaaagggtgtccatcccactggtgaatacacaattaagagcttcagagcagagccttcatctccactatggcctccaccacagcaagcctaagtgcacttccatggatcctacaatcatttgtctttttgtgacaccataaagtttagtaaccagcaacacgtggttcaatgcaggatgtactgtgggagagagaaatgggcaggagaagacacacttcttgcctttagggctcgttaaattgtctcctctttctttttcaacttgcttttcttt

SEQ ID NO: 268089 - DNA, 362 bp, Homo Sapiens
  misc_feature (324)..(324): n is a, c, g, or t
atttttaaagtatattttgttttgctgggattacaggcatgagccaccgtgccaggcctatgtttgtttcttttgccaacaatacccagagcctaggacagcatctggaaatgactgatcctttgatatgtactaaaggaataattcaacagattatatgtttcaaagtgagacagacatggtgtggtagtcttcctccagggatgggcacccaagggctccacctcctgatattcttccatttgtgtagttccttcccacactagtagggattgggtctccacttaccaaaaggagtacaggcaggaagtgataggcatgttnacatataagatggggctttataaaaagggcactgtttg

SEQ ID NO: 268090 - DNA, 783 bp, Homo Sapiens
  misc_feature (45)..(45): n is a, c, g, or t
  misc_feature (141)..(399): n is a, c, g, or t
  misc_feature (427)..(436): n is a, c, g, or t
cccccacccaccccaattcgcaatgttggtcatggtgtgagaaancaagcttatatggtgttttgataatattaagaaataaactaaggcagtctttctagaggtcatttagcaaaatcccttaaaaagtgcatttttggnnnnnnnnnnnnnnnnnnnnnnnnnnnnnnnnnnnnnnnnnnnnnnnnnnnnnnnnnnnnnnnnnnnnnnnnnnnnnnnnnnnnnnnnnnnnnnnnnnnnnnnnnnnnnnnnnnnnnnnnnnnnnnnnnnnnnnnnnnnnnnnnnnnnnnnnnnnnnnnnnnnnnnnnnnnnnnnnnnnnnnnnnnnnnnnnnnnnnnnnnnnnnnnnnnnnnnnnnnnnnnnnnnnnnnnnnnnnnnnnnnnnnnnnnnnnnnnnnnntgacagagtgaaattccatctcaaaggnnnnnnnnnngtgcattttttggacatagcaatttcacttctacgaatgtaaacctacaaaaacaattaagctttatgtgcaaaggccttaccctataatgatattaataacagggttatttgtaataagatggaaggaaggaaggttagagggggagggagagaataaaggaaatcagaatttccatcaataggaattggttaaataaacaaatgtggtacagtgcatgcatcaaaagcagtattatttttccattgaaagtgatgctgtggataaatattattgaaatgggaactgttcacataggttactagatttaaaaaacagattacaaaactctatgtaactgtatgttt

SEQ ID NO: 268091 - DNA, 421 bp, Homo Sapiens
  misc_feature (367)..(367): n is a, c, g, or t
  misc_feature (378)..(378): n is a, c, g, or t
aagagcaagagatgggcaaggacagagtcacaatcccagtgtctggcccctgcctccggcttgtctcagctagctctgtcactggactttcatttgtctgggaccaatatctctcttccttcctaaagatgactgcagactggtttctgccctgtgtaatgaaaagatcatgatgtgcacagctttttaccccatcttaagaatatttgaggcacttatctccatagaggggcagaatctgtaatgaatttacttttcagtcctccataaacacctgttcgcaaggtttggtacagtttttcaaggaaatacttggggtaggatggattggatggggttactggaaaaggaccccacttaaattttnattggcaattntgttaaccacggtggccccttttaggggcactggggcgggggg

SEQ ID NO: 268092 - DNA, 502 bp, Homo Sapiens
  misc_feature (375)..(375): n is a, c, g, or t
aaaggaaagagtttgccttcgaggggtacataacttaattatgaatgaagtgatatgtgtggaatttacttcagagtaatggaggtggaagtggcagagaaaggaaacactggacttgatagtgttgaaactgattaatgatatgtggcggttcattatagtatttccacttttctgtatgtccaattttctaaaataaaaggagaattgaatagaaaaatgcttcctggaggtagctgtgtcttacctgagacttggcaggaggcagtagggcctgagggaacagcatttacagtgtcctaacggttatactgaaactttccacgtatacttgatggaacatcaatctggaaggcatcctacacttcctccatncagacctgatggtgcaagtgaacaccatcagtgcctttccagtttcatcaaagcagttattttagcttctctgacccaaggtatatcagttctattttaacgtacattacaaagactaatggttata

SEQ ID NO: 268093 - DNA, 740 bp, Homo Sapiens
  misc_feature (38)..(38): n is a, c, g, or t
gggactgaaagctctgggacccaaagccaggccccgcntcagctctgcccccaaggggctctgggtcctcggcaagtccttgcacccccatgggtctcagtttctccacctgtaactgaggggctcagattagcccagtggctaacgtcacagaagaaacaacaaaacagcaaacaacggcctggccccaacctggagcaattaagtcagaatcggatagcccagggcccaggtatggtatcatgataacagctcccaacaggcggttctgacgagcaggcgggcgggaacatggttagaccagcccctgcgaccgtgcctggaagtctgagctctccacccatgcctggatgctccggtgtgcaatgaacagcaggtgatggagccctggtcccaaaatcatctagggttcttcacatttttgcctccacaacaggaagacacgcaaaggccatgaatgcacacacctgtgtgtgacactcagaaaacatctgaggggttggccccatcccagcagcacagaaccactccagggagggacccagccctggcgtacaatgaagaagtgcaggcttctccaaggacacccagcgtgagaggaggggctcacagtagcgggcgaaccctttccccttcttccactcacaataacagggctgggggagggacatcggcacagaacacaaacaccacaaagaaaagaatcagcatttagaaaaagaaagcaatccaagtttcga

SEQ ID NO: 268094 - DNA, 615 bp, Homo Sapiens
  misc_feature (315)..(330): n is a, c, g, or t
tgctgtgtcagttcctgtttcttcccatttcctggcacactctgcccctctgtccgggggacacgcgcatgtgtttgccagggatggggccaccgggttgatgccaacgctccgggtgcctgtcttgtctgtgtggcttctcagatggtggagggtgctgggagctggcagggtccgtccagacagtctcagcctctccccgccgcccccaacaggctgtcaaacaaaaccggagagggggtgggggagccagcctcccagcgtgctgtgcccgcaggcacccgtgtgacatccgcacgtccagctccgtgaccnnnnnnnnnnnnnnnncacaagtgagtgagagatttcgaacgcccacccctcgactttgaaatctgagcaaaacaagaaactggtcttcctctcccccgaacctctccccagctagtcttccctctgttcttcctgcctccagccgcccgcgccagattttgaaatctcggagacaaaactagtactgtaagataaatttttttgtactgtatttattgtgtataacgatttttttaaaggagaattctgtacatttagaactcttgtaaattaaaaaccgatcctttttttaaaactgta

SEQ ID NO: 268095 - DNA, 988 bp, Homo Sapiens
  misc_feature (498)..(655): n is a, c, g, or t
acgatgacagcttctgttcagtacccactagttctgtggaatgagttcccatgcttcctatgaagggcggagggaaggattcagtgacatggacatggctgtcactgaagcagcacatacaattctctggcattgacaggggcttgttacatgtttattgaatgaatctctctgaaaagaaaacaaatgcagaatctcaggctccacaaaatcagaatctgcatttaaaaagatctccaggtgattttgtatgcgcattagagcttgagaagcagtgatctaggaaattcaggttacagcctacattgtcatttcatctggccacccagtaatgttgagcactcttcctatctatgtgagagaattccctcctttgtgcatgtgtacctccccataggagaagccagaaacttgctttccaggtttacatttcagcaagggcagtcctgtgaccttaggctttgccagtcaaatgcatccacatcagactgggggagnnnnnnnnnnnnnnnnnnnnnnnnnnnnnnnnnnnnnnnnnnnnnnnnnnnnnnnnnnnnnnnnnnnnnnnnnnnnnnnnnnnnnnnnnnnnnnnnnnnnnnnnnnnnnnnnnnnnnnnnnnnnnnnnnnnnnnnnnnnnnnnnnnnnnnnnnnnnnnacaatatcaaagtttaaagtgtgcgtatcatacaaccttggaattcaatttttaaatgcttgtcttagactttctcatagtatataaaaggagatatgtacaggggtctacagtgcaacttcttgataacaggagaaaaaaatcagttaaccttagtgtctatcaatagggaaatagataaatatattgtgatatatttttcagtgaaatagatgaatcagccagatgtacatttattgtgtataaatcttggaagacaaagttgcagaatattattatatattagagtaataccatacctgtttaaagcacatgaacattacgatgtagtgt

SEQ ID NO: 268096 - DNA, 500 bp, Homo Sapiens
atgctctcgagggctgagcagagactagactcaaggcacaggtttctggtgatggagtaaagttacagcggtatctcatgtctacacaagaagaggaacgttctgaaagctccaacaacttcttgagggggatggaccaatacagctttgggctcaggattccctagcctcctctgcccatcgcgtgcactgattggaggagtctggccccaaacactctcatatgaacctcgacatgctggagtggggtctggcaggagctgatgacagtttgagggacttgagtgtccctagcctggcagttggctcccggaagcactagacactgacactcattggtagaccctccctccccgccgttgtgtttggttcttttgcactccatgtactgcagaaggatggaaggacctgggtgctggctgggctgtgtatactgtgtatacaagggagctggctgctgaggtgaccacagccttctcctaataaagctgtaagtattt

SEQ ID NO: 268097 - DNA, 373 bp, Homo Sapiens
  misc_feature (61)..(61): n is a, c, g, or t
  misc_feature (87)..(87): n is a, c, g, or t
gggggaagggaagggtcctacccaaatgaatgtcaagtgtcctagtgcttccgggaagccnaactgccaggctagggacactcaaantcccctcaaaactgtccatcaagctccctgcccagacccccactcccagcatgtcgaggttcatatgagagtgtttgggccagactcctccaatcagtgcacgcgatgggcagaggaggctagggaatcctgagcccaaagctgtattggtccatccccctcaagaagttgttggagctttcagaacgttcctcttcttgtgtagacatgagataccgctgtaactttactccatcaccagaaacctgtgccttgagtctagtctctgctcagccctcgagagcat

SEQ ID NO: 268098 - DNA, 462 bp, Homo Sapiens
  misc_feature (298)..(298): n is a, c, g, or t
  misc_feature (318)..(318): n is a, c, g, or t
  misc_feature (344)..(344): n is a, c, g, or t
  misc_feature (391)..(391): n is a, c, g, or t
  misc_feature (406)..(406): n is a, c, g, or t
  misc_feature (448)..(448): n is a, c, g, or t
attcttgaaagaaagaaaacaaagttcagatggtcaacaacttcatattgacagtgtccagccaacagtagaaaaggtactcagtttatgaagaaagtcagtcaatagaaacagacctagagatgactttaaaaaatttcttcgtttctttaaaagataattgactgtttagatatgtttaaagatttaaaataagtcagtagagaaatggaactaaaggaaaattctagatgaaaattacaacatctgatgaaaaatttgctagatgagtttaatagtagatcagatgctgtaaaanaaaataaagactagtgaacntgccagtgcagggcaattagaaagtnttccaagtggaggctggggtaccgttggctcacacctgttagccccngcacttttgggaagnctgaggtttgggaggttcccctggagctccaggatttcaagncccagcctggggca

SEQ ID NO: 268099 - DNA, 694 bp, Homo Sapiens
  misc_feature (67)..(67): n is a, c, g, or t
  misc_feature (142)..(142): n is a, c, g, or t
  misc_feature (145)..(145): n is a, c, g, or t
  misc_feature (378)..(378): n is a, c, g, or t
  misc_feature (381)..(381): n is a, c, g, or t
tcacaatgtactgattcatattaattctggaaaatatattccagtaagttccagtaaaatataaaancatagctctaatatagttccatttctttccctccttttgctattgtcatatatattacatttgtatatattgtanccncacagtaaagttttatagttactgttccttgcagttgtattttaaatcaagataaaaaatatatgtgtagtcttatatttacctatatattgcctttataggtgtttttcattcatgtgaattcgagttaccatctgctatggtttgaaatgtatcccaacaagcttcatgtgttgaaaatttaatcccaaatgcaaccatgttaaaaagtgggacctctaagaggtgaattnagngctcatgagggctctgccctcatgagtggattaacatatttgtctcagtagttggttggttatcacaagagtgggtttgttataaaagtcggtttggcccttcttgctctcacccgtcttgccctccaccaagggatgatggagcacaaaggtccttgccagatgccagcaccatgctcttggacttccctgcctccagaactgtgagccaaatatctgttaattataaactacccaatctgtggtattctgttatggcagcataaaatggtctaaaacactactgctatttctttttaggataataggactt

SEQ ID NO: 268100 - DNA, 350 bp, Homo Sapiens
  misc_feature (52)..(52): n is a, c, g, or t
ggcacgagagggatacaagtaggagatggttcttggaggctggggaccagangttacctggtgggaactgggcttgtccagaaggagcagaaacatttgggagattcagtcttagagagaaaggttctcctaccttccggtcaaagccaatggacaagggagctgcagcttatttcttagtgaacggaatataaaaccattccttagaataatttccttacctataaaaaaatcagtctggttaattccagcttgtctttttactgagaagtaaatttattgagtatatttaaatatttgtgagatttggccagtcatggtggctcgggcctgtggtcccaagtagctgg

SEQ ID NO: 268101 - DNA, 1011 bp, Homo Sapiens
  misc_feature (88)..(97): n is a, c, g, or t
  misc_feature (110)..(226): n is a, c, g, or t
  misc_feature (269)..(329): n is a, c, g, or t
  misc_feature (891)..(891): n is a, c, g, or t
  misc_feature (919)..(919): n is a, c, g, or t
  misc_feature (929)..(929): n is a, c, g, or t
  misc_feature (966)..(966): n is a, c, g, or t
tgaaatgttcagagaatcaccaccagacactcccgtgtgaaaatttgtatgcatctcctcctttcatctatcctaaaaacagagatcnnnnnnnnnngagacagagcctnnnnnnnnnnnnnnnnnnnnnnnnnnnnnnnnnnnnnnnnnnnnnnnnnnnnnnnnnnnnnnnnnnnnnnnnnnnnnnnnnnnnnnnnnnnnnnnnnnnnnnnnnnnnnnnnnnnnncttttagtagagacaggatttcaccatgttagccaggatgctnnnnnnnnnnnnnnnnnnnnnnnnnnnnnnnnnnnnnnnnnnnnnnnnnnnnnnnnnnnnnatgagataccccacctggcctaaaaacagagatcttatcagattgtcttttggttgaggctcccctttggaaacttcaaatggtattgtgtcttcagcacactctcctatgttttcttggtcctgggtggtagaatggggtgacctaatattcccacagctgccatgtctcttggagggtctagtgagtatcagcccctgagtcactcctcccaggggacagactgaggtaggagaatggggactcccaagagagcagctgaatgccttacgatggaaggagactcctagtatactctgcatctagatagccaacccctcgagatgctcagcttttctttcccagtcccagttttcgtaagttggagacacatggctggtcagccagttggatggtgctattgagggaaagggagaaatgattcctgtcctctggattgtgtcaactgtgaaggaagacaaaaccccaaaagacaaggaaagcccaccccaacggggaacgcagttagcctgcaaatcagaatatgaaattgaggttcacagcggggcatagtgcggtgttngttgaaagtagtcatgagcgcttcggtntagcaggatnggggttgagagatgtctcatgtgattagggtgacctntgctgacacatgagttcagacttcactgtgtttccagccagtatt

SEQ ID NO: 268102 - DNA, 891 bp, Homo Sapiens
  misc_feature (766)..(834): n is a, c, g, or t
cacagtgacattaatttcataactgtgtatcagaatgctgctaaaataaccagcttcctaataggtgggtcttagaaaaagccagcttgactgaagttctcaccgtctcacatttttattttgttgtaggtcatcactccccaaaatggacgttaccaaatagattccgatgttctcctgatcccctggaagctgacttacaggaatattggttctgattttattcctcggggcgcctttggaaaggtatacttggcacaagatataaagacgaagaaaagaatggcgtgtaaactggtatgtgttttctacctagataacccacactgtgtgtttggcattctggcttttgtttttttgtccatttgcattaaccaaaggtttttatcgtttgattgggtcttatctgagggtgcactgcctcaaagcatttgtttttctgaatttattggctacttggggccattcagccctaaaatctctgtttaggtgcatagttgattttaatctagatgattaaaaggataagtgctggtttttaaagcactgatttggataaataacatcatcactcttggagagaagtagagaagagccatcctgcaaagtaggagcaattctctgtgcttctcctttcattccgcccactgcagagggggccaggcagaggcagaaactgggaaggaggtagccttttcaggaaggcagatttaaagggctgaatttaaatacatcaatgattgaaaagaccctatcccaaattttnnnnnnnnnnnnnnnnnnnnnnnnnnnnnnnnnnnnnnnnnnnnnnnnnnnnnnnnnnnnnnnnnnnnnagctgagatggcgccattgctctcccagcctgggtgacaagagcaaaactccgtctc

SEQ ID NO: 268103 - DNA, 713 bp, Homo Sapiens
tcagcctgaacccaatgtagctcagcagatgtttgaattatgtgatctccagcttttgggaaagatctgaatgtaagaggaacttaagagaattagcatgatattttaaagagaataactgcattacattctaacagcagacctgagtcggaaaacaagtaaagaatcgatgtattggtttgccgatggaagagcttcagtgagatctcagaccctgaccctgcagtgagccttggcaatgattgacagggaagtttgtaggataacgcagaagtaggattagtgtgccactgctccaggctgaaaatcagaaatgaaagctaaaatacatttgtacataagctataccttcaattgatagagcaagctgtgtgactcaaaacagcctgtacagaagtacgatggaccagctggaaggtatcaatagaagataaggaaagttaactcttgacaccagggaagtcaacaaatttcaggacaacagtgaccaatggttaagatggtgactaagtgtaatcagaaaaaaatctttaactccaagtttagactagccagtttgtttaattggatttctctggtcaaaacctaaactattggtgctttctaacctgtggggatcagtgtgcatagaccattttgccctcgatttcagcataacatagtaaaaagactgggttttagattcaaaagtcatggggtttgtgatatagtgt

SEQ ID NO: 268104 - DNA, 790 bp, Homo Sapiens
  misc_feature (446)..(446): n is a, c, g, or t
  misc_feature (779)..(779): n is a, c, g, or t
gcagctgcattcacatggccccatttccctctgcttccccttcccacttgattattcaggcaagtgggattgtaacatcatggccatcgccatagtaacggagcttgaaagatgctacactgccctggaacagacgtcttgctgggtaccaggagagagccagggatgccaagccaaggggaaagtcctggtttggtggcacacaggggcgaatgtcctgaatctacggcggggcagggggaaggggacatgttaatactggctgacagggaggtggctacaaagctcctccatttctcctggggcttgcatggtaatctgcccactagccacacagattgctttctctgtaatgccattggcgccagcctgttgtgctgaggttgacaataagagaacagacttgggaggaggaatagggcaggcaagattctggtggcttctgncgtggtcacctgtgcccatctcatgcccagatttccagagcagggaacatttcagaggtggagaagtggctctgtcatagagatcacagaagcacagatggttacggtgctccatgccactaccctggttggtggaaacatccataacataggttgtcctgtttgctctgaaggctaccagaggggatggcaatgtccacaggagctgctgacaggcctgagacttaagtgagggagatgacagaataggaagaggagaaagacataaagacaggagaccaaggggtaaccacatctgggccaaagctgacctttctttctttccttccagtntccgtgccgaa

SEQ ID NO: 268105 - DNA, 635 bp, Homo Sapiens
aaccaagtatgtaaataaatggattgaagtgttgttcatattgtaatagatatatgtagagccaatggggagaaataaaggatctccggctggatgagggttactggagacagaagggtacttagcatttcctctggttggtcccaccaaggaattaggataaacatggaatgtctgcacttttccagacattcctttcctacttcttagtaactgtcatgaaaagtcccacctgactgacttctccgtgctgggcgggagcacctgccactggtgaggccctctggtacagaactctggcatgcatgaagtctgactccctgtaagaacctgtaatgaattttacagtgcagaactcaatatgaataaatgaatgaatgaataaacaaatgagtggcatggctcattgtcctggctttgttactaactcattgcgtgacctccttttcaataattttagaaatggctgctctgcttcatttcatgggggctggtatgaaggatcaagtgagacgacaaaggaaatcgttgaaatggatagaggacagtacttaaaaaaaactatacaaatgtaaggaaatgctattaatcattgtcctttcaggcaagacatgatcgttatggcaggcaggtgg

SEQ ID NO: 268106 - DNA, 527 bp, Homo Sapiens
catggcatcaacccatgcaaaaagataataaaataccatgtcagtagaatcctagctctatttcaatgacaataagaggtcaaatttttggtccagcaaccttgatcttaaagtatcattcaataaattacaatatcagaaaaattcacctagtatacagaaaagcctaaaccatttaagtaaggactaaagcttttaaataagtgacatggaaggtacacttgagccccgggatccagctgtgcctaaaaaatgcccaccccaggcttttaattatgcaaatcagtacattcccttttaaaaaattaagccaatttgaatttggtctctgttgcttgcaaatgaaaaaatctgaattaaaatattgttcagtatgcatgtaccaattttcgaatacacctaccagttctatcttggcatgtatctactggcatgtaattccagagccagaatcaagtattaagtagctgaattacccaagctgaacattttttaaaaagttacattaggccgggcgcggtggctca

SEQ ID NO: 268107 - DNA, 691 bp, Homo Sapiens
  misc_feature (21)..(21): n is a, c, g, or t
  misc_feature (349)..(349): n is a, c, g, or t
  misc_feature (656)..(656): n is a, c, g, or t
agctgtccctgacagggtctnctgcttcctgagcagtgtcaatacccattaaggaagctgattaaaatctctgctcagctggagcctgagggatgaagtcaccagtgagacagaactcatttctgtgtgacaaagctttgtttctgtgaaactctcttccttcccagtacttgcagcttccaccctgctctatgtccaaagcccctgggccttctgccttcttcccatcgcagcacacagccacctccacttccagggtctctgccctttcactccaattacaccaggtcctgtaggaggcttgtgaaaacccaagtgctgttcctatgcaatatggttgtgtggactnctgggtttgtaaacactgctttggtagtctcctcttcagacctgctttgaaggaaagaccatcttgaatggtatcagaacctcctacttctggtaagtccaaaatccagagggggagctcaatggaactaaagattgaggttcttgtcgaggaaaattttcttgctgctgtaaggcagagttcaagacaatgaaccagacggtgctaagcagaaaaacgattagtctgctatttgggtgtgaagagccaatgtagatcccattttaagaaagctgaggaaaggtggttgaggaaacctatgaagcangcaggtctatttcctattaaaacaacttgtccaaa

SEQ ID NO: 268108 - DNA, 727 bp, Homo Sapiens
gcaaggacactccagttcccccagtcctgccatggtgctaccctgagggacagggatggagacagggaaagccaggtttgccaggacctgcatagcgggcccaagactgcccttcctcttaagtcatgcaaaagcctccctgcccagtctgagacagtcgctggcaggtgaccacgacctgcgtggccctcccggcagttgtcatggtggttgtacccccacccccatccccctgaggagacatgggctcagtcccatgcctggtgcccacagccacaaagatggccatgggtctctagcctgatattcgtggcctggcaggggtcagcacccctgagggcatccaagccatggtcagaggaaagtgttggcaggctcggcacagccaaagaagtcaggacccacgagacgggggaagccttccagagccttcaccttcacagggtcaaacttccagtagaggcggccgcgcaggaagtagcatagccatcagcatcctggaaggcagcgtcgatctcagagggcacccctctccagtcagttgcctgcggggcacgggactgtctacacgccgggtgctggggtggaaacgccagtagtccctgcctcggaagaagtagatcttgttcttctcgggaccccagaccaaggcagcatggaccgggaacctcaccaggcccagctcggtgaggggtgcggggcccaggactggcttttcaccgtctac

SEQ ID NO: 268109 - DNA, 752 bp, Homo Sapiens
  misc_feature (11)..(11): n is a, c, g, or t
ataatataaancttccaggaaaaatagtagaaaatctttgggatatctagggataagtaaagaatttttagacttgacaccaaaagcacaattcataaaagaaaaaattaataaaccataaaaattagaaatttttgcctttcaaagaccttgttaagaggttgaacaaaacaaaatacagactgggagataatctctgcaagccacatatttgacgaaggacttgtatctggaatacataaaaagctctcaaaattcaacagtgaaaaacaatctaggtagaaaatgggcaaaagacatgaatggatatttcactgaagaggatacacggatggcaaacaagcacataaaaaatgtctgattagagaaatgcaaactaaaacccacaagagatgttactacacaactcgaacaatcacaagagatgaaaacaccaagtgctgtcgagagtgtggaggaactggatcagtcatacatttcgtagcaggaatgcaaaatggtatggccactttgcaaaatgagtctaacagtttcctacagaactaaatatgcacttatcgtaacagcccaaaaacttcactcttggaatttacactgcactcagaaattacacatttatcccagggaaacgaaaactcatgtttacaccaaaacctgtatgtgattgttcacagctgctttatttgtaatagccaaaatctgaaaacatcccagatatccttcaatgagcgagcaattaaacaaacggtggt

SEQ ID NO: 268110 - DNA, 736 bp, Homo Sapiens
  misc_feature (634)..(634): n is a, c, g, or t
  misc_feature (674)..(674): n is a, c, g, or t
  misc_feature (696)..(696): n is a, c, g, or t
  misc_feature (703)..(703): n is a, c, g, or t
  misc_feature (719)..(719): n is a, c, g, or t
cgctgcagacagccctgcagccccctgactggctgcagggcaactacctggtggtgcggtacgaggacctggtgggagaccccgtcaagacactacggagagtgtacgattttgtgggactgttggtgagccccgaaatggagcagtttgccctgaacatgaccagtggctcgggctcctcctccaagcctttcgtggtatctgcacgcaatgccacgcaggccgccaatgcctggcggaccgcccttcaccttccagcagatcaaacaggtggaggagttttgctaccagcccatggccgtcctggggctatgagcgggttcaacagccctgaggaggtcaaagacctcagcaagaccctgctttcggaagccccgtctctaaaaggggttcccaggagacctgattccctgtggtgatacctataaagaggatcgtagtgtgtttaaataaacacagtccagactcaaacggaggaagcccacatattctattatagatatataaataatcacacacacacttgctgtcaatgttttgagtcagtgcatttcaaggaacagccacaaaatacacacccctaagaaaaggcaagacttgaacgttctgaccaggtgcccctcttcttctttgncttctcttggcctctttctcctatttcttaccctgtcctncacctgcctttcattttgaagngggatgntaatgaaatcaagttncagtaacccaaatcttg

SEQ ID NO: 268111 - DNA, 470 bp, Homo Sapiens
tcatcaagggagtctccccagtaagtcaatgctgtcccatcctcacgagcagcccgccctgaatcctgtctcagagtgtactgtctattctgcacgtcactttcagaatatcctgcctcttttgccaacaaatcgctcccatgctgcatctcctttgctgtgtgtctcttgtttaatttcttttaaactaaggagacaagaaccgaggttttacaacagccatcgacaaaactaagttgtcatctgacttcctgagaaatcaagagagagtcaatttctcaaataagcaggattaaattgtcaactggtatgatcatgaagttctctcggctttaatccttagcacaaaaaaaggcagcctaaagtaaccggatgttaactaatcagttatttttctagtgttctctctaaatgtaatgagtacacactttgttgcttctggtttcttcagtcctgtttataaagccaat

SEQ ID NO: 268112 - DNA, 404 bp, Homo Sapiens
  misc_feature (30)..(30): n is a, c, g, or t
  misc_feature (329)..(329): n is a, c, g, or t
  misc_feature (365)..(365): n is a, c, g, or t
  misc_feature (378)..(378): n is a, c, g, or t
  misc_feature (385)..(385): n is a, c, g, or t
atctttctactccagcttgcctatcacggnttctacatttttcacttcacttagtttaacttcagtgctatccaaagtgtccagtccacaaactaactgctcagtccatgacagaaaaggaatttgtaccatagtgtgccttaactgtggcattaagcccagcttaagtttagtttacacttttttcctagcaattattattatatgatttatgtttgccgccagctccttatctcgttatgaataggtaacaagcagttcacagtctgggcaccatacttcaagtaggcactgggcttaaaatgggaaccctcttctgggcaaaactnaagggagttagttcaggatgttctgtggctcccatnaacacctcttttnatttttncagttttatttttggaatt

SEQ ID NO: 268113 - DNA, 555 bp, Homo Sapiens
  misc_feature (287)..(287): n is a, c, g, or t
  misc_feature (359)..(359): n is a, c, g, or t
  misc_feature (361)..(395): n is a, c, g, or t
tgcatgtctgcgtgtgagctgccttccactcttttgcagttgcataaacaaactttttagaaaggtcaacacaaggaatgaatgctttttcttaaagaacagagcaaggaaagatttcatgtttacttcttgaggcttcactactggaagaatagccacaaagtggtcaagaaagaaaggatatgttcctctccttaaccagggctttgtgtttttggctgccccagcaatggcttaggagcaagaagctttatacactcaagagctgtactctcaaaatagtgtgnctcttagtaaaaggcctgctgaaactctttgacccagattgcttttgcctgcaggctagtttttttgggttntnnnnnnnnnnnnnnnnnnnnnnnnnnnnnnnnnnntctaactccactacatcatattgggtaaatggtttacttccagagatgttaaccctgtgagaccattctgccaccctaaatgacacagactgagagaaacgaagcatgtcctggagagttcccttaagaatcctgactttgggccaggcacagtagctta

SEQ ID NO: 268114 - DNA, 803 bp, Homo Sapiens
tgtaactgttacacagtttaacacttctgaaattagaatattagagatcctgctaaatattacgtattgtttccttggcctctcttaatagtgccatttatatttttaatttaccagagttaggctcattaagatagtgtttgctttgaaatcaatgtttctgtggaaactaattttaacttttacagatattgattacgggcttgtgaaaaggcaagtaaaggaggaatgctgtgctatctgggcattaaaacaaaacaatacaattaaaagttaaaaagaaagaaaaaggtaataacagatttgtgtggaaggagggcaaaaaaacttcacacgtggattatctgttggagaatgtgcattgcaaaaaagatgcaaaatagcaatccgccctctagctttgatggaaaggtgtttttcccatgaaccgtaggggatttttaccaagtgaacgtggtttgaaatggagggcatgttgttcaaccctgtggtttgggaagggctgggacttttcaagttaggtcttcccaggaggagttccttttgagaaagttggtccaaggcactttacggtgtttgccggttcccaagcgatgggccaggactgttggcttaaaggtgtttccaagtgcgattttgggccccttcccgcaattgtcccggggtttctttagagatgttggaagggtggtttggaaaaccctgggggttttccggggccccctaacctttatggggaccccccgtggaccgtggtgcggttcccgcaatgttttgtggggtcttgttccgagtcccccctt

SEQ ID NO: 268115 - DNA, 943 bp, Homo Sapiens
  misc_feature (108)..(192): n is a, c, g, or t
aatgaagtaagtgtgcagtaagtgttaactacaaatattattatcttagacatacagatttccatgattcatgaatggtgaagcatcttagaagacatccattccagnnnnnnnnnnnnnnnnnnnnnnnnnnnnnnnnnnnnnnnnnnnnnnnnnnnnnnnnnnnnnnnnnnnnnnnnnnnnnnnnnnnnnagtatgggcaatatggtgagaccctatctcaagaaaaaagcaaaactttttttaaagcttaaaaagagagacatctgttccactactctcatcttagaggccagaaaactgaggctcagataatttcagagactttcacagatcccccaaccatttgatgggcaaagccaggaatagaactctgctctcctttcccactgggacagtggacagaaattcatcttgatttccatctgtccaggctgaagaatgtgcactggctggaatgacagagtgaccaaattttttctcccacctctgctgtcctcagcaatggtttgggacagtgtggatgacccagaagctggatagtacagagcccaggataaaaagttcaggcttcctgaagggaagctgcagtcctccctaggcccacaacacccttcgagatagaataaatacagcacccttctctacccaagttaggaaaggaagaagtgttacccaattagttgtatggggactgccaaagcacgccagtctgaagatgagcagaaactggctcattccatttggcacctagcacactaactgcaccagttaataggccacgcttttctccagagccattggctgaagagttcaaataaaaagtattgagaataggctatccaaaacagtaggctcagatgctatcacacaaagcactttatccttaagttcaatttttctaaattgtagttggctgctttggcttaataaaaaccttcct

SEQ ID NO: 268116 - DNA, 487 bp, Homo Sapiens
  misc_feature (14)..(14): n is a, c, g, or t
  misc_feature (110)..(110): n is a, c, g, or t
  misc_feature (334)..(390): n is a, c, g, or t
tcttgaagataggnttcacccaaatgccccatactagcctcaaatccctaggctcaagcaatctcctgccctcattcctactgagcaacttggactataggtgcacaccnaccatgccctggccctggaatggatgtcttctaagatgcttcaccattcatgaatcatggaaatctgtatgtctaagataataatatttgtagttaacacttactgcacacttacttcattccacacatctctctaaccatttttaaaacaactagctgagaccctattgttatatgttaattattctttgtggaggaggaaaaaaacatcagaagcattgccnnnnnnnnnnnnnnnnnnnnnnnnnnnnnnnnnnnnnnnnnnnnnnnnnnnnnnnnnctatgtaactacagaactgtctgccaaggtctactgtgatctatgtagcagaaagagaatgagggaatcaagtaagttgtcattgagagattaaatt

SEQ ID NO: 268117 - DNA, 937 bp, Homo Sapiens
aaattcacctgtttagaaaaagtacaactataaaaaataaatacaaaagatcatataaagttatgaattttttcagaaataaaaagtaatgaataaaaactgtgccttttatgcattttgctgtgtatattttgtcccaatttttaaatgtgtttgtaattagttttcttatttttatgcataaaatttccattgttgactgtcactgaacactatcacttttgctagcctcaatattattcttaggtctatttgactgtacttcattctgtgtgcatatatgtgaaggatgtatctatacataacttctgtgttaaacaaaagaccgtttactctggccggttaaaactttctgggcagattttggataaccctccttggcaccacttggataataactccacaagctggcaactcctctggaattccacttccacaagcagacaatcctttttaagataaaaggtcatggttattatggtatttatatatttcctaaccattcaacacatgtaaagctgtgctactgtttttattatcttctttaaaacatgtcactgacagtgcttcagcaagagaaggaaggggatggtattagggaagcatgcaaacctgtacagcatgttacccatactgaatagtgtaggcagttttaatataatgttaagtatttgtgtttctaaatatagaaaaagaacagtaaaaatggcatataaaagatttttttaaatggtacacttatttagaacacttaccatgaatggagtttgcagggctggacgttgctctgggtgagtcagtgagttagtagagagtgaatgtgaaggcctagggcagggttgtcccatcttttggcttccctgggccaaatcagaagaagaattattgtcttggaccacatgtaaaatacactaacgctaaaaatagatgataagcg

SEQ ID NO: 268118 - DNA, 474 bp, Homo Sapiens
  misc_feature (395)..(395): n is a, c, g, or t
  misc_feature (407)..(407): n is a, c, g, or t
  misc_feature (431)..(431): n is a, c, g, or t
agttgctcaaatactgttcaacatcagaaaatttatattggaaaaaacccctggaaaatgtaataaatttgtaaaaacagttttgaaaaactacagcttataaaacatgagggtctataatgcttggttgatagtacaaagtttattcaacatcagggaatttatattggagaaaaaccctacaaatgtaatcagtttggaaaaacatttttaaaaaaaccacagcatagaaaacaccacagggttcatactaaaatatgtttttgcagatgcagtaaaaatgaaaaaaatttaatccgaaattaagtttatgtaaatatctgagaattcacagtagaaatatctaaggcgcggacacttcagacattacactaaatcagtgctaagtacagganaacaacacaaanttaaaacttggtgggattaaattnatttgtatataacctttaaaggaagttaggaggttttccgttt

SEQ ID NO: 268119 - DNA, 695 bp, Homo Sapiens
  misc_feature (442)..(450): n is a, c, g, or t
gaatgaatttcttatcagcagacctttattaaaagaaatgacaaaagtcctttcaggcagaaggtaaattattccaaatggaagttgggaggtatagaagagataccaaaaaatgataaatatatgggtaaatctaagttaatattgtctatatagaacaataataagatgcatacaactataataatactaccttgtagaattaaaatagagagaaaactaaaatgcatgatttataagttggaagagaggtttatatgttgttaaagtgtgttcttaaagtccttgtattgactggaaatagggtaaggtaccaattaatattgaaggctgcaacttataatctagggtaacaattaaaatggtaagagtttataacttcaagctaatggggagagggcaaaaattagaataataaaaaatggtcactctaaaggaaggnnnnnnnnngagaacatagaacaaacagggcaaataaaaagtactgagttagatggtggatttaaacccaaatatataactagttacgttaaatgtaagtagattaaatgtatcatttaaatggcaaagatttccagagtgatttaaaaaaccaaggtgaagctacatgctatttaaaagagatacatcaaaaacataaggctataataagattaaagttaaaggaatgatccactggacaccatggttttctc

SEQ ID NO: 268120 - DNA, 529 bp, Homo Sapiens
  misc_feature (266)..(266): n is a, c, g, or t
atgagacctcctacatgccaggcaccagggaagtgtcgtaaattcagcagtgaagaggcaaggtccttgccttcatggtgcttattgtctggtgcaggagacagatcataaacaaataggtatattgacaagacctttccagattataatcatagctatgaaagaagtaagatgatggtgagatagagaataagggcatgccatctgaaatagggtggtgacagcaggcttctctgtggaggtaacatttgtccttaagcctgaanggatgagcaacaaccagccctgggaaagcaccaatgaggagtactgcaggcagagggaaagagcgcttgcaaaggccctggggttggaaagagctcaccatatacaaaatgtcttcaacatcttatgatcttatgatgagcagtgtgaaaggaggccttgcttggttggcaaaggttatgatgtcaggacttgggcagagatgttctgatacgtagacccaaaagaaggggcagagtattcttcctccgaagacctaagtact

SEQ ID NO: 268121 - DNA, 683 bp, Homo Sapiens
  misc_feature (359)..(359): n is a, c, g, or t
ggtataaggtcaaatgcaaacctgctactaaccatgtaatctcagcaacaaaagatcaattgttatttattctttaaagaaaaatatgactaccactagtaaaagaaaaagcaagccaccaattttgatccaaatcagtgggaaaaaatgataacttcagtttttgagtgacaaaacaaaattacctttctgtaatttcaagtagtccttgaaagtaataaactggattcacaattaatcctcaaaacagcttctatttgcaggaattaactgcacaaacaccttctattaatacaaagtaaaacattccacacactaaacatatggacttagtccgaaagacacagagtaaagtattnattttcctctcctcagcctatccagtagatgtgcccaaaaaacttaatcctcatacaacccaggcagatatttatgagatctaccattatgaataagactcaaataggccggtttccaaattttgtagtggctacagagaataaaatggatctagagctctaacacagttccacagggtccctagtaatggatactacacattattagcatgtgttataatcaagatgttgataaaaagatctaagtattaaactcaaccaaatgctttctctcttcctctgcaaaataaatacagaaaaggtggtgtctctaaagattatcaa

SEQ ID NO: 268122 - DNA, 523 bp, Homo Sapiens
agtaatcaccagacataaagaattaaaggtgttaaaggcataattttaaaatgttttgtgcagacatgcttggatgacagccaaatttttacatatgattgttaaaagaaaaaatcattattatttaagagaaaagtgaaaaatatacctccctgagatactgggctttagcttggttgatgtcatttaaaactttctcatccacaatgaaaatgagctcttctggaagtggtatatctcgtaccttctctgaacccttccatcttccttcattctgaaaaattttctcatccacataataactgatgttcaccataatcattgcatcaaaaggagcatgatcacaattacagccaaatactccattagaaaaggaaatcaagttataggatttgtcaccccagcgtactgttggatctccaataaggatggctgcaataatctcagaataatcctctggtgttacatgtggactgctatcctccatggaatataccagtaaactactctgaattttttctaa

SEQ ID NO: 268123 - DNA, 448 bp, Homo Sapiens
  misc_feature (22)..(22): n is a, c, g, or t
  misc_feature (98)..(107): n is a, c, g, or t
  misc_feature (364)..(364): n is a, c, g, or t
  misc_feature (391)..(391): n is a, c, g, or t
  misc_feature (438)..(438): n is a, c, g, or t
cagttctgtatgatttatatcncagcaatggaatgcttagatcatagaatatgtatatctcagcattatcagatactatcagagatacttccatttcnnnnnnnnnngtcaattaccctattcaaagatactaccaaagtggatatagcatgtacatttctactagcaatgtgtgagaatactagttactccacatcttcacctatacatgataacagtttttaaaaaattgggctattccagtgtggctgcagtagtctctcattttggtttcaatttatgtttacttgatgatttatgagtttaaatgcctttttgtgtgtttattgggctttttagattgcctcttttaaagcacctattncagtccttttccctggtttataggagntcattatgcattctgattatgaatcctttttcagatacatgtacggnattgcagtta

SEQ ID NO: 268124 - DNA, 784 bp, Homo Sapiens
  misc_feature (102)..(102): n is a, c, g, or t
caagaatcgcgtctcaaatgcaaggcctacacaagagtatttgtttcttgagctgaaagaagtgaccagaaaatttagtcacgttccttggccaaaggcatnctacattaggaaaattaggtgctttctgcgtttctgggagaatgagttgatattggcatacaactaactttcttttggaagagtttccatgggaaaggtggtcattaggatgaaatggtagttccgtctttcctggcaacataactcttggggagcatctgagaggaaggttaggagatacttgctattcccaaaactcattctcatcagaaactttaatattccaaggtaagaattttcttattcagtaatcttgtttataaaagaaaaccaaatacactaaagcactttaaaaaaatcaatgctatctgtacctttattgtcaaaaaccattttctagtaaggcttttttaaaatgttcaatcttgctgaataagctaaaggcatgtatagagtaagtaggcagcatagtttaaaattaaaatacttatcttggtcctttacaaattctttgtctcctgcctggttgggagagttctgagaacttccttgcattgtgtgatacagcggtcagtaatcacatgtggctatttaagtttaaagataaaataattaaaatgaaataaaatttaaaatttattttcttagtcaagctggcaatattgagtactcagcagccatgtgctagtggtaaccatattagaaagtatagatataaaacatttccattgattgcagaaaa

SEQ ID NO: 268125 - DNA, 757 bp, Homo Sapiens
caaactctaatttgaaagaatccacaaatggctagctgagaagttaacagatctctatcattcgtctgtgtgtctttcttccctcacctatttttacatgaaattattatttcaaatgaaaatcatgatcatgtgccttttgggagacatggtttctctagaggtatatagtttgtaattacccgccttggtaataaccttcctgtggaactgaataaaaatttttgttttatttgtagagattatgatttgaggtatacagtaactttaatgttctattcttgggaatctactctatctcccatgtttaaacattcttaggagccatttgtggggattcattggacaaatttataggtctcaagggagagtttcaagaagtatctatatgtatactcatggttggggttctagaggcattacatctaaatatttatgacttttcatccaccgaggtaggtagcattaaatatacaagcacagcattatttctctttaaatatctattttggagagaaactttgaggccgtatcacagtttatatcatgcaactaatatttatatttcccaatccactacaaaatcattgctaagcagaagagagcagttatttggcctttatgttccattgtatgcctttttcccctcttccagttttatgcattgataagactacagattggcaccctgctgcctggagaagttccatttatccatagtcattgcagtgcagtaaaccctgatttaaaggaccat

SEQ ID NO: 268126 - DNA, 627 bp, Homo Sapiens
  misc_feature (165)..(173): n is a, c, g, or t
ataattggattttaagcaggaaactaggcaggaaagttgaaattcatagaccaattcaatggaaaacattaaaatgtattgggagatgcccaatattctatgctgtttggtggttcactggtttctaatctattataacggcacccatagttaaaaagcactagnnnnnnnnnggtctgatagttgaaaaaacaacaatcctttgcacgtaggaattattttttcccaacatcataatttctgactttgcacatattctattgaattgccaaaatgactttaaagagtctagtacatgcagggaatattacaattgcaatcattattttaacaccatctcctccccctcttcccttcccaaaagatataaagacataaacatcatctgctgccaaataaatcctgaaattcgagggcgatgctgggaaggtatgaaattagagggaggcatgttgcttttgcactttcagatcaatggctgaattccagacccggggaagcctttcagatccgcatgtaatttgtttaaacaattgctgttcatctgccacagcagcacttggaatgccgcagggaggatcttgcagcatttcttgctcacttcaagaaatcaactataacaaacct

SEQ ID NO: 268127 - DNA, 900 bp, Homo Sapiens
  misc_feature (609)..(609): n is a, c, g, or t
ggccgcttaattaagagggtgtgctggcattttttagctactatgtctgattgggtctgctggtatagacgagcatctaggttattttgaagtaggtcttcctaagtaaaagttttcctattaacccattatcaactaaaaaagattgattagtgttagatttatcagtgtatgttactgacagaatcatgtggtttcctttaagtagctttaatttttggtttttagtttgtttagagaggaggtttcactatgttgcccaaactgacccaaacttgtgggctcaagcagtcctcctgcctcagcccccagagtagctgggattataggcaaatgcctgcttggctagtttttgtttttaaacagcaggtttctaattataaaaacaaatttgccattttataatttttaaagtaatctgccattcaaggtacttactggaaaaaaacaataggagaaataagacagtctcctgtcatagagcttttatcatcttacgacaaatacagaaaagcaacaggtattgaaaatgcagtgaagaatatgctgtatgctgggtaggagaactgccccacgtgaaactttaggtgacaaatccccatcgcatcntattcaggaggcactgctgggaaaagggtcccagacagaatgtgcacaggcttggaggggagagggtagcagcctggccgaagtatagagcaggaaaaggatggcggagatgagaggcaaggagaagccgatacccaaaaccctgggaggccacaggttaaagattttggactttattctgatattggtagattctactgaaggcttgtatgcagggacatgatgggatcaagtcaaatctgcttgcctgagaatggttgaaaagggaggcagggattggtgctagctctc

SEQ ID NO: 268128 - DNA, 456 bp, Homo Sapiens
  misc_feature (23)..(23): n is a, c, g, or t
ccccctgtaaagtatgtggtggnaaaaaaagggtggggaaactgtttaaaaacctttgtcctcccctttcaaacgagcttcctcccctcccctgggtagttaattaaagttcctagtggtgaaacacagccctccaagacgtggaatcttccggaaccgagagctgggaaaatggttctctcccaaccatatgccttcaaaaaggaagctctgtggttactgcgggtccatcacaagttgggttcaaacttgggttccaaattaacagccctcatgtgggacaggcagtgtggcaattaaatttgtttttttctccaaaggaattttcaagtatcaccaaatccctgatacagtgtgtaaacaagacatcttacgaaacagaaagcaagaccacttcgggaagcagcagcacatgacatatctaaaaggctgaaaatggttttaggttcgaaaaca

SEQ ID NO: 268129 - DNA, 432 bp, Homo Sapiens
  misc_feature (308)..(308): n is a, c, g, or t
  misc_feature (357)..(357): n is a, c, g, or t
  misc_feature (402)..(402): n is a, c, g, or t
actgagtttacaacattgagatcaggccctctgagagacctttactcctctgtcatcatatctataaatattcagatattagtggtgttagaaaataaaggaaggactgttacagagctagactttaggtttaagtttattaagcattaggtttacagcctggggcaacatagggagaccccatttctacaaaacaggaataaattaggctggggcttgggtgggcatttgcctgtgggtccccagctgttaagggagacttgagggtagggagcatttgctttgagcctggggggagggtgaaggcntgttaggttgagggtgttgattgttcacccacttgcatttttccagccntagggccaaccaggagctttttaggatttacctttccaagtttcnttttaaggttaccattttttaggggttatt

SEQ ID NO: 268130 - DNA, 759 bp, Homo Sapiens
  misc_feature (237)..(237): n is a, c, g, or t
ctggaaggccattctggacagcaagcggccctgctgagctggactgtgcttcgggctcctctgtggggctctgacctcagggctcccagctcggggcctgtggggccagttatgctggtctgggagtccctcctagactcctgggccccatgacctcctgctgcatgtcccttcccttccccagccctgccaggccttaacctgatcacggggcagggctgggccctctgggcgctntgggacatagacacgtggtcccagggccgtttcagcctgaacctcaggcaggcaggcaccaagctgccagaagcccaggggcttcagggacagggaggagttgaggccactgttcagggggctggtggccgtctccaactccctaggaaagttctctgaggcagaagggggttccctgttccccagagtctgcagccatcagcaaggaggacccaggaacccggcgactgaggtgcttcccaggtgggacaagcccctcttggtctcagccacagcaccccttattccagctgccctgcccaacctgctcaccccacatgaccttctgtgtattcagcaaacactcactaggtgacagcggccaccaggctctgtgctgggggacgatactggccctggcctcgaccagcttagaggtttctcacacctctgttcccaggccccgctcagggcccagcagagagtccgtaggcttgaacatgtgttgagtgcatgaaaaataaatgctgttcatgtgtgtaa

SEQ ID NO: 268131 - DNA, 782 bp, Homo Sapiens
  misc_feature (56)..(56): n is a, c, g, or t
  misc_feature (90)..(90): n is a, c, g, or t
  misc_feature (99)..(99): n is a, c, g, or t
  misc_feature (171)..(193): n is a, c, g, or t
  misc_feature (203)..(203): n is a, c, g, or t
ggcaggaatttcttttgttctttttttgagacagttttgctcttgttgcccaggcncagtagttcatgcctgtaatcccaccattttggnaggatgagncaggaggaatgcttgaggccgacagttcaagaccaccctggggcaacacagcaagaccccatctctattttnnnnnnnnnnnnnnnnnnnnnnntaagataaancaactgaacaaacacatgatcctggtttagatgcaacaaagcatattattggaacaactgaaaaaatctaaataaagtctatgaattagatggtaatatggggtcagtgttaatcccatagtaaactaccctgattttgatgttttactatggttgtgtgggaggatatctttgtatttagtaaatacaaactaaagaaccgaagtataatatggcacatgtctacaacttattctcaaaagttctaagaatctgggtatgcaagggtatataagcacttgtgtacttttgcagcttttatataaatttaaaatcatttaaaaataaaaaggttttagaaaggacactgaagtcagcctgaagagccaatctgagggatataatttgagcatcaaatcaatgtttgtgacagattaaaaccaataaaataacactcatctgaataaatacatgaatgaacagatgaagatgagaaagcttttccttacagtacaatagtaacaaatgaaggaggaatgatagaattacaaaatcaccatgtgagaatcctcatagtaaaaattaattcatcaaaaaaat

SEQ ID NO: 268132 - DNA, 325 bp, Homo Sapiens
  misc_feature (255)..(255): n is a, c, g, or t
  misc_feature (312)..(312): n is a, c, g, or t
atgagacaccgtgcctggcgaagatatttttaccgaaaaggacagagggtgtacttggaggtaagggacccagttccattagtctagccacaataatgtgtttgtttcctcataaccacagtcttggttgggctgctgtaactaaatatcaactgggtggcttataaacaatagaaatttctcacagttctggctgggaaagtctagggttcaaggcactggccagattcagtatctgggtgagaacccactttntgggttcacgggatgggggacttcttgctgtggttctcccatgggcagaagaaatgngggggggtctcta

SEQ ID NO: 268133 - DNA, 542 bp, Homo Sapiens
  misc_feature (245)..(299): n is a, c, g, or t
tccgaaagtgcactttaaataactcacagaagaatagagtggaacagtagttgccaggggctgggggcggggtgcttagaatgaagacatgttggtgaaggaatgaatatgaagttttagttacacaagataaataagttctggggatctaacatacagcatggtgaccacagttaacaatataggattgtgtacttaaaatttgctatgagagtagatcttatgtgttctcattaccaagaacnnnnnnnnnnnnnnnnnnnnnnnnnnnnnnnnnnnnnnnnnnnnnnnnnnnnnnnaacagcatttatgcgaggtgatgaaaatgttaattaccttgatacaatgattgtttcacaatgtatacatacagcaaagcatcaaattgtactccttaaatacacaccaatttttatttgtcagtggtacctcaatacagctggagagaaaatttttaaaaattaacattaaataaaatatgggcttcttctttcagatctcagctatgtatgtaaaatccaaacataaaattaagttctaag

SEQ ID NO: 268134 - DNA, 394 bp, Homo Sapiens
gtttttgtttgtttttaaagcagcctataaaacagagtgccattttcctgaatactaaagatattcccttttttatgcatctggtaagtggcttctttttattctgcagactgatgctctgcctttcccaagatgccacgatgatgaagagtaaccagatacatttagaaaaggtgcctctccggggcccagagctgttgccaaggcgcactggtgcattcggcacaaagcggtgcgggcagaaattaacatggtctgcatcaggtggaggctgtgttaattttccctgtgcactgactgtctaacctaaacatcccatggtggaaacagaaccattagttggtatttctagggaagggacattgagcctcagatgggttaaaacaatatttgc

SEQ ID NO: 268135 - DNA, 355 bp, Homo Sapiens
  misc_feature (281)..(281): n is a, c, g, or t
  misc_feature (288)..(288): n is a, c, g, or t
  misc_feature (293)..(293): n is a, c, g, or t
  misc_feature (310)..(310): n is a, c, g, or t
  misc_feature (320)..(320): n is a, c, g, or t
  misc_feature (329)..(329): n is a, c, g, or t
gtttttgtttgtttttaaagcagcctataaacagagtgtcattttctgaatactaaagatattccttttttatggcatctgggtaagtgggcttctttttattctggcaggactggatggctctgcctttccagggatgccacggatggatgaaggaggtaaccaggattacatttagggaaaagggtgcctctccggggggcccaggaggctgtttgcccagggcggcactggggtgcatttcggggcacaaggcggtgcggggggcagggaatttaacnggggtcntggcntcaggtggggaggggcngttgttttantttttcccnggttgggcactggactgttcttaacc

SEQ ID NO: 268136 - DNA, 676 bp, Homo Sapiens
cagagctgatattaaggaatattttttaatatttacagagtataatatcagatctataaatgtaaattgaaattttcatatgcctattacctatatgtgagaaagtaactatgttattttaggaattctaagttagtatacccagagccatattttagattccttttctaatccaaattaacaatttttaaaaaatctggtaggtattaaatgcaagtgaggagtgtaagaattaaatcagtaattttcttttatttgcctggactcctttctgaaaggactggcttttaaaagatgatagtttactgatgtatagaagatgttctctgaactcaacttccactgtgggttgaaaggcaggaagtattaaattgccaagtacgcaaatcaagcttaacagggggacatgtgtgggttggtatggggtgtatagtgtatgtactcacccagcacacagtggcaggaaaaacggggggaggcaatggcccagaacaatacgcagtgtaccccaaaagtagtcttatgcttcaaaagacttgggaacatgaagggaccccaaatgtaacttggcaaatgcaccctgcattttaggattaggaaagaggagacacagggaatggaattgggtcttagcaaacatatatatcacaagaaagtgctacctggcagcaaatca

SEQ ID NO: 268137 - DNA, 631 bp, Homo Sapiens
  misc_feature (342)..(342): n is a, c, g, or t
caatttactcataatacggcctagctcctgagcgctcttctaattctctaggttaaggtaagataaataaataaattttactcatatcatttataaaaataatgaatctgtgtagcatttttcagctcacatgttttttgtgtatataatcccatataataataataataatctgtaaggtagttaagttctcttcatttaaaatataagaaaacaggctcagaaagtcttctaagatcacacagagtggtacagttggaaaactgtctactaaggattcatactcctcttttagagtatagaactgtctctggggcatcccctgagccagggactacattnatatagaaccccttgcatcctaagtgggatcatgtgactgactgttggcccacagaaacgtggacagaaggcatgggaatcccctttcaaaccatctccataaaatcctccacattttctccttgccatgtgctcaatggatgttgggcaaatactcagggagacttgacagttatatgacaaatgtgataaagccaaaggagggaagaaatcaggttattgaatcaacacatgactatatctaatatatgtgcttattataaggggtttagaactccaattgggcaag

SEQ ID NO: 268138 - DNA, 435 bp, Homo Sapiens
acctcgaagtcatagcgccacaaatgggagcatcccttccctcatctagtaaaaatgagaagaagcagaaattgcacctagcaagagccccaagtacacacaaggccttaatggaaaacttgtattcctaataaccagctaagcaaaccagacgcactggtcaggctggaacaagacattaaaaagttaaaggctgacctgcaagccagcagacaagtggaacaaagactccgcagtcagatcagctccctttcgagcaccgagcgagggatccgctcagaaatgggccagcttcggcaggagaacgagctgctgcagaacaagttacataatgctgtgcaaatgaagcaaaaagacaagcagaatatcagccagttggagaaaaagctaaaagttgagcagaagcccgaagttttgtagagaaacagttaatgg

SEQ ID NO: 268139 - DNA, 202 bp, Homo Sapiens
tacaatcttggaaacagagttgctgtatgctgaaggtctgagagtagctcttagccttgcctatcttagatagtagttatgctgtgcataatttaattgatgtactatgtttgatttgttgctgatactttaaatttgaagtttttctgagaaatggagcagcaatgcagcatcaacttgttaaattacatgttaagccttg

SEQ ID NO: 268140 - DNA, 450 bp, Homo Sapiens
  misc_feature (15)..(15): n is a, c, g, or t
  misc_feature (35)..(35): n is a, c, g, or t
  misc_feature (43)..(43): n is a, c, g, or t
  misc_feature (61)..(61): n is a, c, g, or t
  misc_feature (270)..(270): n is a, c, g, or t
aaatcacccacctanccgggccccccacgttcaanactggggnttacatttccaacatgancatttgggacaagggccaaacatcccgaactatatcaatgactatactgctttgtatccttcaactgcccaaaatagatatttggctagttcattgagctgtcaaaagtagtgcactattacaacctagaatattagcatcaatagaaacaatgccgacgtctccagtgtgaatacatattgtgaacctccatgtactgttacaattgnaatttggcctggtggccaaaaagaagtgtaattagaagcatgacaatgaatatctgagaattgaattttacagtacatattaacctttcactggtccccagactgttaactagtgtcaagttcagtcaaagactagacaagaaacaggagtctttgtgttcttacaaaacataatgctat

SEQ ID NO: 268141 - DNA, 732 bp, Homo Sapiens
  misc_feature (265)..(265): n is a, c, g, or t
ccattcacctactccagggaaagtgtccagtcccctgagccccctgtctccaggaatcaagtccccaaccatccccagagctgagagaggaaaccctccacccatcccacccaagaaacctggcctcaccccttctccatctgctaccactccattgaccaaaactcattcccaggcagcctctttgaccactgcagaagaccttgccagcagctgctcttccaatactgttgtagcaaatggtaaggatgttgagttacttttngcctaccagcagctagtccctaggagggagtctccacgtttgtacattccatcagatttcgtccaaaagctcagtcagacttctgagtcagattatgttatttattttgatagtagctgaaaccatctgtataatacatttagtatatttcaccattttgtatttttttaagtagaaactgagtagtttggatttttatggctcacatctttttactgaagccagaaaggcacctcaaagatgtctcaagctcagcagtcaccgtcatgttgtgatgaagaaagcgaatcaccaggtggtgatttgctatctatttgagaactagaatcactcaacactcattttgaattatgcagaagtggttcatgcagatttttattccagatgaacatgttttaaaagtgcctgaaatatgactgccatatgaatgtgattctgcagcaaaaaacacaaaatagatcatttaa

SEQ ID NO: 268142 - DNA, 324 bp, Homo Sapiens
tgagatggagtctcgctctgttgcccaggctctcttcagggagtgcaaggcagtgcagaggacaccagcagtggggttgactggagcagagtggacgtttctttcctgcagctgcttcttcagtcctcttccagggcagcccatagtgcttcatcaaacatcctttagcctcttccacatgaatgcagaacactccaactattcaacaactttcaggtcacagaccatcatgtcagccatctgtggagtgaggggatttatttgtccttgattaagcttctcagtaatacagggttacacttctgagatcaattgtggttccaa

SEQ ID NO: 268143 - DNA, 769 bp, Homo Sapiens
  misc_feature (731)..(731): n is a, c, g, or t
cagaaataaatcctcagagcgcttatctacttatggttgcagctctgcacttctgggtggggtgtgcatgcttaccttaaacgcacagcctttattgcctattttgtaggcagcccaagagtatgccttggagtatgcattgttgctacagtagcagatcaccgtgttctttgcacaccacatgcaatggtataagaagtccatgctctttggggtatgtaatataaaattcttaccggggctatgcttctgtgtaacatgtacataatagatacttaagaaatgtgctgaaaactacaatgaactggtttccccattactttcctatgggcttgtttacttaaagggacaagatagtttcttcatcctgctattgcaaatgatttcctaaggacctctttcacagtagtctaaaattcactatttggttttccatttttcactcttttcctgcactatgctggttttccggtgctattctttatatacagtagagccttcctttaagcctcattccctggagtttggaagatagaccatttaccaagaatcaaaacaggtactcccaacttcacctctttctagccattcaaacaggcaagtcacttaacctgtctggggtatcatttgcaacctctcagaattgtggtgagagttaaagaagatgataatggatgggaaattggagaattgtaattttccttcaaactgacaaatgcctatgactctgntattggtgcatattgaacctaaatgtccagggcccttg

SEQ ID NO: 268144 - DNA, 682 bp, Homo Sapiens
ttcggcacagcccaaccctctcatctactgcacctgctgggacccctggaacttgggaccacggaagctaatcaagacccctcaactaccacgcaagaactccacagggagttccaagctaactcctcttctaccagctccaaaaaatcacaattacctccaaccaacaaaacctgttgtttccccaaaaatgaaaatccattcagcaaggcaagaagagactaataaatcattttatgaagtgatcaacgtgtcacctggctatcaacttgttcggaatcgggaacagatttctgtcaccttaggggatgagatgtttgataggaaaaagcggtgggaatcggagatcccggacaaaggcagattttccaggaccaacatcatttctgacctagaagagcaaatctcagagctgacagcaataattgaacaaatgaacagagaccaccagtctgcccagaaattgctctccagtgaaatggatctccgctgtgctgagatgaaacagaactttgaaaacaagaacagaggagatgggaaaagaatacaagtatttgaagaatatgtttcgtacgtatcaggacagtatttatgatgaaatggaagagaagtggtcaaaacagaaggcgaaatggaagaaggatgagaagttcgagcgagaaaatatcctgctacagcaaaa

SEQ ID NO: 268145 - DNA, 195 bp, Homo Sapiens
taccgcagctagctgggaaataatcttctatgccactagcatatgattgtactgaagcaaaaagatacataaaataacctgacaaattataaaacccttatgatatgacaataatacactattctagtctctcatattcttgcatactgaaaactaattttacacatggcaaagcagctattaagatttgaaaat

SEQ ID NO: 268146 - DNA, 841 bp, Homo Sapiens
aggttttcctattttaaaataatcaaatataggttcccatcaactgaaatttgctgttcaacttgcttttagaaatggagtggatctgcataacgtagagagatctatcctcacactggtttgtttaaatgcatcctcactgcagttgccagttcctcttggaaagcatggcatatcctaactgttttctgtttctcctcctgtagctctcagtaaattatggagactactgcaaaattcaataaatgctcgcaccggaaaggacagtggaaaatcccaaacttttaaagcttgcccaggaataggaaagctttcttccaggcggttagtctcatggcttacccactaggtcccattctccattggggatatagccactgatatctgcctcctgcatctgcagatccaaggaccagcctccgtaagaccaggacccaaacttcagtttgcagtgctgcacatccaaagggaaaccagcgtacatcgatgtagcaggaactcttgaatatgcctgtgtgggtgatggaaacagaagactgaaacggaagctgactgagatgtgctgaaaatacacagcagttccttcagccggttccgccctccgcactgcagctaacacagtccagagcaaacggaatctgtctttttatttattcgcaaaatctgtaaaacagaatctcagctaagcttcactgtcttttaaaatccaaacgtaacactgacatgctctctcaaagactgttttgtgggctttttgtgcaaaaagttagctctataatctgcatttaccatgagcatcttcagactctaaataataaaagtaaagaatgcaaaataaaaa

SEQ ID NO: 268147 - DNA, 735 bp, Homo Sapiens
ctttagacacatctgtgtttctggagcaaagggaaaccacagaaggccaggagtttgggtgtgcactgggtgtctttcaactgggtggaaccaaactgagtccttgaagtctcgctcctgaggctgcagaagaatagatggcttttccctgcctcgagggtgggataagggaggcaaagctgggagaaagaaagggagagagagaaaacgaatggccggcacaggtgcctgggccccagccttcaagtgcggtcagagcagatccggtggcggagtagggcctagatgaccacggactgcaggaggcggaagcaccatcatgaggtccagcgggatgggcggcttcaagtagtttccatccagccgcaggtagcgcaggtgtggcacgttctccagggtcccagggagaagtcatgggaacgccactaggtcgttggggcaaatctgggttccgttgattttctcgatgctattgttgttgaggtacaggtgttccagcctgttgttgatggcgggcacactgctgatcctgttgtgggacaggtggagcacaagcaggttggagatattaaaggagttcttggggagtcccctgtctgtcagcttgttgtagttaagccgaatgaaggcaagattgggaaagctcttgaagtatccgttagggatggtctcaatcttgttactgtccaggtagagctggtgaatggcggtggggaccctgggcggcatctttct

SEQ ID NO: 268148 - DNA, 692 bp, Homo Sapiens
  misc_feature (389)..(389): n is a, c, g, or t
tcaaaatatatattatagttccatttaggttttagcttagaaggccaaggacattgccacttagggagaatctctgcctctcaacaaatcaaagtgtatttgctttgattagtttcttaactgaaatgaaaaggtaatttggatcatttgttgaacataccaaacccactggtaaattcagccaatcagctataaggagtaaaacaggcagttaatataatttgtattaatcataaccactgcaattatgtaaatgtagcttgaaatgttatgtgttaatttagtatgctactgttgcttctagagaacctacgaatttctaaactcaaaggcacctccagaattcctgaaaggtgttgacactgtcatcagttatgttccccagatgnacttgggtattacgggctaaaagcctacattttgtccacatcctcacaaatatatctgtggtttgactcccaacctagtactctggttaagcacaattaaataaacaagcataatttatcccttatattacattaagagttactgaacagaggttattcatttacatctaggggccggagaaaaaagaagcactcaattgtcttttagaatgtttagccctgaaatctatttttgtacatgagtcttagatgccttctggataagggctcagatcattacaccaaaatgcattagtctatggc

SEQ ID NO: 268149 - DNA, 832 bp, Homo Sapiens
  misc_feature (371)..(371): n is a, c, g, or t
agacaagttatctcccatttctaaaattctgttcctttacacaggcctttatttagatgttttctttagcaactattaaaaaccctagtatgtttattttattctttttttaaaaataaacctggtgtcttaaagtgctttagtgagataattaggccctcagtgaggacagtatatctattaggttgactgtagacaccaacattagcctccattgctaatttgcagttcacaggttaatggcctagtcattttgttagacagatatgctttgccaccttaggtgtcttcaaaaactaaacagggaaactgaggaaggacattgtgataggctgttattttttgaaggtttgcagttctctttgttgggncaagttgtggacaacaccctgttcaagctacacatagaggagccgtgagcaactctctgatgctgtgtatcctaaagttggcttcccagatgccactggagaacaccacggttcagcagatggtttttatgcttctttcaaacctggccttgtcgcatgactgtaaaggagtaattcagaagagtaacttcttacagaacttcctctctctagcattgccaaaaggaggaaataaacatctaagtaatctgactattctttggttgaagttactcctgaatatatcatctggagaagatgggcaacaaatgattctgaggcttgatggctgtctagacttactaacagagatgagcaaatacaagcacaagagcagccctttattgcctcttcttatctttcataatggttgcttcagtcctgcaaataaacccaagatcctggctaatggaaaaagtcat

SEQ ID NO: 268150 - DNA, 744 bp, Homo Sapiens
  misc_feature (523)..(554): n is a, c, g, or t
ctgagattacaggtgcaaaccactgcgcccagtctattcacagaataaatgtctgagtctgccattcaagttcccccaaaatccagcccctctttacctagccaagatttgctatacccaataccaaaagtatataaaatgactataccaaaagtatccaaaatgatacccagatctctaagcctccctattttcaatgagcagcacagagaactcttggtttttccctggaccttccacttaacattgccactaccactgtgattcatggttcccactcccaacagagcaactgaacatgtatcatcccctcaaagaacctgcgctcttcagaatacccactcttcagagctacgtggattctaccaggattactcccagtcaaaaccagaaggcatgtgacaggcagggagtggcaacccaagaagtgaagggtcctctgtgtttgtgatgtcggcattcgaatgttattccattacaggggatggaggaggaagaggaggaaggaaaaaggagggttttnnnnnnnnnnnnnnnnnnnnnnnnnnnnnnnnctgctactcagtgaaagtacaaacagaacctaagtatcataaactgaactcattcaattcttttcagtaaagtagctcaccagataaatacccctgctggttgtttgaattacatatgagtaaactgatctgcttctttattttcaacttctcaaaggcaactgttcacaagcacatcttaggaaacaaa

SEQ ID NO: 268151 - DNA, 594 bp, Homo Sapiens
  misc_feature (149)..(162): n is a, c, g, or t
  misc_feature (423)..(431): n is a, c, g, or t
tggtctgcgctctgtgtgctgggttcactccccacttctgccctggtcttgctgtgcttctctcagatccccttctccccaaggagccaccttcctcaaagcaagccaatggttggctgtgcagcagcaaatgatgtgatctgacattnnnnnnnnnnnnnntccctgcattgtgctgacttatttctcattcttatgcatttgcatgggggaaatgcccaaagaatgaagctgtaaaaatattgctacttgccctttggccatccacccactgagggaagacctcaggccatctggtctcttctgataaatgctctgacccagctctgatggacaaaccatgtctttcctcactatcattttcctgagtgatgacattgggagggaaaaggctagcttcttggcaagcagtttcctgaaggnnnnnnnnntgggctgagggtggagggaggatttattaaattacctgaaaaacttttttgaaatgcacttcctgggtccttacccccagaaaatgaaatttgacctattgggggaccccaaatacacatgttttgaaaaagtgctttaggaaattatcatatgtatttgaca

SEQ ID NO: 268152 - DNA, 722 bp, Homo Sapiens
  misc_feature (46)..(330): n is a, c, g, or t
aagttgaaaagcagcatgaattaagttagaaaatattcattattgnnnnnnnnnnnnnnnnnnnnnnnnnnnnnnnnnnnnnnnnnnnnnnnnnnnnnnnnnnnnnnnnnnnnnnnnnnnnnnnnnnnnnnnnnnnnnnnnnnnnnnnnnnnnnnnnnnnnnnnnnnnnnnnnnnnnnnnnnnnnnnnnnnnnnnnnnnnnnnnnnnnnnnnnnnnnnnnnnnnnnnnnnnnnnnnnnnnnnnnnnnnnnnnnnnnnnnnnnnnnnnnnnnnnnnnnnnnnnnnnnnnnnnnnnnnnnnnnnnnnnnnnnnnnnnnnnnnnnnnnnnnnnattcccactggataagagtaatatcaaaaaatccatatttacctatgcagacattggaaaataatgaagaagatagttttatcaaaatatatgccatacacacacacaaaaaagccacagaatacctacttctgaaaggatataagaaaacctaatggggatggttatttctgagaattaagaaatgtattcaaggctgaagacagacacttctttactactattattgtttaatctgtttaaatattaatttagtaatccaagtaatactaataggataacatttaaattaaaagcctcatttggatttttatccatggaaaataattcaacaatatataaatgttagattcacaaagatgattaggaaaggaaagaaacactgaaaagac

SEQ ID NO: 268153 - DNA, 653 bp, Homo Sapiens
  misc_feature (22)..(22): n is a, c, g, or t
  misc_feature (30)..(30): n is a, c, g, or t
  misc_feature (44)..(44): n is a, c, g, or t
  misc_feature (592)..(592): n is a, c, g, or t
atttggccctgcgcggccagantctcggcncgaggatctttccnatgttgcaaaagggggaaatagttcatttatgtaggtagtacacacactttatatgtttaagtacttacaagcatagtgaatttaagatcaaagacctggtttcaaatagaggcaacactacacagtaatttggaaactgaaaaagtcatccagtttctgtaagcttccttttgcttgtaaaaaacagaatgagctgtcttttaggttcacttttcagcatcctgggtacatgagctgaagtgcatgatggcacatttaggttattcaagcattgtgatattaagaaggttccctggtgctttgatgagctttgcatcctaactgagctcctaaaaattctaagatgaaagttacagacattatgtaatttttttgtgtgtcatagtcttgggggttgttaatgaagaattaagactgtgtcatctgtatgtgaaattgatacaacttacctttgcagcattctcccagcaatccttatgagccccattgtgccccatgtgagcacttttcccagacaggcctgattctccctatgagtgctcacagncttctcctctccccacatgccacattccttccctctgccacgccgagccctatgcagtctc

SEQ ID NO: 268154 - DNA, 694 bp, Homo Sapiens
  misc_feature (361)..(361): n is a, c, g, or t
acatacacagttttcaaaccaagtaccaaaattaatgcctgatataaacaatatgtgcctgaactataaggtagaaaatggatataatgaattaactaagtgttcaatgaagagaacctaaatatctttggcatttattcaatatatccacattcaccaattatcttacatggaaacattctttcttcacatatggcctatgtgcagtaaagggttaactcagcagacctgggctgtccaaaccctgcacattccgaaagtcttcaagactggcccctgacttctaggaaataacctctgggccactgcaatatccacctgacaatagtatcttagtatacctggggctttgggcatgccnagaatagtttatgctaacaatatgatatacggtgaatacctgtctttgtctggggccctgggctacgccatattagtttgacctctggaggggaagggaaaaaggagggctggagactcggcagctaaggtcactcacatgggtgctccatgcctatgtgactgacccacaataaaaaccttgaacaccaagggaataacagcttttctgggtcctgtgagttcttctagcgaatcactgagcctgagggtggtcttgggaacccccaacacatgctaaaatatagcaaaattcatatttaataaaggaaatttcttctaattttaaggtttg

SEQ ID NO: 268155 - DNA, 1155 bp, Homo Sapiens
  misc_feature (134)..(173): n is a, c, g, or t
ataaattaagcaaaccacatgacaaaatagcacatgcagaatgaatgcaagcatctggaaaaataagcatcattttaagaccaatgaaatattttcaacatttcaatagcgagcatacttttgctaacataagnnnnnnnnnnnnnnnnnnnnnnnnnnnnnnnnnnnnnnnngtagtctgtaaatgccatctagtggttttgactatgagtacaaatatacatattcctccaagttgcctaactgttcagcacgatgttagggactacctgctgcaattttctttgtgaacatctgcaagactctgcatggtccagtcctgcttgcctcacatcttcattgcttcgcccttcccttccctcttggggctccagccattctgcacatctgttttctctatgactgcaccatacccttttccgtgtcctaaatcttgtgccatctcctcccttcgtctgaaatatttccctccctatctttgcctaactactggcttttcaagtctcagttcaatgccacttcctttgggaggtcttcgctggcctctctaataagatttagactaaaagctctctgaagtccctggtgcttaacatggtgttgtaaaaccttatgattatttagaatccagatatgcattccttaggccttgatgtttactgggggccttgggtgtttcttaatttgttcaattatttacaaaaggttttttttggggtgggaggtataggctgtgggctatgtactaggaagacaatgataaataatacatggcctttcctttcagggtaattccagtgcagtaagagcgacaattattaatctaagtataataagtattttaggatggtggtggaagtggggacacaaaggagacagcggtcaactctacttggagaggtagaaagacctcatggaggtgtctttgaatttatcttgaaagaagtctaggattttaccaggcaggctgtgtggtaccagcaatgccttggaatttgagacatcattgcacgttacaaaaactgcaggttatctatgtggctgcagcacaaggtgtgagaaggagaggaatagagaaatgggtgaacagcaactgagaggctgaagaggtggtgaggcaccaaatgctgtgggccatgttctagaatttggact

SEQ ID NO: 268156 - DNA, 626 bp, Homo Sapiens
  misc_feature (609)..(609): n is a, c, g, or t
ggccgcttaattaaagtaccctccagcctcctgccagtgtcaccaccaccatactcattcaaatgactgaaaagaatcattgggagatccagtcaaggacacggctagattatttgccactagaaacccaatgcaaatgggcagtaactaacagtattttatttaactgtgccttagccaccttttatccaggtcctattgccggtttggatgtaaaatgttacagcctctgtggaaaacagtttggcagttccttaaaaagttaaatgcagaattaccatatgatccagcaattcccactcagatatttgtataccagtgttcacagcaacattattcataatagcccaaaggtgggaacaaccgaaatgtgcatcaactgatgaatggataaaccaaatgtggcatatgcacacaatagaacattactccacctgaaaaaacaagattctgatacatgtaaaacatgaatgaaccttgaaaatattatgctaagtgaaagaagccagacacaaaaggataaatactgtattccacttatatgaggtacctagaattggcaaattcatagaggcagaaagtagaatagaggttaccagagagtggggnattggaggatgcggagt

SEQ ID NO: 268157 - DNA, 475 bp, Homo Sapiens
  misc_feature (23)..(23): n is a, c, g, or t
  misc_feature (28)..(28): n is a, c, g, or t
  misc_feature (369)..(430): n is a, c, g, or t
taaaattaaccctcactaaaggnataanttcgccgcttaattaaataaatatcaaagaaaaaacactttgaacagctaggagatgggactaaaaaattagtatttgacttaataggcacatccaaagaggtaattattctatttatattgttcctaattagtaatattatagctgttagaacaagtataaactttgaacgtgcttttgaactgtaataccacaaagtattaaagcaagatgttcagaactgatcaagtatattgcagcatatagctcttactacattactgctatggtgctagcaaaatggtttgctggcacttgagtacataagacaatacgatgttaggccaggcgcggtggctcannnnnnnnnnnnnnnnnnnnnnnnnnnnnnnnnnnnnnnnnnnnnnnnnnnnnnnnnnnnnnagcattgtgctcctgcactccagcctggcaacagagcgagactct

SEQ ID NO: 268158 - DNA, 950 bp, Homo Sapiens
tttcttaaaatgcgatcattttatacacattacccttcaacctgtctttttcacttagaaaaacatcatggacagctcctgtgggtcagtagataagcatattctttttaatagctgctgagacttttacttctgaagtgtaaattcgcactgggtataaagcagggcctaaaacaaaaagttccctgcccttttagagcctccccattctgatgggaggggaggccgacaacacgcaggacagatgtagggacatgtcagagagtgatcagtgctctgaagagaaaaccatgggcagtccaagggtagaaagcaacgggtagatggagatgaggagcagccccagcttagccaaattctagtgaaggggcttcagtgcaaaggccctgtggccaaagcacatctgacctggatgaggagaggcccagggggttaggggcctgtaggaatgatgaggtcacatttagcagtcctgggatggtcccaggtgtttgtctgaaggttccaggggtgattctgctctgcagacaggtgtgatgtgcagatgaggaacgactgggtcgtgctgatggaaatggcctgcctggaattatatggagaggttaggctgggatcaggaaggtcacgaacaccatgatctcctcaagctgaaaactaggttctgtccaaatccaccagttttcaaaaggaattgggcattacaactatttgaacaaacttttttttccttcagaactattctagtgaatgctggctttttaaaaaacaggggatgaggaacctaattctgaataaaattgtcatgtgattataggacttgatatcttaattttgttgatacatagtattaaacattctattgaccgccctaaaaacaggattttttgctttgattttctgttctagtctaaagcatcacaaggtagtgaccttgaacaaaatgaagcctc

SEQ ID NO: 268159 - DNA, 1007 bp, Homo Sapiens
  misc_feature (534)..(534): n is a, c, g, or t
  misc_feature (899)..(899): n is a, c, g, or t
  misc_feature (948)..(948): n is a, c, g, or t
  misc_feature (987)..(987): n is a, c, g, or t
  misc_feature (994)..(994): n is a, c, g, or t
agacgccgtgctactcgtttgcgccaccaaacaccagtttgaattcacccagcccaaactaccaaaaatatacatatggccaatccagcatgagccctttgccccagatgcctatacaaacacttcaggacaataagtcgagttatggaggtatgagtcagtataactgtgcgcctggactcttgaaggagttgctgacttctgactctcctccccataatgacattatgacaccagttgatcctggggtagcccagcccaacagccgggttctgggccagaacgtcatgatgggccctaattcggtcatgtcaacctatggcagccaggcatctcataacaaaatgatgaatcccagctcccatacccaccctggacatgctcagcagacatctgcagttaacgggcgtcccctgccccacacggtaagcaccatgccccacacctcgggtatgaaccgcctgacccaagtgaagacacctgtacaagtgcctctgccccaccccatgcagatgagtgccctggggggctacntcctccgtgagcagctgcaatggctatggcagaatgggccttctccaccaggagaagctcccaagtgacttggatggcatgttcattgagcgcttagactgtgacatggaatccatcattcggaatgacctcatggatggagatacattggattttaactttgacaatgtgttgcccaaccaaagcttcccacacagtgtcaagacaacgacacatagctgggtgtcaggctgagggttagtgagcaggtaagttcaccccaatatcaaaagaccttttgaaaaatagaacttaaaagcgagggaacacagtaactttgccatggtttggcacatctttggatgttcaactgactgttcccttgncagagagggttcttttattccttcctttcttctgttccttttttgcagntttacagtttttccttctggaggtttaccacaggagggnggtttcnttttaactggttt

SEQ ID NO: 268160 - DNA, 694 bp, Homo Sapiens
cttaatcccaaaattttctcagcaggaagaaattttccacaaaagacgtgtattcagctgtctgtgggtaaacatgtactgacaaaagtacataatgatagatataaagtgtgaatttttaaaactattttacctcaaaagtaggttgaaaaaagtatgttgtatgctttactgatagctacaactttagaaatatataaagtttttctcagtaattttctatttttgttgataaaattctcatttttattcaagaggaagaatacaagcgattgagtgaagcactagcagaggatgggagctacaatgccgtggggttcacttacggtagcgactattacgacccgttcagagccgacggaggaggagggagccttccaaacagagagaaaaaaatgaggccgaaaatttagaggaaaatgaagagcccttcgttgcccccttaggattgagcgtcccgtctgacgtggagttgccaccaaccgctaaaatgcacgccatcatcgagcgcacgtccagcttcgtgtgcaggcagggagcacagtttgagatcatgctgaaagccaagcaggcccggaactcccagtttgactttctgcgcttcgaccactacctcaacccctactataagttcatccagaaagccatgaaagagggacgctacactgtcctggcagaaaacaaaagtgacttg

SEQ ID NO: 268161 - DNA, 795 bp, Homo Sapiens
ctgctaatgtttcaaattgcctgctggtttattatgttttcccttacttaggcaagtaaagttaagaactattgaagttcacggccatgagggcacatccatggatatcataaagcagcccttttacattttctctctctgcgaatccagccttcagcaggatgattaacagcttcaacctggggaaagaacgcagtctttcctctggggcttcccagacccaagaccctgcccatccccatcacagctctctaagcctgactgcctgtgaggtggggaaagactcaaagaaactgtgccaatcccaatgatacccagggcccgactactgcagggaagcagaaatgatgccttgtaaattggttataaaatggccttgtccaaaggtatgtgactgctgttttcatagttcccatcagcctcagaacgttctccatatttctttcagctatgggaagctggtctcatgcaattctaaatgagttgttgttccagtgtagactctcactgaaccagaatgtggtcaggcagggtgattgcctttttcaagagctgccagcaacctcacattcaactgctctgctcatgtatcatatgtatgattaaccacaacttattccttgaactttgaggtaagacagtgaaaataaacttgaaccatcaatgtattcttagcacataccaccaattagaatattcacatttcagattctgattccttttgacacctctattcccactctctccattcaatcataaatccagtcaattttacctcaaaatatatctcttata

SEQ ID NO: 268162 - DNA, 736 bp, Homo Sapiens
  misc_feature (42)..(89): n is a, c, g, or t
  misc_feature (380)..(380): n is a, c, g, or t
agtcactgggcaagatttggaagaattcttggtttgcatagnnnnnnnnnnnnnnnnnnnnnnnnnnnnnnnnnnnnnnnnnnnnnnnnctaatactataatttctttgttaattttcagtaattagaaattttaaaaagtttctgaatttatgtaaactgagaaaatattctaatgttatcatataacaaagatgaaatatcttccagaaacctgaatttccatctctataaattcctaatgggttgtcatcagcctctgttgatgggaaccttgctacgtattattacttcattcttctgagcagctttagttgtcataaagtgcgtcctcatctttttggctttctcatgttacttttttgtagttttttccacttngaaaacagattctgtgtttccttacatgtgcaagtacaaaccttcagtcattatacagggcagctatttctagttttccttatatgacatatgatatttatcattatcttggtcacctttatctgttattcatgaaagataaaaaccagaagtgaagataggtttttgttatgtcttcagaattctattcatatttatagttgacccttgaacaatgtggagtttagggatgctgactctcccatgtggttgaaaatccacatacaacttttgactctccaaaaacttaacactaataacctcctgttgaccagagctttaccaataacataaacaatcattcaacacatattttg

SEQ ID NO: 268163 - DNA, 687 bp, Homo Sapiens
attctgcagagggaataaaaaataataatcagatctagatcctgtattttgtaggggccaagaggaacagaaggttccctgaaaaatccacttggaaaaggcagattaattgaagaaaaggcatacatataatttcatgtgtatacctgggagctttcagattgaagacccaaaaagatatgggcaaattgtccatttttatgcttaggttcaacaaaggatgggcagctgtgtagaaatatgattggacaaaaagggcaggatctaatggtcatagactaagtggggaacccagcgaggcctgtccgtttagcttcttcatggcttcactgagcagcacgccttccttctgggtgtggggcgggaccctctctggaattggcaaacaaggtaggtccggtcaattcctttgtcctttgtggccaatttttacacagaaaggtggagggagagttagagtaatatgttcaggtttcgtggctggctttggggaaaggagttctggtttctatgattcacctttgtggagaggggacctttgtggtttctaaggccagcctcgggagagaacaggactgggaggcaggagggcaggagaaggtcagagaaaaacttttgctcctgaggctgctgctggggcttcattttggagttttgtttcctgagccccaacagtttaaagagcta

SEQ ID NO: 268164 - DNA, 116 bp, Homo Sapiens
aacaacattgccagagtatgcttgttctaacaatatagatatataaaccttaaaaataataaaatatctcacccaagacttaaaggaagaattctctgaagggataaagattacta

SEQ ID NO: 268165 - DNA, 1016 bp, Homo Sapiens
tgacaagtgtaaacagaatttcaatgaacagattttctaattttctttcttaactcatatattagctagcaatagatctttgcagtagcatgagaactagtccaaaatgacaacatgcatatatccaaaaaacctgttcaagaacccaaagcaaagcaaaaagagcaacaacagtagaaagattgtctacttatatctcactcatgaatcttctattaatgtgactaccctctcgtatctcagaaatagactttaataattaccaaaattaagaaaataatgaaatgatctgtagtttttaaaataactgcacaccattaattacattggtggcttcaatgctaagatttagttttcaaatatcattaaaatatatcctgaccagttactatcccaggaaataaaagctaacacaatggttaacataaaaccaactaaaatatttagtgctcaacagaatgcatttgtagaataatgtataattaactttcgtgagctggccaggagagttcagactgttgcctctatataacaaatttagaaaaggctttattctttctagtccccaagtcacccaccagatagcaagttggccacccgaggatacacggagtttaggcagtgccacagtgggataacatgctaccttagtggcctggaagaaggcttctctgtcaggaaacgatctagagtagatcagagccctggtgtagatgtgcacacgtgtgaatatgtgaaagagtgtaagtgcctgtacgtataacatcacttctgctgtagtcatcatcagtagaagtgcacaattcatcccatgtaaaaagaaggccttcttacttggacatctccaagtggcagcaattagaagctcaaaataatacatccaattttttgactctatattaaaaataattttttttaaagagaaagaagcctttgaagttaaaaactaaaaagtttgtggctttcataatctttaatttctaagaaaaaaagccagctcacttgggaacaaagga

SEQ ID NO: 268166 - DNA, 726 bp, Homo Sapiens
  misc_feature (46)..(80): n is a, c, g, or t
  misc_feature (114)..(134): n is a, c, g, or t
  misc_feature (136)..(430): n is a, c, g, or t
acctgatggccaagctggtttcgaactcctgacctgaagtgatttnnnnnnnnnnnnnnnnnnnnnnnnnnnnnnnnnnngtgtaagccactgtgcctggccgactcttgcacnnnnnnnnnnnnnnnnnnnnngnnnnnnnnnnnnnnnnnnnnnnnnnnnnnnnnnnnnnnnnnnnnnnnnnnnnnnnnnnnnnnnnnnnnnnnnnnnnnnnnnnnnnnnnnnnnnnnnnnnnnnnnnnnnnnnnnnnnnnnnnnnnnnnnnnnnnnnnnnnnnnnnnnnnnnnnnnnnnnnnnnnnnnnnnnnnnnnnnnnnnnnnnnnnnnnnnnnnnnnnnnnnnnnnnnnnnnnnnnnnnnnnnnnnnnnnnnnnnnnnnnnnnnnnnnnnnnnnnnnnnnnnnnnnnnnnnnnnnnnnnnnnnnnnnnnnnnntcaagcaagccctcagtgtctgtgggccccaagtgcagtgtcttccatgctgattgccctgtttctaggaatgcagtagagacagaccagagggtccgtgtggcccgttgctgtgaggatgtctgtgcccacttagtggacttgtttctcgtggaggaaatcttccagactgcaaaggagaccctccagggagcttcagtgcttctgcaagtatcttacagcggtgagtcctgtgttcctacagggcaaaatccacacacacgggggaaggagtctttttaacaatttcaaatttt

SEQ ID NO: 268167 - DNA, 924 bp, Homo Sapiens
ttaacactggtagctcctgtcccattccaagactcactctctcagaccttcccatctccctggctttccatgctcctctccctccacctcctggcttcaactgggtgagggccgtattcctgccactctgctccgcctcagccttgagaactccacgtgggctgggtgggaaggtgctgacgattttcacactgtgtttaccactccatcacctctccatcacctctcaacctttgcttcgacaggtcttcactcacgatttattcctccaggtgctttgatttggagagagtaactttttaattctgttgttttgcagtttggctctgtaggagtgagtgggcgattcaaagatgccggcgtcccgcagtgtgcggtttcgtgcccttaaccacccgcttctttgtttcccgcccctctgctttcgcagggagctcttgtgcttgagttcagtgttagtggtagcgtggctcactccacttggaggtggcggccgtctgaccgtgtgttactgctttgccgacggggcctcccggccctgatgcgtgtacactctgcgggctgcaccgggtggctctggttgggggcgaagctgtgttgactgggagagcgttggaaattgagacatggagagatgacgggagtgcgtttctctgggtttgatctccatcctgttttctcccagacacaccacacctaccttgggggaatgccgttgcctgttccacccctttgttcacttcgcgttaactgctgtggtaactttttcaggatctgtgtgaagaatggtaatgacgtagttgaaaggaaaatgtactgttgtgtgtttcatttgtgtgatttcgtaccaaaaaaatgtgtttgaactatattgtatgtaatttggaagtcgtgttaataaaaccctgcagtttccactctgaa

SEQ ID NO: 268168 - DNA, 593 bp, Homo Sapiens
  misc_feature (135)..(135): n is a, c, g, or t
  misc_feature (149)..(149): n is a, c, g, or t
  misc_feature (454)..(454): n is a, c, g, or t
  misc_feature (497)..(497): n is a, c, g, or t
  misc_feature (560)..(560): n is a, c, g, or t
aatggtaaaaacacattttgaaaaatccgtccagcacccttccccaccccagccccacgtggaagttcctcaaggctgaagccggaagccagagtggccaggaaatacggcccctcaccccagttgaaacccacngaggtggagggaanaggaaccatggaaaagcccagggagatgggaaggtctgagagagtgagtcttggaatgggacaggagctaccagtgttaagaatggtagatgggtttagccaggaaagcaaaacagaaatggacagagagggagagcccagagcatggcatggtgaggtgatcccattactaaatgaacagtagcaagaagcaggcacgtggagcaaacagaatcagctcagacatgaaaaaggtcacactctgtgctttgctgctgtggtacctgaaaattaaacaagtggaattaaagccccagagttcaaancctcacagaggacaccatcctggatcccacgcctgtgaaaagnaaagctggattatagaaacgagcggtggctttttttgctcttcggctcaggcacccctgtgtntgtgcgcgcgttattgaaaatgttacccaccta

SEQ ID NO: 268169 - DNA, 437 bp, Homo Sapiens
gaggcaccttctattagccaagaagaagagatggaagcaaagcttctccagtcaatttgaagaggacagctcctcatacactactggtggggaatgtaaaatggtacaaccactttggaaaacaggcaggttcttaaaaaggtcaacatacacctaacacaggattcaactatcactcctacttatccaaggaaaataaaagcgtatgtctacacaaagacttgttcatgaatatccacagcagctttatttgtaatatcccaaaatgtccatcaacagtgaatggatttttaaaaatgtgatgtctatacaattgaatactacttggcaataaaaaggaatgaattattgacaaatgcaataacaaggctaatcttaaaatagctttgctgagtaaaagatgccagacaaaacagtatgagtacatatattccatt

SEQ ID NO: 268170 - DNA, 516 bp, Homo Sapiens
ctagcatacctgtcattcaggtggaatgtggaacgagattgcccagctgtggatttgaacatcattaaagtcaacaaagggttaaaagttacttcctctgatggatttaaaattgccgcatacacgcaaacaagtttttcaaactgccccattttatgtctttgttgagagacagtatagttgctgcattttaatgtccagattatattacagatatatttcaagtaaaccatgaagaaccatcatagattctagaagctggtgatctgtgcttaaataagcatctcctgcagcatcttttttattttataggctctgtaatcacaatggcattctgaaagaagaccttgaagctcacagagcagctgtccttcaccagctcccaggactcctacctgggggtggcagctatgaaaagcaagtcagggcttactggcttgacattgctgtcgtggtgggatggccattcttgtttccgaatgctccaaaatcaaaaagatctttaattaagcggcc

SEQ ID NO: 268171 - DNA, 429 bp, Homo Sapiens
  misc_feature (329)..(329): n is a, c, g, or t
  misc_feature (344)..(344): n is a, c, g, or t
  misc_feature (397)..(397): n is a, c, g, or t
  misc_feature (407)..(407): n is a, c, g, or t
  misc_feature (417)..(417): n is a, c, g, or t
tagcatacctgtcattcaggtggaatgtggaacgagattgcccagctgtggatttgaacatcattaaagtcaacaaagggttaaaagttacttcctctgatggatttaaaattgccgcatacacgcaaacaagtttttcaaactgccccattttatgtctttgttgagagacagtatagttgctgcattttaatgtccagattatattacagatatatttcagtaaaccatgaaggaaccattcataggattctaggaaggctgggtgattctgtggctttaaattaaggcattctcctggcaggcatccttttttattttatagggcntctgttaattcacangggcctttctggaaaggaggaccttggaggcttcacaggggcaggctgttccntttcaccagntcccgggggntcctaccggggg

SEQ ID NO: 268172 - DNA, 593 bp, Homo Sapiens
  misc_feature (121)..(121): n is a, c, g, or t
  misc_feature (145)..(145): n is a, c, g, or t
  misc_feature (173)..(173): n is a, c, g, or t
  misc_feature (179)..(179): n is a, c, g, or t
  misc_feature (223)..(223): n is a, c, g, or t
  misc_feature (307)..(373): n is a, c, g, or t
  misc_feature (388)..(388): n is a, c, g, or t
  misc_feature (429)..(429): n is a, c, g, or t
gcttcaagaactttgaaaagtgatcatccataaagctttaattcctttcctcttaacttgttcaaaaaaaagaagaggttgacaaactttataaggaacaatcaggcagctcagcagaccnagacccatgtctgacccctgacantcactatcatacccagagttatgtgggntcagtntgaggaagtggaaagacattggcctgacagttaagagttctggnctctatcactaaccctttcacaacagctcagtcatttattttatttattttagagatggggtttctatgttgcccagactggannnnnnnnnnnnnnnnnnnnnnnnnnnnnnnnnnnnnnnnnnnnnnnnnnnnnnnnnnnnnnnnnnnacacatcagtcaccnacgcctggcgagctctgccattttaatcattcagtgtctcngggttccaaatctgccaaaatgaaggaagcttcccagtctcaactttataattattgtggagagaaaataatctaacctgtgtacaaaagacacaatacatactatataaaaatcttgtggtattttattataaaatcaaaaggtcatgacccaaatagttgac

SEQ ID NO: 268173 - DNA, 765 bp, Homo Sapiens
ggcttggggattcacagtcttggttggccttcaggtcctgcccaagtggcgctggccccttgtggatatctattatgtgctcttgcccatgacctctttagtcttctccttatacgagtattcattcggccatgagctttcctacggtttcagcatgtattttggagaaagcagataagccaaaccatttagtatcctacaaaattaagcatccctcattcttatgaaggacagttatggacatagaccctaaagaattcatcaggaaattgactccaggaatatttgcttggcaagtctgcttttggtgcctgagagcagataggttgttgtgcctgatccaaggtcacagatttcaggactgtctccttcacagcgatagcttagtattttgaaagctgaagttctggtgctagcaattctattcaattagtcatttttcactaaaggcacactaaagaaaaatgtggttcactcaactaccaaggtttcttgatagaaagtgaccataccctttacaagcctgatattggcatagacagttgattttttttcctgtgtcctttactcatattgttatttcattcaaactcataagcaatgcagttaaagttggggttacatagcgggttgttggacatgtttgaaggatggggaatttgagacagagagagattatggtgtacaatctggggaaggagccaggacataaaatcaagtctccagactgtcaattgaatctacccattatagacttttctgggc

SEQ ID NO: 268174 - DNA, 653 bp, Homo Sapiens
tcttcattagcctgttgatgtggtggattagggctacattagtagattttagaaccagccttgcatacctgggataaatctctcctggttatggtgaataattccttttctacattattggattcaatttactaatattttgttgaggatttttgttacctgtgttcatgaaagatactggtctgtagctttcttttcttaccatctctttgttttattattattagagtaaggctgctcttttagaataagtcaggaaatgttccttcggtttttaattttctgcaagagattgtagagaattggtatcacttttttccctaaatgtttggaataattcaccagtaaaactgttcaggcctggtgttttctgttttaaaaggttaataactgttgattcaattttctaatagatacagatctattcagattattgatatagtttctttaatagttaacaggtttgttcaggttatctgtttttctttgtgagaactttggtagattgtgtctttcacagaatattggcttatttcatcttactaaatttttggtgtacagagttgttcatagtattcctttgttgtacttttaatgtacttgggataagtaatgatgacccctcttccatttgttacattagtaatttgtgc

SEQ ID NO: 268175 - DNA, 730 bp, Homo Sapiens
  misc_feature (713)..(713): n is a, c, g, or t
ggcacgagattagaaatcaagaaagaggcaagctgcaggctatctaataataatacaaataataataactaacaattgcccctctcttccatccttagttcttagcagcctatgtttattctcaaagaaagtcttcttccttcatcttagtttatatggtaatagaaatgttagtttaaaaattgtgttctacaccacatgctgatgaaggtagttttagcattagatttacattaggaaagaagactcagaaacagggtactaggtaaccgtctctttcacatgttatctcatttatttctcatgggaatcctttaaggtccatattgttacccatttacttgtacaaatgtggaaaatgaagccctatagcttccaataaatgtggtctcatgaccagtactgacctggagctggcttataccagatgtcaaaagccaattattaaatactcagaatttctgttggtagtatgaaatcacccatgatgggagtatttataccttggaaatctgcaaaggaggaaaaacagtgctctagtcctctggtcttaccaccccttttagggagtaccagcccaccagcaccagtttactgacacagattcaaccccaggttggtactatacaaaaagcacattttcattcctttctttcaagatgacaaacttttggattccctaaagaaattaagaactgttacccagaaaaaangggttttattcttttgg

SEQ ID NO: 268176 - DNA, 491 bp, Homo Sapiens
gtgtgcagcctgccctgtcactcccccaccccccgacccgcttgctccttgtcttttctccctctctgccccgcgcctaggagtataataagcttcacagtggcagggtctgggcctgctgtgttcactgctggagcctgagcagggcatgtattttgagctcggtgactatatatcaagtcatgggaagatgcatatcagagtgatttcaaaagtggaattgttgggaaagttgcagttaactttgtgtgagagacttgggtactacagatctctttatgaccaaagtgtctgctctacccaaaaaagaaaattacttgtgttcccctcccattttgaaattttgttttatttatttaaatgccatactgggagccagaataattaaatattggattattctgtcttttccccaacatttctgtatttctaaaaaatgaagcagttgggtaactctgaagaaagaaaaggccaggcacggtggtttactc

SEQ ID NO: 268177 - DNA, 547 bp, Homo Sapiens
  misc_feature (215)..(215): n is a, c, g, or t
  misc_feature (370)..(370): n is a, c, g, or t
ccctaaggaaattagcatcggtaaaatgcaagtctcttcaatgtctccctaatttctctactagaagaagtcctgctccattctccctgtagcatcacagatttttatcagtaaaatcaaatagcagcaactgtctctccctcaaggaagccagtggtagcagcagaaagagcctgggcttgggtgttggctcagctctgggttgaactcccccnagttgagatttgcaagtttcgaacggtttcccggaattaaatgagatgtgtacaaattgccttggcacagtgcctgacattcattcactcattcattcatccgctcattccttcactagacaaatatctgtcaaatgctcacctggtgaggggtnctccctaggcactgagcatatactgtaagcaaagacaaagcccttattgctgtgggacttaagactctagtgagggtgccatacaggccacaagagcttacccccctagacactgacctcatttgagcatcaagggaagcctccccagaggacatgacctttgaacatgaaatcagg

SEQ ID NO: 268178 - DNA, 335 bp, Homo Sapiens
  misc_feature (273)..(274): n is a, c, g, or t
  misc_feature (282)..(282): n is a, c, g, or t
gctctagaaccagttgagattagtactgtacaatggtatgctttgattgtatttatagaaatataacataaaacatggaccatgttttgaaatcttagaggaattctggtttaaaatctgaaatactttaaagttttctatccttttactgattatgcagcttcttataacccccaaggtacagattatttcagcttaaaagaaataattggcaccatgttctgagaaagattttgagatatacattgttttttggttttgagacaggggtcnnacttcttngcctagggctggaagtgcggtggcgcgaatcttggcttactgcaccctctggc

SEQ ID NO: 268179 - DNA, 908 bp, Homo Sapiens
  misc_feature (819)..(841): n is a, c, g, or t
atgttaatgaccagggtttgggtaaaggagttcatagcttatcaacaaaccaagttttattgtttttttaaactaaaacggattcacttaacaaatatttaggaagcatcagagccaggtcttgtcctaagtgctgagaatcctgtgatacacaagacaggacaggccttactctcatggagcttagtgtcatgaggagagacaaacgagtgaaataccgggcaagaacatttcagagggaaacctatggagtttcccagttcatcatctgcaagccactcttcagcagatgatgaactgtggatgagttttgcaactgttcaagataaggccaactcccagtgggttagcaccaaagccgagtgctttgtgttcctccagaatagtagctgagatgagttaacagtagtaagagtagtaagagttgtcaactcttactaccattagggaaataacacagagtgatgtggtagacagtgatgggtgtggggacagaagggtcagggcaggctatagcatgtaaggatcagggaagaaccttctgaggcagcaggagcaggtgctgctaaggcctcacagcgagaatggatgtgctttgtacggggacaagaataagcacaggagcgtacaagcccagggaggcagccgtgtcaggggaagtcggagaggttagttaagtcaggtaaacaatggctgaccatgtagaccatgagaaacagtttagattttattctatgtgcagctctaagccactggggggttttaaacaaattcctgaatcggaggcattgctaaacctgtaacatagttaaagaattnnnnnnnnnnnnnnnnnnnnnnngtccttaacatctcaaagacactggcatctccaaagtgcggagctaaagttcctctttttgcaaaat

SEQ ID NO: 268180 - DNA, 685 bp, Homo Sapiens
ggccgcttaattaaaaacctgtacacaattattcatagaaactttctttaaaattgctaaaaacgaggaagatctcagttatccttcaactggcaaatgaataaacaaactggtacagccatgcaattgaatactgctcagcaataaaaaagaatgcactgccagtacagcaacatggataattctcaaatgcattatgccagttgacagaggtcagactcaaaatactatgtacagtgtgaatcctacttatatgacactgaaaaaagcagtactataaggacagaaaacaggttagtggttgcccaaggagtgggagaagcagccagggagaactttgaggaggtaaaaatgtgccaggccttggtcggtggtggtacataactgtgcatttgtcaagactcagtgctatacgctgaaaagggcaggttttactataagttgtacctcaataaacatgatttttaaatgattaaaactttggtttttgtttgttttggttcagttttaaggtttaccataaatctattggttttagattctaagttgtatataagcttctgttttaaaagaacttttttaaaaatcctcttatcatcaacaatatttagttgtgctggaaattttattttggaattgtttaatagagaaagacaataaataatgttcaagaacagacattgat

SEQ ID NO: 268181 - DNA, 1511 bp, Homo Sapiens
  misc_feature (60)..(60): n is a, c, g, or t
  misc_feature (170)..(224): n is a, c, g, or t
  misc_feature (815)..(824): n is a, c, g, or t
  misc_feature (1364)..(1365): n is a, c, g, or t
tagcagcaggtggcaggctgttaaaagacaggctgcctgaggagcctggagcaggtgganacaggtggaagaaaccggccacagccctgctttaccgggctcacctctagggcattccagcaagaggctgatgcaggagaatggccagcaccaaaggacatttaaaagannnnnnnnnnnnnnnnnnnnnnnnnnnnnnnnnnnnnnnnnnnnnnnnnnnnnnnggcacacttgagctgactcagtgcaggtttaatatcctggtgacttgcagtcacattctaatgactttcaagggccagaatatggtgaaaatcacttaaaatatccgtcccttccatgccttagtttagcaggtaggctctatcttttgccatttctgtattttatgtgctgtgttcccgtttcactgggtatgaactgtgaaatggactgaatcctggccactttatgagtttgtttggttttataaggcatttcaatgtacattctataaatacaagcactccatttgcaaacagatcttaagctaatattttctttcccattcatcttgccctccccctcctcccgccagctttaaagttcagtggagaagccagatggcaattcagacaaaggtatactcttcctgcttcatgggtggtggcacgggaatagatagcccttagccctttccctcccagtcccagctgagccctcagaccacttgcttcccacataacaatgtcgcctccatttccgaggaacatccttgcgtagagaatgaaatatgctgcaatcatttctgcatccttactcctcacccccaaagnnnnnnnnnnggcctagcagggaagcagcatgcaggcttcacagcttaatgccaaggacagcgagtgaggctgggagcttctcttgggcctgctgggtctgtcagctctcggaatagggacagtccttactggtgccccaaggtgggacttggagaatattttgcttggcatatgtttggtctgaatggtgtagttgctggttccctagagaggaaaaggtggcaggcccagctttgctgggaaatggctcttaatttccagttgaaaccctagtagaattgtgaatgaaaacctcaaggttgagcccctctgccaagcagcagagctagtagaaggggatgcaggggcaaagcactcagttgccaagcaaggaggagagatgtacgtgggctgtgtggcagtccccacaccctgccctggcttcttcaggttatcgcaccactatggaatcctttgcagaatggtactcatataatggtttaaaacaacacattcataattgactctgtgcaggatgtcactcaatcagtttgggtttgctttattttnngttatatatatattttttggtatcctgtacattgcagtgggtgtgaagatagtattttaatatttgtacaaagtttaatttaattttaattgttctatgtatataactgcatttctaaataattaaaaaaaagttcttatgaagga

SEQ ID NO: 268182 - DNA, 768 bp, Homo Sapiens
  misc_feature (422)..(422): n is a, c, g, or t
aagcagaaactgctggaaaagtaccaggctgtgagatgtcctgggtttgaatagttgtcagggtctctgggttgtatgccttgggctgaatctgctgctgtttttcattttcagaaggtaggtgggaagatgatggtgatgaaaaagagccatttcctgctatgtttgagatgttttctaatgtttgctgagttgatccaacagactttgtagtcttaaaaatagtggaagatcttttttctgctgttacttccattggagtaacatcttcactcttaatcatactgcttggtatgagtggagtcatcagggcattagggataatatttaccttatctaaattacatccagtagttttcattgctgcatatacacacacacaaaaagaaaagtttaaaaatcacaaaaattacccaaactanttccattcctaaaatttgttattagcccatgatttaaatgtctatttttttggatgctacaatggtagcatgagatacaaacctggtatattaagatatatcttcccttttatgaagtgcattggctgggggacctctggaatgggcctggaactatagcttaaatattaataataagcttaagcagttcaattaccaagctatattccccaagacggttccaagtgccttgaatcatactacccaacctgaccaagagtatattataggatacagcttaaaaatctccaggaggataaagctactcaattacaaactacactctcctcttagcatactagctatc

SEQ ID NO: 268183 - DNA, 812 bp, Homo Sapiens
caaaatatagctaagtaatttttcctgctcctttgaggccatgttctttcatggtgagggaggggcagagaaaatagaggctcacaaatcccttttcctgtgactcccacaacttaggccaggggccttcttgagcctcataatgtgtgtgtgtagataggggaaaggaggtccacttccagaattttccctgtgttcttattcctcacttatgctaccgttggctcagctggcccgaaccaagatccatagccaggtttccatcactgatgagctccccaaaacagggtgaccttcccctcctcgtggggtaaggaaagctctcatatcattggacttcaggcaggaagggtcagttggaaagaaacctttgacgtgagcctcttgatgtctcccatggcctctgtgccctccatggctggcccaggccttctgtgcttatgccccaggaagcatgtggccagtgaatgaatgcaccccaggatgcctccttcttttccatgggagcccagaagatgccacttgggagctcagcgtcctgggtgtctagaaaagtttctgggtgccagcagtgctgctccatttggtacagcaggtgccaagcctctcaatggaggccctttggacttctatgaaaaattattaatgagcttccagactttcatatctggcatttattctccaatggatacctgaggaaaaacctttttcttcatcaaatagaacttgaggagaaatcaaaaagacaacttcaggaggcaacagatgggaagtgcctgcctttaaacaaaacaaaacataaacagctttat

SEQ ID NO: 268184 - DNA, 395 bp, Homo Sapiens
  misc_feature (92)..(92): n is a, c, g, or t
  misc_feature (265)..(265): n is a, c, g, or t
  misc_feature (268)..(268): n is a, c, g, or t
aaaaggtttccttttccccaaactgaaccccttccctgccctgaaaatcccaaatgaataatgaaaagctttcccttaacccccacgaaggnaggggaaaggtcaccctgttttggggagctcatccagtgatggaaacctggctatggatcttggttcgggccagctgagccaacggtagcataagtgaggaataagaacacagggaaaattctggaagtggacctcctttcccctatctacacacacacattatgaggctcanagnaagccctggcctaagttgtgggagtcacaggaaaagggatttgtgagcctctattttctctgcccctccctcaccatgaaagaacatggcctcaaaggagcaggaaaaattacttagctatattttg

SEQ ID NO: 268185 - DNA, 483 bp, Homo Sapiens
  misc_feature (16)..(16): n is a, c, g, or t
  misc_feature (29)..(29): n is a, c, g, or t
  misc_feature (41)..(41): n is a, c, g, or t
  misc_feature (91)..(91): n is a, c, g, or t
  misc_feature (144)..(144): n is a, c, g, or t
ggcctaaatccaaacnggttccagttaangttccatggganaattccagtccagaatccccttcctccttttcctggcctaatcctcctgncctaaaaggtgaagaaaacccgccatgtccctccaggaatggcctgccagcantctcccgggcattaatgcattaacacagcccatatcccaaggccaataaaaggactgttcccttcctcataggcctcttttttgaactaaggaacatctgcagatcacatctgtcaggacttaactatacgtccatgctaaaaccaatctttggcaaaggaaatgaaaccaccctgattaccttatatgaggggttggcaaacggtggctgatgggttaaatctgtcccattgcctgtttttgtatggcctgtgagctatgagttttacagttcttaaagggttggtaaaaaataaaaagactactttgtgatgtaagaaaattacatgaaattcaaag

SEQ ID NO: 268186 - DNA, 897 bp, Homo Sapiens
  misc_feature (37)..(37): n is a, c, g, or t
  misc_feature (303)..(303): n is a, c, g, or t
  misc_feature (763)..(777): n is a, c, g, or t
  misc_feature (849)..(849): n is a, c, g, or t
gtcgtggagtcggccgtcacgggattcccgtgggagngacctgcctgaaaagagatgagagtttctaatacattgagagggaaaaatactctcgcctcttgtagatttcctgggtgtggcctggaagcggcctgaaacggcgggacccgccgcgtgtcttttcccttggcctcgcgcgccctgtggcctgtggcggtgctatgctgctgagggtgggagagaggctgcttttctgtgcgctttgctctcagagtccgtccgaggccggtgcacagaaaaccgcacggatgttcttgacattgnacaagtgggagacaccagaacctccgcgccgacaccgggttatctaccttcgccctgccctgtggagtgtggaaagggtgggagtccctgctggctgccgagtcaactctggcattggggcctggctcaggtgtgggctcccgctgctctgggttgggtacatgtgggctgttgccggctgtgtggctgatcctggcgcttgcgggatctcaagcaggcaaatccgaagctaccgactaaaactgtctctgtgcccacgacacgctttctttgaaagagggtacaggtcagaaggctttatcacgacgtttgaatccttaccgaacgctacgaacagagaccttgaaacctgcaggtacctcctactctgactcagcaccaccctgcctctccccaaatttatgggaagaaaaaggtctgggaaccttttctaggggaagacttgacttacctggggggnnnnnnnnnnnnnnnaagtaataggcaacactttgcttgcctgtaggataggattcgcaggagttttgcagttcattcagtttaccngtttttgaatggcctttcgttcccccaaggccctgtggtcttcctcct

SEQ ID NO: 268187 - DNA, 823 bp, Homo Sapiens
  misc_feature (336)..(345): n is a, c, g, or t
  misc_feature (531)..(531): n is a, c, g, or t
ggtagaaagcccagtggtggaaagctgtggtattgccataggcctacaaacattgtattgtcaaccttgaaagtatagcctacttcctaaggatgttgatgttcattgtagttttttatttatagtagctaaaattagaagcaacttaaagcttccaaaaagagaacaatacttttgaaaaattaaggcacatcctactttggattgttgcacaactattaaagtttggttttcaaagagtgtttaaaagacaccaggagacttcttcttttcttcttctggccaagatgaagtaaaagggactcgatttatttaccccctcacatgacacaatgnnnnnnnnnntgaacaaaatatatttaaagaaaaactgtttggaaggcattggacaccaggcaacacaggacagtgattcccaaaagatagaaacaaataagaggagtagtgtggttgcctggagacaatttccagataccagccccaggaggagcagcccaggcatattctggaggtccctctgaactggggagnccagaccctggaatctgaagaggccacagtggtttgggtttgcagggcagattaccagaaagaagaaagctgcacagagagaacactctggctatctcccaggaggtcctaccctagtgtttaactaagtactggttagtgcatatgtgtgagaaaactatctgaggccagagaaggagagggaatattccttaaagttcacccaggggccgcaatagagttagagctaataaaccaacaaggagataaaatggaatcataaaaaggtatacagtaattccaagagaagtga

SEQ ID NO: 268188 - DNA, 727 bp, Homo Sapiens
  misc_feature (32)..(32): n is a, c, g, or t
  misc_feature (45)..(45): n is a, c, g, or t
  misc_feature (62)..(62): n is a, c, g, or t
  misc_feature (75)..(75): n is a, c, g, or t
  misc_feature (86)..(86): n is a, c, g, or t
  misc_feature (227)..(227): n is a, c, g, or t
ggagaaggcacggctgcattcttaccatgccnttgctcgttaacntgacacacatcactccntgctcacggtccntcttggccacntggtagtcatgtggccccacctggatgcagaggaggccaggatgtgcagtctccacatagtgccttcccagcaacaacttttgacttagatgggggccatggttgggtgggtgaggccagaagaaactgcctccggcaagnaggtagcagccgctcaggtggctctgctggcatcggagcccacagaagtgaggagtggccgatggacctgccctccaaatgtgcctgactctgggtcttgctgtcactggatttcctggcatggcagacagaaagaaagatagtttgaccaagtcgtagaagctgatccagcgggtaaaaagggggcagggaactcgtcccttttattcttgcctcagagctgcctgaagacatgggccaggccggaggctggacaactttggataacgctgacctgtacttccaagtaaatgcctcctgaagagcccgggacccttcctgggagaattctgcagccagaatgaaggtgccatcagcaggaggcactgtgaagcaccatcctgtcgctgtccttgtccattcctagcaagttaatcgtgtcttgttaaccagcagttcctgttcaacgtgtaaagagacctgatgttttccctaataaagctgataacagattttgcaaa

SEQ ID NO: 268189 - DNA, 1133 bp, Homo Sapiens
  misc_feature (812)..(812): n is a, c, g, or t
  misc_feature (869)..(996): n is a, c, g, or t
ctcgtgggacctccctagtataagcattacagagcaaattgaccatgcctgcaggaagatttaatacagcagagcagcaagccttttatgcctaaaaattctaaagttattattaaaaagatgtgtatttaatttagctcatgtctttaagacaaagccatctagtggatatttaataaatacttgaaggaaggaaataaaataccaataccaatattacagatgtctgtaaatcccaaataattgaaatcttgcaggtcaaaggaatagtgattgcttctaagaaagaggcaagttcaaagaagttctcttgctaattaagagaactaacttactccaggcaaaccaaggaagacgatggaaaggaggaaaactatacaaatattttcagggtgtggatatgggtgtttcagaaatcaaatggggaaagaaaacaaaaggagaacagaaagagttaccgatatcagcaatgggaaatggaagagacaaattcctgaaactgtggggaaactattgctaattaacaaattattttgagaatggaggagtgggttgaatcataaaatgataaagtatatttaaatggaaataaagactttcataacctgaaaaaatcagaattatgtagtcgtatagaagactttagtgattttagtgaaaagaaaaattattcattatctaaaatattagatgacactaacaaaaataacttaacaattagtaaattcaccttacttttatcttacacattcatgcaaacatttcatgtaagttttcttccttaggacctttaacgatttttcagtgatgcnagtgatgatatgtaatatataataaataaaatcaggccaggtgcagtggttcacacnnnnnnnnnnnnnnnnnnnnnnnnnnnnnnnnnnnnnnnnnnnnnnnnnnnnnnnnnnnnnnnnnnnnnnnnnnnnnnnnnnnnnnnnnnnnnnnnnnnnnnnnnnnnnnnnnnnnnnnnnnnnnnnntgcatgcctgtagtcccagctactcaggaggctgaggtgggaggatggtttgacctgaaaggcagagattgtagtgagctgagatcgtaccactacattccatccagcctgggcaacagagcgagaccctgtatcaa

SEQ ID NO: 268190 - DNA, 645 bp, Homo Sapiens
  misc_feature (46)..(63): n is a, c, g, or t
  misc_feature (349)..(349): n is a, c, g, or t
  misc_feature (384)..(396): n is a, c, g, or t
agataaatggggcaaacagaacaacaaacacaagagttgagcagcnnnnnnnnnnnnnnnnnntgccatctacgccgttttagtgtgagggacactgggaacgatgcccagaggctgctctcctcccagcctcaaaggttgtcagctccaccagagcagggtcttctctcctcatgccaggaactgagagaagtgggggtaggggaccactaggtctttgccactgtatcttgagctgggggactcctaacttctccgagggccacaccccatgcctgccttccccaccccatggaggaatgtgtgcatgaacagaaaaggagaacgagcagcgctaaggtcctccatncaggccccaggcccatctctggcaggcagtgcttnnnnnnnnnnnnnggacaaataaagcccagtgcaggcctttggctgagaggaatgagaattgctaattaatcaccaggcccaagaggatatgaaagaatagcaaagagaagcaacaaactccaggctcttctacctttgagtaccatggcaatgaggatcccgccgcatcccctacccacaggctgtgacagggcctcacttggatccttttatcatggaggaaatgaggtataggctctgcgccttttcaagctttccttc

SEQ ID NO: 268191 - DNA, 688 bp, Homo Sapiens
  misc_feature (85)..(85): n is a, c, g, or t
agcaaggcaagggcagccagcaggaacatgacgtgagttatgctgggtgatcaggtattccagaaggagactgtgcacacccaancaccaagttttaaaagactacacagcaattacagcatgtcaagtgcaaaccactagagacctgaatgaagcagcagtggacactctggcctctcagagcagcagtcagtgcttatggaagcgtctgacgaagaatgttccatcgacaggaggcactgcaggttccgggcaggtagggaagggcttcactgagaggctcacccacagccagctgggactctgctgacacccccctacacacactcttgaccagcaccaccgggctcgcgtaaaagctcaccttcaagcaagctgctgcgcttctggaaagcagacaaccagggcagacacaaaggagagcactctctgccagtgaacctcctgcgtttccagaacttcttgcaaatggccaaccaactcctcttgcactcagcatcacaaagagcctgcggtacagtgaggtgagcagagggtgtgtccgcgcaaagctccactctctctgcatcttgaacagcatcagatgcttgcagggggagaaacagacaaaaacttcaagtcagagatcaaaaagttgtgagtttttgtaaggaccagccccacagggtaggtgggctctccccggtgt

SEQ ID NO: 268192 - DNA, 364 bp, Homo Sapiens
  misc_feature (62)..(62): n is a, c, g, or t
  misc_feature (334)..(334): n is a, c, g, or t
taagccaccatgcccggcccacagcaagctttcagttgacatctgtaatattttatttcttnaaatgccaggaacattagtgtttttgtattttatcttatgcttttgatattgtctgaaatcttttgtatttaacaaattataacgaaagtacagacaatgaatagataaatgtaagtagaagttctgatattttcttgcccatcccaatgggttttgggatatgtccttcccacgacaccactgctttactgtaacattgagcacactatatcaattatctgtttagaaatttgtctcttccccttggctgcaagcaacttcaagtcccagnaataagaatttagtaaatattcacataata

SEQ ID NO: 268193 - DNA, 703 bp, Homo Sapiens
  misc_feature (511)..(511): n is a, c, g, or t
  misc_feature (591)..(591): n is a, c, g, or t
  misc_feature (628)..(628): n is a, c, g, or t
  misc_feature (669)..(669): n is a, c, g, or t
ctggctatagagcgtggctgctcttcgctccactccattggatggggagatgctggaattctgttcctcccccatgctgctgtctgggagatgtagcagagacctcttctgataggaagggaaacagatccagatggaggaaacatctgataaagtttgcctaagcagccagcagtctatcaatcatgactcttccaacccttatcctgcatctatatctagattcaaagaagtccatgcaggaggcagtctacacttttcaagagaaaatggaaggacttcagagttgatttgatgaagctcagtaaaaaacataattttatgtttctcttttaagttgttggctgtttgtttattatgaagccatttaaagagttttcttgtttagcagtgtatatatactgcagatcatggttactgagactctagatgacagaagcgtgtagtctgtgtccttgggtgacttaaaaataaaagcagaacttttatacctttttcaaatagtcaatcnattactaacatgagcccactttgtttttaatagggaggaaaatgtgttgtggtgaggcaaaaagtagttccttaaaaggncatgaagggtgtctcagcagtggtggcctgccttggnatgaagtgacatagtccaaatccacatgcattttaccaggntatccaaagaggggcggaaacgcccaagcccagg

SEQ ID NO: 268194 - DNA, 575 bp, Homo Sapiens
  misc_feature (66)..(188): n is a, c, g, or t
tgggcttaagtgatcttctctccccagcctccgaatagctgggactacaggcacatgccaccatgnnnnnnnnnnnnnnnnnnnnnnnnnnnnnnnnnnnnnnnnnnnnnnnnnnnnnnnnnnnnnnnnnnnnnnnnnnnnnnnnnnnnnnnnnnnnnnnnnnnnnnnnnnnnnnnnnnnnnnnnnnntgcaccaccatacctgaccaagattccttttttaatatatacttcctccctcctccattgctttgaaattcttccctaccaaattgcatttacacataataatttttgtcttccatgttttattaatcaaagacagttgcctatctgaagtctaggtcagcataagccaatgtgaactcagtatagcaacactattatctgattccaggttacaggggagaaaagaaactagggtatttcacttgttaattatgcatttgagatataaagccttgctaatgtcatgtatgtatacatccagaaaatatgcaaaatctagaaaccatgcagaaaaagattgataatttgaactacatcaaagcaaaaattatcagaccagaatgccag

SEQ ID NO: 268195 - DNA, 681 bp, Homo Sapiens
  misc_feature (377)..(377): n is a, c, g, or t
tagcttaatgggtatgtagtgcgtctaagattctcttgcacaagattaaaattgttgtacatgttaaatgtttccagatggagaggcctccaccagagccaggaaggggtggcggggggagggggtggaactgttagaagggaagcggaagagcagcttgaattggctactatggaggagaacacaagggaaaaaaataggtacaaggaaccccctgtccacaatttttggagcaggaaccccctttccctgggtggtagtgacaaaagcattcccatgagaagtggcctctgttgggagccctagaaagctcgattaaacatactgaaacccaccctaaggaagaataactgaccccacttccctctcctcattantcccatccctgggccccaccttctttctgtgactcccctaagaacattcccctgctatgttctgtctttgcccaggcgtggatctttatttcacatttgggttctaaatttcaaacccagctcagtctggtagttttaacagttgtagggggctgggggtggaatgtgtttgaattctgagaaaaagtgcgcaaaaatcttcttggaaatcagcattgttcccattcatcattgtggctcctaatttgatttgatgagttaaatagaaataaatcaaaaacatgtggatcaaatttatgttaaa

SEQ ID NO: 268196 - DNA, 803 bp, Homo Sapiens
ctgggtcaaagaagaaatgaaaaatgagcaattattttaatataaatgaaaatgaaccattctatatcaaaatttgtgaggtacagctaaatcaatatttataggaaaacttataacattaaatgcttctattataaaagaaatgtcttaaatcaaaatatggtctccaaaacaatgttagcatctcgtgggaacttgttaggccacagcaatctgtggccctctagggtgattctgatgcacattcaagttttgagaaccactgcatatacgattggactgttctttttattgtgctagggtgtgttcttcagcaaggaatatacaaagtttatactactctgaagttcatattacttaaaaacaatgttgttttcaatagtctgttaatcttgtgttaaaatttagaaatacttaaaaaaatgtccccacgctcagagtccctgccaagtgattaaccctacaaataatgcctcatttgctaaaaagacccaaacttcaaaacccataggtataattttcttgaaatctagagagggatagaagacaaatatcaggggcgactatgacctcattgaatacttcctactgctcattctaggcccttcatgtgggaaccaaatgtagtcaactaaatatcaatcgaggaacaaagacatgttaaatctaaatggctggtaatacaaaaataatttgcttaaaatatggttttatatctacacttgaatataaatttgtctgctgttttggaaagtcacctcaaatgaaatactgaagccctaacataagcaataatttagaag

SEQ ID NO: 268197 - DNA, 766 bp, Homo Sapiens
ctttcattcatgctcagacgatataataggaggaatagaccccatgtccccatagacatcctccctcattcacagttcagccctccactacctcccacatggacccctggcacctgccttaacatcttctgatataagcacagaaattgatgtgattagacagctacattgtttggaaagtccccatccttcttataaacccaccctccctacttattccctgccaacaacacacacaatagtaagtttggctagagcctgcttgttatgaacaaggcttagggaatagggcctctttagggctagtcttcttcatttccaaacacttattcagccagttccaaaatgaagaggcctgaccttattactggggcacagctggattgtgtatggcattattagggaaaactttctgtgggtctcacagagatgcagtactggcctggatggtccattgggtccaaagccagcagggccatctagcatcgtggctgctcctgccctacttttcaaagaacattttcttttatgcaagtggggaaaggccatttgggcatgaaagttgcttgggagcgactggaaagttagtgtgtcttaagaccaaaaccctgtgctcagtgttagagctcaaagataaatgagcttctggaatagcctatagtctaggaggaaggtagataaaattgcaggcagacgtgctaagtgccacaaaaggagaatctaccactttctcaatcaccattgaaacttagaggcaaatcatggg

SEQ ID NO: 268198 - DNA, 770 bp, Homo Sapiens
  misc_feature (192)..(212): n is a, c, g, or t
catccaaatctggtcatttaggacttaacttccctccatctcttcatactgagatgtagtgatgggagatttccatttcttctttcaaatgttgtttatacacacatttcaggcataaactttgtgggaaacaaaaatgaatgaggaatcaagttgctctcaacagcgtcttgtagacataaactttcatgnnnnnnnnnnnnnnnnnnnnncctcaaaggtcttgtagaagaggtaagtcatccacccaaccacctaaaatataaaatgaaaaagtagcaacggccataccggaggcagaaattaaggcgatgggcatttataagggaaaaagtagtatttctgcagtatgagagagaagatcacattttaaatggaccctttagagaggggaacaattaaatgggtgaaagtccagggtgggaggagcctaatgaatggctaatgaatggagagagcattgcagaggctgtagggggccagcaaaggtggtggagcagagcaatggtcatctgcatgtaagcttccagagtaattttagaaagaaaactttttaaaatttatagttgctactgtccagtgtgaagatcaaacaagatgcaaaaccacgaaacaccacaccttttgtagatactaaacttctcactatgcaatggttcagggaagaaaccaccttttgaaaaggtggaatagaatagcttgaaccgaagcactttttaatgctccacgaactcagcacagttcattattacggaagtatttcccacaca

SEQ ID NO: 268199 - DNA, 616 bp, Homo Sapiens
caaagcagcattttaaactcctgtttctaaaagaggaaacaggctcagagatgaagtaacttattcaaggtcacagctggttaccagcaaagctagaagtcaacaaatccagatgtattcataaagcctcaactatctccaatacacaacacatgagagcatatagaacatcgagactcccaatgctctaggaggcagccatcatggagcagagtgaaggcaagatgactgacatgtggaattgaggtcctagctctgctacttactcactccctgatcttagaaaagtgcttgttatggtttcaatgtctatagtcccccaaatttaatacactgaaactttaattaccagggtgaatggtattaggaggtggggcctttgggaggtgactgggtcatgagggcagacccctcatgaatgagattagcatccatatataagaggccccacagagcttcctcaccccctcaccacatgagggcaaggcgaaagtcctggatcttggacttcccaacctccagaagtgtgagaagtaaattctgttgttgaagccacccaggctatggtattttgttatggcaacccatgctgactaagacagtcaccttaaaccaa

SEQ ID NO: 268200 - DNA, 401 bp, Homo Sapiens
aaaggggtccagccttcctggacaacattttgccagttaaaatgaaaaggattttttgacagaatgccctgcaattgtgaagagagagaagtgaagaatgactaaggtttttggccaaaaccactggaaagttgaaagtagttcaggtttacaggaattagagttcagtctcagaggtgtatacattgagagaattagtagagctccatgtgccatcatcctggagccctgttgacttttagggatggcaccatgtttgagaggctacagaggagacccagagccagtaagcaagacatagagtttatagagaggacttacagcatagtccagtggcagcgggctagacaggagaaccgcaattgcttgaaaaagcacgaagtttatagcaaagacacaat

SEQ ID NO: 268201 - DNA, 871 bp, Homo Sapiens
tagatggcggcgggttgctgcggggtgaagaagcagaaactgtccagttcgcccccctctggctcgggtggcggtggtggcgcctcctcctcctcccactgcagcggagagagccagtgccgagctggggagctgggactaggaggcgccggtacgcggctcaacgggctgggaggtctaaccggagaaggtagcggcagccgctgtaccctctctcccccccagggctgcggcggcggcggcggggggatcgccctgtcgccacctccgagctgcggagtggggaccctactttctaccccggccgccgccacctcttcctcaccctcctcatcgtcccgcccgcctcgtcctcatcgccgggctcccggaaagatggtggtgtcaacagagatgtgctgcttttgcttcgatgtgctctactgtcacctgtatggataccagcagccccggaccccccgattcaccaacgagcccttaataatcccacattgttaccccaaagccacatgcagtgcccgggagagcacagttgactgttttatgcagtatcctgccagaagatgctgaccagttctctagtaatagaaagtagtgagattgaattaagagcctatatagttcaccttgccattcgatatactttcactgtgatctgtaagcatattacatacaactttagtaacatattttctagtgagatcttggattgctgcaaggtggtaacagattctctgctttgcttcaggtgttagtggatctttgagtaattcctatggaatggagtctctgaaaaattggttttgatgctgttagcctaggggtcccacagcactgtatctgcctcaaataaatgcttatgtactagtta

SEQ ID NO: 268202 - DNA, 690 bp, Homo Sapiens
  misc_feature (31)..(31): n is a, c, g, or t
gtactgtttcatcaacaagggtgcaacatgngatagcataagtcattagcataatccaaatgcttgctaacggcctttggaatgcctaaacttaaaaaagtacactaccaaggacttggaaagaatctcgcactccaacgccaaagaatctattgcatattaatcttcattagaaaaaaaattgattggggacctaaagacaaaaataagcctattgtgcaatagcaaaacattaaaaaaatttaaaaagctttaggaaatttcatgtcattgtacaaagatgctacaccggagaaagggggatctggtgatcctaattttgtcaccagctttgaaatctttagctaggcatttcagccctataaaaatccattttctcacttgtaaaaagaagagttgaagttatgtttttccagggcttttttctctgacaaaccgaattgcagaacaattttatgactcaaccaacgtagcagagtccagagagagtttgaaaaaacaccttacaaaacttataactgaagttctccctccaagggcacttaattttttcaagtgaaagcatgcatgcagattcatccagctgttaccctggaagaggacagagtaaatatactccattttatatgaagcccaaagtgtgattgttaaaaatccccatgcacaattagaaaaccagtgactgttctc

SEQ ID NO: 268203 - DNA, 688 bp, Homo Sapiens
  misc_feature (30)..(30): n is a, c, g, or t
  misc_feature (228)..(228): n is a, c, g, or t
  misc_feature (633)..(633): n is a, c, g, or t
cattggctgaatgtccacactcctggatcnccgcctctcatcctcatgatgtcccatggtcctcatttcacaagtgagctctgggtacatggggagcatcagtcacaccctgggtcagtacctcagctgtctctcacatgacatcctcattatccacactgcaaagccaaccatccctatgatgggttcattgtggatcatgacttagtgggtcaagagtttggaagnggctcagctgggcggttcttctgctccatgtggctgccagatggtaccctgctggtgggcagtctggtctagagggtccatgatggctttactcacatgcctggcatcttgacagggacagctggaaggcaaggttcagctgggactgtccacagagctcctccctgtggcctttccagcatggtggtctcagggtagctggacttcctgcatgacagctcagggctcccagagctactgtcccaagagatagaaggtggaaactgccagtctcttaggctaggaccagaaaccagcacccctgcacccacagccttttggtagtgatgaaataaacataagatttatcattttaatcattcgtaagtgggattaaatacatttacaatattgtgtaaccatcgncactgtctatatctaaaactttttcatcatctgcaataaaaactctgtatgcatt

SEQ ID NO: 268204 - DNA, 637 bp, Homo Sapiens
  misc_feature (359)..(399): n is a, c, g, or t
  misc_feature (532)..(546): n is a, c, g, or t
ggcttttcccccaaagtatcatgtgtgaacctacaacaccctgacctctttctctcctccttgattgtatgaataaccctgagatcacctcttagaactggttttaacctttagctgcagcggctacgctgccacgtgtgtatatatatgacgttgtacattgcacatacccttggatccccacagtttggtcctcctcccagctacccctttatagtatgacgagctaacaagttggtgacctgcacaaagcgagacacagctatttaatctcttgccagatatcgcccctcttggtgcgatgctgtacaggtctctgtaaaaagtccttgctgtctcagcagccaatcaacttatannnnnnnnnnnnnnnnnnnnnnnnnnnnnnnnnnnnnnnnnctaatcgaggtgtgaaaaagttctaggttcagttgaagttctgatgaagaaacacaattgagattttttcagtgataaaatctgcatatttgtatttcaacaatgtagctaaaacttgatgtaaattcctccnnnnnnnnnnnnnnnggcttaatgaatatcatttattcagtatgaaatctttatactatatgttccacgtgttaagaataaatgtacattaaatcttggtaaaaaa

SEQ ID NO: 268205 - DNA, 602 bp, Homo Sapiens
  misc_feature (57)..(71): n is a, c, g, or t
  misc_feature (204)..(244): n is a, c, g, or t
  misc_feature (470)..(470): n is a, c, g, or t
cacgtggaacatatagtataaagatttcatactgaataaatgatattcattaagccnnnnnnnnnnnnnnnggaggaatttacatcaagttttagctacattgttgaaatacaaatatgcagattttatcactgaaaaaatctcaattgtgtttcttcatcagaacttcaactgaacctagaactttttcacacctcgattagnnnnnnnnnnnnnnnnnnnnnnnnnnnnnnnnnnnnnnnnntataagttgattggctgctgagacagcaaggactttttacagagacctgtacagcatcgcaccaagaggggcgatatctggcaagagattaaatagctgtgtctcgctttgtgcaggtcaccaacttgttaactcgtcatactataaaggggtagctgggaggaggaccaaactgtggggatccaagggtatgtgcaatgtacaacgtcatatatatacacaacgntggacgtagccgctgcagctaaaggttaaaaccagttctaagaggtgatctcagggttattcatacaatcaaggaggagagaaagaggtcagggtgttgtaggttcacacatgatactttgggggaaaagcc

SEQ ID NO: 268206 - DNA, 624 bp, Homo Sapiens
  misc_feature (481)..(543): n is a, c, g, or t
aaatattctccccattgacttgatgtgctatccataagtatagtcatgaaccacataaccacattttggtcaacaacagatcgtatataacagtggtcccataaaattataatatcacatttttactgtaccttttctatgtttacatgcacaaatactcatggctgtgttacagctgcctactgtatccagcacagtgccatgctgtacacgtatgtagcctaggagctgcaggctacaccatatagcctaggtgtgtcggaggctggaccatctaggcttgtgtaagtgccctctgtgatgttctcataacaatggaaatcatctaacaacggcatttcttcgactgtgtccctgttgttaagtgaaacatggactattgctttttgtttaaagtcagtaaagaggcacagtttacactttacttacccatatatatgtatgggtgtatatatgtatgtattttttgcgacagggtctnnnnnnnnnnnnnnnnnnnnnnnnnnnnnnnnnnnnnnnnnnnnnnnnnnnnnnnnnnnnnnntggctcaagcgatccttccacctcagcctcctgagtggatggaaccacaggcgtgcactgccgtgcctactttttaaaaaa

SEQ ID NO: 268207 - DNA, 719 bp, Homo Sapiens
  misc_feature (438)..(438): n is a, c, g, or t
  misc_feature (449)..(449): n is a, c, g, or t
  misc_feature (505)..(505): n is a, c, g, or t
gaagcaacatagtcttcattaataataaaattgctggacagaatgatttttaaaagacagcctatcagttttaatgaagtatctagtttttaaaatgggtgcgttagtagagcttttatatatttttcccttcctccttccttcctttctttctgaaaagttactagaaaagaaataatagtgaacaaaactgatctagaagaaaagatggaaggcacataaaacactaggaatgaaataaggcataattataactatgcaggagctcgtgtatcacaagaacaggtgcagctttagtgcactaagtttgaaaagctgaatgaagcttactatagtaaaataccagttattaaaattggcttgcagaaattcgtccaatataagtaaacaaccaatagcaaccaggtgtaaatagttttataggctaattctaccaancctttaaggancatataatttctgtgttctagaacttgggaaaagatggagagttctagaacacacnccgtatgcctagtataacctcaatgccaaaccagacgtggcacgcacagaaaaataaaatcagaccaaagtcatttggaaaaaaaattcctatatttatgattcaaaactcagttattttataaaataataatattaagtggataaagaaacgccagttgtactatcagctaaacattagaaaccttctcatcaggccgggtgaggtggctcat

SEQ ID NO: 268208 - DNA, 756 bp, Homo Sapiens
  misc_feature (282)..(307): n is a, c, g, or t
  misc_feature (505)..(582): n is a, c, g, or t
  misc_feature (745)..(745): n is a, c, g, or t
tgaaacagattgctcaagtgtaaaggagtctgaaaatgtctgtcctcaagcctgcaagatttggaaccgttctgcgtcccttttccatagatataggaataataagtctggattcagtagagtcatttgaccagccagcccctcagggtggtccctgggtctgggcagccatgctctccggagctgcccttgggggcaacttccagggccaagccagagaggccagagctctagactaacgttagagttccaagtgtacgcagcagagaagacagctatgcnnnnnnnnnnnnnnnnnnnnnnnnnnattgtgccttctgtggatatcggctagggactgtctcaggaaagcctctgcctttggcgtgtttactgctgtcaaaaccctgcccacagccttatagaccccaaagaaaaatgttctcatcctactcagagatgttcaaacaggagtgattgtctgacagtgactacactcacaggagaatgacaaacagcaaggccnnnnnnnnnnnnnnnnnnnnnnnnnnnnnnnnnnnnnnnnnnnnnnnnnnnnnnnnnnnnnnnnnnnnnnnnnnnnnngcagtctgtcctgctgaacccatggacaaaaaaggtcggcccctccgtatgagaggcttttccatctcatgaatacacattgggttgaaaaaaatctgcgttttagtggaacagccaggtttaaacacattgttgttcaacgggtccacttgtattcattcanaatacagattt

SEQ ID NO: 268209 - DNA, 701 bp, Homo Sapiens
aaaatgtttactcatcgaagtatttccagattagtgaattgtactcattcgtgttcattggctggaagttagtgaattaatgggaaaatgttaggatttatgggctcactcttttgaaaaatgagtgtcatgtgaggggaagaatattaacccaggaatcagggaaaattaggattcaagggtctgttctccaccatggggactctggggcatgccagttaattgctttcagtctaattacctataaagtggaagtaggatgggacttttaatgtggcatttgaatgagggacaaatggagtttcatggagtttcaagtagaatggaagctaaaacgtttgaaatagtaatactttaagcctttcttggatgaaaagttatcagactgtagaaaaatagttttggcctaaaaagaaaattgtactttgttcaacaaaatttttggaatatttattaaatgcttaccacatgctgatcattgtcttagaggcctagcttcttatatgttaagaccatatttttatttcccaatcatgtctttgaagaaagacaatctaggttatggctgataatgcctctttatcccaagattgtgtagcagacttatcacctgatgtgatagactttccttggctcccataatgtaggagtaggctcaagccctatgaactccactggcttctcagctcatgtgcacacgg

SEQ ID NO: 268210 - DNA, 737 bp, Homo Sapiens
  misc_feature (283)..(283): n is a, c, g, or t
tgggctcatgggatccttcaacctcagtctcccaagtaggtgggactacaggcatataccaccatacctggctaattttcttatttttttcatagagatggggtcttgctacatcacccaggatcccactttcctactttaaatggcctgtctttatccagcttagccaataaaatccaagaaacattggtcagacctagtagaggacacagggtgaaaggacttctatggagggggcagtgggcagcatctgaggctgaagctggctgtgggattcatttgncggagggggctttgggagacagcactggactgaaagtgcggaagcttgaggctgcttctgggacagggctggattctcactggtgagaaggccccatgaagccccctaaaggtccaccttctctacaagttccatcagcccctccccaagaagttgaggacagatggcagaatcacaacacccagcacgcacagtgtgagccctgctgcctgcccctcttctcttcaggagccaggatttattctgattgtacagaaccactatgactattatccaaccccttcacactgggacccctcctccagatgtagttggagttgaaggcccaggcctgctgcatgtgcagtccagtcatgtactcaagacagggttctcacaaacagctttctgcagaaaggcaaacagaaaggcttacaggctcaactcgtgagcagaacaaaataaccctggattt

SEQ ID NO: 268211 - DNA, 709 bp, Homo Sapiens
aagtttccttatatacttactgtgctaagactatttaagaagataaaatatagggcatataagcttagaagttgccactgtgttctaacaacaagtattaataaaaatctgaacaaactgaaaaatcagcaactcttcttagatccatcagagaagtgaggtcacagggcaatctaccaccccccaaattagagaaataggcaactacaaagaatcaccacaacttacaggagcagaaacccaagagcagaaatctccagaccatccaatgccagggaaggaacacctgaattacaactgctggtggtgcagtgaggtcaagtctgacagttttacgaaccccagggaaagccagtcataggggagattcccattgctttttctgaattttacttccaggagctctgacaagtcttcatagtgagtgtcagagaaaaatcccctcctgcttttggtagagggagggaaaaagtattctgaaatacttcattgcattctactcttcttaacaaggtgtgacctcagaagaaactgtttcacaaaaacctaacctactagggtttcatcagagcctaacctaccttagggaagaaaaatacccagtgacagctctagtctagtcatcccgttctacctttagtgatctggcggtaaggtattgggggcggaaaatggttttacagtctgagtcttctggtgagcctgtgca

SEQ ID NO: 268212 - DNA, 522 bp, Homo Sapiens
  misc_feature (84)..(137): n is a, c, g, or t
  misc_feature (499)..(499): n is a, c, g, or t
  misc_feature (503)..(503): n is a, c, g, or t
tacacagtttgagcccaggagtttgaggttacagttaacctctgtactgcagcttgggcaacagagtaagactctgtctcattnnnnnnnnnnnnnnnnnnnnnnnnnnnnnnnnnnnnnnnnnnnnnnnnnnnnnnggatgtctgaagaccataagtactaaaattaaagaccatataggattggggaataaaaattttggaagaaataggaaaaaaatgagtttggcttaaatctaacagcagtttaacattgcaagatctggatggagttcagcaaagaagggtaggcctatgatttgagagtcatttgcacagcagttatagtggctatagctgaagttgtataaacagatccgcaagttttaaactgagtgaataatatgtacctgtagtttttcctcctagtgttgcaacactacatattgagtctcctaaacacaattctgccttttaacaactcttattattttctttaacctcaaggctttaatattccnaaanaaaatcaggtgctcgtgcc

SEQ ID NO: 268213 - DNA, 1392 bp, Homo Sapiens
  misc_feature (163)..(172): n is a, c, g, or t
  misc_feature (1356)..(1356): n is a, c, g, or t
ctgtgattttgttttcaaaatcctctgttatggctatatttaaatttattttaaatattcctgtatgtattcatctaagcatttgggcatttggagtcttaatatacaagaaacacgtacttaaatttttatgcttatcaccgcaatgatggcaaacagtgannnnnnnnnncatagtttaggtgtcattgttgccagcacctttagtgctcagtcttcagtgaaaaatataaagtgccaaaaaaatcttgcaagacagaatccatacttaacactctttccaagacactgtgaccatgtacagtagctatttcctgatgaccaaatctctcaacgaatcatgttattaataaatatttttagcactcatcagtattctccaatgtgaccttctcattggagtacacagaaggaaagcaaagaagagcatctgacttctagctctggcttacagcctctctaccaggccgaagcaagagacccgcggcagcagctccccgccactcagacctgggtggtgataacctcaaagaatgggctctgttttctattgacagaaaacccacttgattttgcttctgagttagcagtcagaagaccctctaagtacaatagaagtgctcttaacggactctgcctgtgtgactcccaggccccggagtctacatctctctcgtaagccacctgccacagcacagctggaggctgttctctggtgttctcagcgctccggctccctccctggagttgtgcacccatcccaaactcctccatgcaagttctgcttcctcttataagtacacaactcagttaagtattcacatacacacagaaaatacgggtgtgaaaagaaagaattttctgtaaaaattaagttgaatactttggtaaaaagtgataaaggctgagttgccaataaaagttgcttttaaattaggtgtggctgggaatattataagatattggggaaaatatacaaatcaagaaaatttctgagcttagattgcttcatagatttatttaagtactcatcccacctttaaaacctctaaactgagaagaagggacccaaatcatgttattggtgtgatttatgtgagaagtagaactgtagtcattggacccttaggcaaaggaaaatccgtgtctttatatcagaagatcggcaaaccgaatgtatattacacagtttaggttatgattccctactttaacctacttactttattaaatgaccaactaccgatactgatcacaatagttattagagattctaatttagttgggaaggttctaatcactttccattaccaggcatttgaaaaataggggattcctttccgaatatattagccnggagccatagttagatgttacccagggccatttatc

SEQ ID NO: 268214 - DNA, 528 bp, Homo Sapiens
gcccctcaatatgtaattaggtgaagtaatctgaagtgtaccagaggtaagaaaaagctggatttagatactacattcttttcctgtatttaatgagtaattagccactttgctgcacagaaacttataaattattctctcaaaactttttaaaaaataaaaacttgcttgcctctacagttataaaacatgaattcatacctttaacaactacattaaaatccactatcaaactcaggcctggaatttcaatgcaacgccaccctccatactgtagggtttgagtcacgcgtgtctgtttggctttgaagaggaactgggatggcagccacagtgctccctctgcagccgttgcctgtggagggagaggccattccttgccttgcaggatggtgggttgggggagaaagaggggagggccaagaggagccaccaagaagaacttcctaggtatttaagaaataagtacatgggattacttccccacttaaaaccaataaaatcaccccttgacagggacaggggttt

SEQ ID NO: 268215 - DNA, 497 bp, Homo Sapiens
  misc_feature (27)..(27): n is a, c, g, or t
  misc_feature (30)..(30): n is a, c, g, or t
  misc_feature (399)..(427): n is a, c, g, or t
  misc_feature (432)..(432): n is a, c, g, or t
  misc_feature (444)..(444): n is a, c, g, or t
  misc_feature (470)..(470): n is a, c, g, or t
  misc_feature (475)..(475): n is a, c, g, or t
tgagaaaccacctgtccctgtcaaggngtngattttattggttttaagtggggaagtaatcccatgtacttatttcttaaatacctaggaagttcttcttggtggctcctcttggccctcccctctttctcccccaacccaccatcctgcaaggcaaggaatggcctctccctccacagggcaacggctgcagagggagcactgtgggctgccatcccagttcctcttcaaagccaaacagacacgcgtggacttcaaacccttacagtatgggaggggtgggcgttgcattggaaattccaggggccttgagttttgatagtgggatttttaatgtagtttgtttaaagggtatggaatttcatggtttttattaacttgttaggagggcaaggcagnnnnnnnnnnnnnnnnnnnnnnnnnnnnngaggnggattaattttntaaggttttccgttgccagccaagtngggcncaatttaccccctttaaattac

SEQ ID NO: 268216 - DNA, 686 bp, Homo Sapiens
  misc_feature (54)..(54): n is a, c, g, or t
cgcagtaaatagtttcttgttaatgtatgtttgaggagtttgaacgtcagtgtncacttacccacaaagttattcaagttgtaaaaggttatacaataatttaacaactaccttttttattctgtcgggttactgacctcactttatgtaaatacttcgcatgacaaattcagtaactcgtctatttcagcatgcataagacttttcactagggaaactgataaagcttgagtcaactaaatctgccttcatactttatcaaggggaaccaagcctgctgtgcttacatcagcatctggaagactttcctctcctctaatctgtgtacacatctccaagcaaggaagaaaaaacaaactctgctcagacgcctatgaaacacctgaatgaactttgatgaagtacagtctgagttaccatcatgcacaagtagaactgctcttggacttgttttcctgttgtttgtggaacctacgcgtttgaatggcttgaacgttgcatcttttaaagttattttttaaggtttcttggcatttatcctagttgtccgtgtttggcaatgtgctgttaaagtaatagacttttaatctttatgtattttttgttttctctggagtacttggacagatgttatagtggtttcttttaggaaaatctgtcattaaaaaagttatagccttgcaaat

SEQ ID NO: 268217 - DNA, 552 bp, Homo Sapiens
  misc_feature (285)..(383): n is a, c, g, or t
ctgtgccaccacacttggccccaaactgtatataatttaagtcatatagattcacatatacaaatagagtaaaaaagataaagtagaacaaaaataagaatgataagaggcacaaagggaagttttttgttttgtttcgagacagggcctcactctgtcacccaagctggaatactgtggcacaatcccagctcattgcagccttgacctcctgggctcagatgatctccccgtctcagcctcccaggtagctgggaccacaggcacacacctagctaaattttnnnnnnnnnnnnnnnnnnnnnnnnnnnnnnnnnnnnnnnnnnnnnnnnnnnnnnnnnnnnnnnnnnnnnnnnnnnnnnnnnnnnnnnnnnnnnnnnnnnatgagccaccatgcccagccaggaaatatcttttaaattgtataggaacttcaagaaacataagccagaccaaacaagacttaatgaaaaggaactccctaaaagagtattatctgagatattaacataacactaaagtttattgtcttctaactccaggaactcctca

SEQ ID NO: 268218 - DNA, 691 bp, Homo Sapiens
  misc_feature (190)..(232): n is a, c, g, or t
cctcattctgttaactgtttgtttctttacagtgggtcacatcacttcttcgagggtcttttaatttttaagtaaagtaaaacctggtgtgtaaaagaatgacagagacagaaataacactagaagctgaagtaaataatatttacatcagtccagaaaacagcatgccttttctgttcaaacccattcnnnnnnnnnnnnnnnnnnnnnnnnnnnnnnnnnnnnnnnnnnnagtttagtatttatagttgaaccgggcctgggctgtattgctgcttaagttagattcaagacctcacaaatatcaaattaattgaaggtaggattataaccttcccacttgtagtggcttaggatatgaatgcctggaaggtgtgtctattttcctgccctgccattggacttcagcaggctctgtgtgtgtgctgagccttgtgggcgagagcctttcagttccctcatccctttccaaccaagatggacctcttcttggttctgggtgaggccctagagtgcccagtgggaatcataatatttgcctcatgtgattataattcactggtcaattagacaacatataaaaacacctcaaccatctcagtcacgtattaagtgatagctgttattacatctgtggtgatttttaaaactttttgttttgaaataatttcagacatacagaaaaattgcc

SEQ ID NO: 268219 - DNA, 519 bp, Homo Sapiens
cagtgtgaggagatgtgtaatggacaggggagctgtatcaatggaaccaaatgtatatgtgaccctggctactcaggtccaacctgtaaaataagcaccaaaaatcctgattttctcaaagatgatttcgaaggtcagctagaatctgatagattcttattaatgagtggtgggaaaccatctcgaaagtgtggaatcctttctagtggaaacaacctctttttcaatgaagatggcttgcgcatgttgatgacacgagacctggatttatcacatgctagatttgtgcagttcttcatgagactgggatgtggtaaaggcgttcctgaccccaggagtcaacccgtgctcctacagtattctctcaacggtggcctctcgtggagtcttcttcaggagttccttttcagcaattccagcaatgtgggcaggtacattgccctggagatacccttgaaagcccgttctggttctactcgccttcgctggtggcaaccgtctgagaatgggcacttctac

SEQ ID NO: 268220 - DNA, 489 bp, Homo Sapiens
  misc_feature (54)..(54): n is a, c, g, or t
caaaaagtaagcactttcagagcccgacccttcaaggagctgctgctgcagaanggagccctgtccccggaagctcgctgtcacgaggggcctctgacatctccttcttgagagaaaggtcgcctggcctgggtgaggtcgtagttcccgcgaccccgtgcttgcaagtactggctgcctcctactatagtgtaagctccaggaaggatcccgcgggggacctgacagctcacggtcctggccgacaaccgccctgggagcggaatggatggagcccgcagtcgtcccggcgcactgggcaagctctgctcccactgtggcaggccagatctccattagcaaccagagcagctctcaccaacgcctcactgtcattctgatgcatgtataagttaaacattggagaaactggtgccttaggagaaaggctagaatgtaaagacaagtccattaggatcccgcctgagctttttcaacccctagagttta

SEQ ID NO: 268221 - DNA, 261 bp, Homo Sapiens
aatttatcatcaacactgacgagccatttcagttttatcttaattattgcaaggactggtcaagagaacgtgtttggaaattggaaattaatcatctatgttgaggaaataatttataacatttgagtttctccggtgaatcattaacatagtttccatatttaaatttctgccattatattttttcacattgtctgtcttctttccaaataacttctcagaggaaactcttaggaaaaaggcagtaataattaaggggct

SEQ ID NO: 268222 - DNA, 509 bp, Homo Sapiens
tgtgctcttctactgacagccagcagtgacatcaatgcatttgcagctactcttttcaggatatctttggaggatttcccttcatagcactgaaggattacatcactaagttgttctagagatttctgattttcctgagagtcatcaagaagtgaagccactgttggactacagcataaatgtgttttgctcttagcctggagatgcccttttgcttcttcggtcaagagaacagaaaggaattgcaagctggcagtatacagggcaggacacgtggcagacaagcctgcacatgtgcagaacatatcaatcgccgctgtccagtgcttggccagggccacggtaacaaacgggagtgtgatggcaccagctttcctcaggagcatggccagaagattaaataaatgtgtccatgtgtgataaaaagctgatattaactctttatctaatacatctttggtacatatggtgagaattccaatgatattggtgataagaggtttcacagc

SEQ ID NO: 268223 - DNA, 553 bp, Homo Sapiens
  misc_feature (415)..(415): n is a, c, g, or t
  misc_feature (437)..(437): n is a, c, g, or t
  misc_feature (445)..(445): n is a, c, g, or t
  misc_feature (479)..(479): n is a, c, g, or t
  misc_feature (489)..(489): n is a, c, g, or t
caaggactactccaaacagtgtgcttcgacagttcagcagcaggaggatcgaaccaatgagctgttgaaggcagccacaaacaaggacattgccgatgatgaggttgccacatggattcaagattgcaacgtatgttcaggagctaccttgttttccccacatgcccttcttagactgcccaagtttagcttttggtctgtgtaagctttggtatgtctttctatgtgagacagttacccaaaaataactgtcttaggatcaaagagcctgcctgattttcagaacacaggtgcacatgcatcagactaagaggtctcctcccattgttttattttttaaaatgagttgtttttcccatttttcctagtgggaatttagttcatgtggaaagaatggaggctccttgtggtttcnaaggtgggtccattataagacnggaccatngggggattatggttccaacctttaaaaaatcttncggttccagnaggtggtcccatttacattccattaacccccaggtaagcatttacacaatagttttcacctagg

SEQ ID NO: 268224 - DNA, 518 bp, Homo Sapiens
tcctcctctctattctaggagtcctttgttcacgcttctattataacatccaggatgctcattctgccttgttatttagttactggtatatgtgcctgtcttccccaccagatcatgaacatcttgctctttcattcattcatacatacacactctacatacctacatgctgtacccaagtgcctcaaacttcctagagtaagcaaattagacgccctagagtatagtggggaaaacagcaacaaaataatcctgcaaatatccaattatgaactgtgtgaagcacaataaaggaaaaagtatagtgtgctgtatcattttggcagaaatgtggagaatgaaacaggggaaagaatgaatgcagggaggaaaggagtgagcagggaatcgggaaatataaagactactgatgtagcccagagaaaagacaacaggcacttaggccaagaggggtgacagaaagagagaaaagtcgaagaaactgaaagatatttaggagttaaaactgacaaaattag

SEQ ID NO: 268225 - DNA, 310 bp, Homo Sapiens
  misc_feature (21)..(21): n is a, c, g, or t
  misc_feature (23)..(23): n is a, c, g, or t
  misc_feature (229)..(229): n is a, c, g, or t
aggcagccgggtcatagtttntngaggcaggcagggcatacagagggtttggtgcccctactgtgaagattttgccttttaatcagcctgaaatgggatataaagtcttagatggatgaaatagaaataacttttctcgtttccttcctcgtctgactaaattaacagatgaaggaattgtcaaaatacaaaaccttcttccttactgaacccactgacctggcagggncttgtaaggaaaagaatttgtttctagaagagctatttaaatgtcctggacctcttcgaaccaggagaaataggaaccagt

SEQ ID NO: 268226 - DNA, 540 bp, Homo Sapiens
  misc_feature (20)..(20): n is a, c, g, or t
  misc_feature (258)..(372): n is a, c, g, or t
  misc_feature (377)..(415): n is a, c, g, or t
  misc_feature (424)..(424): n is a, c, g, or t
  misc_feature (493)..(493): n is a, c, g, or t
agagagctagcaccatgagncttcaataccctggatttatgaacaattcataacttagtaaagaatgtctggtctgacatttcgcaacactaaaatgcatttaaaatcacgcaaaagttatccagtctcttctttcaattcactcagcaaattttacggaataaaattatgcgctctaatagctcacctcttagtcatatgcatttatttggtatggagaattagatatccatatcactgtttaaaagccaaaaagtnnnnnnnnnnnnnnnnnnnnnnnnnnnnnnnnnnnnnnnnnnnnnnnnnnnnnnnnnnnnnnnnnnnnnnnnnnnnnnnnnnnnnnnnnnnnnnnnnnnnnnnnnnnnnnnnnnnacggnnnnnnnnnnnnnnnnnnnnnnnnnnnnnnnnnnnnnnngttcttcantgttcaacattaaatggagcttcccactccaactggattttcttccaattttccggttcaaattaaaantattattattattttattgtaagggttctcacttacccgtggggttt

SEQ ID NO: 268227 - DNA, 427 bp, Homo Sapiens
ccaaaagtcccaaaccattctgtaccccaatcctattttcttcatttgaacaactgacatttgtccaaatgatgttccaaaatatttccctcgtgccttcagtgaaagaatattgagtattcaataattcagcatccccacaaaggtctgctgcttttcatatattaacactgtgtcaaactcaaaaccaattatcttaatccaaagaatccaactattggctaacctctctcatcagaagcatcactgagttttctatctgcaagttggctggaagcattcaacatggtgacatatccacagagatgctgtaagtacactctgttccttagtatctgcaatgctttatgaacacccatattgacacgagtgaactctacaaacagaacggacatcacattaatgaacagtttctaataacacaacg

SEQ ID NO: 268228 - DNA, 430 bp, Homo Sapiens
ccaaaacggattcctcttcctctcatgatccaaactcctgagtcccttcaccttttgcctacactatcacagtgacctccttgctgctttcacactggagagcgtgggctccctgtgatctactctccacatggcagccagtgtcatctggtaaacctttgctgaaaccctgccatgcccttcagttgccctggaaacctgaactcatcctcagcctggctcgcagagccctcatgccgctgggacgtcacgttatgtccctctcctgctggcccgctgcacccagccgcaccacatgccggccgcacctcacacacgctggcctcttggcccttcctcgaacacacggcgcttgtccttgttgtcccctcatctttgcatggccgatttctttttctcattcagctctaagtttaaactttcaacagtt

SEQ ID NO: 268229 - DNA, 708 bp, Homo Sapiens
  misc_feature (328)..(328): n is a, c, g, or t
  misc_feature (577)..(633): n is a, c, g, or t
tacttgaagccctgcagttgctagttcattttcagctgggagagcgatcctgatccagctccttctcaggcctttgaaccaagttctttggcaactggccagggagggaatatggccatgtcaggcgtgcttttccggcccatgagataaaaggaatggctggaaacactattccttccgtgactcacagggccaacctggcatgtgcaaggaacccgtcagactgggtggggacctcccgtccaaatttacctgcgcagacacagcacctcttggaggagctaggaagtgggagttcccttagcacgtgatcccatatcttcccctnccaagccctaccgtgccctgtcttgtagcatgacgatgtatattctcacccttagtagtcccccttagcctgtaaagctctttagggcaggatcctacatctgcgtaaccttcagggcccccagtgctgagaactgtgcctcacaggtcctaaatgtttactgaaaggaagaacacacaggggtgggaggatcacttgaaccccaggagtttgagaccaacctgggcaaccaagcaagatgcagtcacnnnnnnnnnnnnnnnnnnnnnnnnnnnnnnnnnnnnnnnnnnnnnnnnnnnnnnnnntagctggttgttgtggtgcgcacccacctgtagtcccagctactcaggaggctgaggtgggaggatgacttgagt

SEQ ID NO: 268230 - DNA, 452 bp, Homo Sapiens
  misc_feature (30)..(30): n is a, c, g, or t
  misc_feature (37)..(37): n is a, c, g, or t
  misc_feature (52)..(52): n is a, c, g, or t
aaccctgccccctaaaagagcttttaacangcctaanggggaactaactaangtgaagaaataaaacatccgtcaatgcctaacaaagacaggccacggtaaggcccctggaggggaaagaaaatggaatccacgtgcctaaagggaactccccacttccctaagctccctcccaagaggtgctgtgtctgcgcaggtaaatttggacgggaggtccccacccagtctgacgggttccttgcacatgccaggttggccctgtgagtcacggaaggaatagtgtttccagccattccttttatctcatgggccggaaaagcacgcctgacatggccatattccctccctggccagttgccaaagaacttggttcaaaggcctgagaaggagctggatcaggatcgctctcccagctggaaaatgaacctagcaacctgcagggcttcaagtac

SEQ ID NO: 268231 - DNA, 689 bp, Homo Sapiens
  misc_feature (24)..(24): n is a, c, g, or t
  misc_feature (69)..(115): n is a, c, g, or t
  misc_feature (148)..(148): n is a, c, g, or t
  misc_feature (341)..(341): n is a, c, g, or t
  misc_feature (439)..(439): n is a, c, g, or t
  misc_feature (514)..(514): n is a, c, g, or t
  misc_feature (675)..(675): n is a, c, g, or t
agggtctcactctattacccaggntggagtgcagtggatgatcttggctcattgcaacatctgcctccnnnnnnnnnnnnnnnnnnnnnnnnnnnnnnnnnnnnnnnnnnnnnnnacatgcaccatgcccagctacctttttggactnttttggttatagatgtggaccttgcctcattggtctgcacatagcacagtgtgatggcataaacctgctaaaagatcttgaatcctttttgcctgctcatgctttaagagttacccactgttaaaaaagggttcagagggagtgtcattttattcatctttcattatcagagggtctattttgactttgaggncacccattcatttattcattaaacacttacaaaattccttctttttgtcatagactttgccaagtcttatcacctaggttagtgttttaaaatctcanctacagttttgtaaagtaggacttttagcccccatttgacagatgaggagaataaggagtaggcagaaagtcacntgccccaaccagtaaatggtgggatgaagttctagctgctggcccagtgttcttttgccctcctggctgttttctgacattcatatgtcggacatgctgacttttgtactgcatctttgacaaagccgttgccttgtcttcaatgtttctcattagtaacntagcatcagattta

SEQ ID NO: 268232 - DNA, 462 bp, Homo Sapiens
  misc_feature (21)..(21): n is a, c, g, or t
ggcacgagggcgccgtcgcgnccatcctgggcaacaaagtgaaactccatcccaaaagaaagagtatcagcgataaaggcaaagctctttccagaaaaaaatggttttatggcctaagttctaaacaatctccgtggttactgttggattttatgtagtaagtatatgtaagcttcaaattcatcacatctttattatttatcctttcataaatattgtgttctacattgacattaatctggagaactcccggttatgcacttggccccaacatgcacagactcaggggcgtgttcttgttgcaagagtaagtgtgcgatggttcagatcccttggacgtccttatgtctccaacctcagtgggcactttattacctgccttctggcatgttaaacagtaggattttggaaacaaaaaatggataggcgtagtgggtttgttaccaaacattaaaccaggac

SEQ ID NO: 268233 - DNA, 1008 bp, Homo Sapiens
  misc_feature (898)..(898): n is a, c, g, or t
ctgaagaactctgcacttctaagcctgtaaggccacaacaggtgagatgaagggggagttgaacttccagctccttgtgtgtcccctagggttccccttttgggtccacacaaaggctcttgagcccaatctgaaggtctaaggctatggatatctcctccatttctaagttgggacaaggttgtccagcaaaaagaaaagcaaagactggtccaatcttagagacgtttgttttggaagcagagctgggctattagctttcctcaagaaggaaaaaggagtgctacaaagttaaatactgatttttaaaaaaaattggcattcacacaatttctactaccacagatgagacttctttttgtttttctcaaaaacttaggctctccgagggattggtggaggctgtggtacagtgagggagcagagttctctgccacgttggaaatcagcctcagacaggagcaggccttgggttccctatggtggtggaggcgagctgagagatgttgaggcagtgagagcgattgatagactgctacccagcattggagagatgactctctagatgtcctgggctggcattctagcttctgacatgcccagtcaaaccccatagattcacacgccctgaagggaccatcagtggtaagatttatccctcctgacttcagacaaagccacatcccaagccatctcaggcatttaaggatctatcctatttttgaagtctccaaaaaggatcccttggtctctcagtttaatgtcataaactctgtaagtcaggaaatttaactttagagcaagctcagattctttctatggttcaaagaccattttctttggcaatcatcctctctctgagtacccttcatgtatttgaaaaccaatactaaattgntttcagctgtctcttctccccaggtggaataatttcagttctagtcacttgaattcagaagaaaaagcatgctagcaaaattcaaatcaagtaaactataagcctttttt

SEQ ID NO: 268234 - DNA, 433 bp, Homo Sapiens
  misc_feature (271)..(271): n is a, c, g, or t
  misc_feature (333)..(333): n is a, c, g, or t
  misc_feature (386)..(386): n is a, c, g, or t
  misc_feature (398)..(398): n is a, c, g, or t
  misc_feature (416)..(416): n is a, c, g, or t
ggagctttgactaaggggcatgcattgcagattgaggtttgaccagaggttttccaggatccctgaagaactctgcacttctaagcctgtaacgcacaacaggtgagatgaagggggagttgaacttccagctccttgtgtgtcccctagggttccccttttgggtccacacaaaggctcttgagccaatctgaaggtctaaggctatggatatctcctccatttctaagttggggacaaggttgtccagcaaaaagaaaagcaaagactnggtccaatcttagagacgtttgttttgggaaggcagagctgggggctatttagcttttcctncaaggaagggaaaaagggagttgcttaccaaagtttaaatactcgattttttnaaaaaccaattnggcctttccacacatttnctacttacccccaggtg

SEQ ID NO: 268235 - DNA, 683 bp, Homo Sapiens
gctgatggcatcgctgtcattgcaccgttcttcctcaagccatggaccaaagatatcctgattaattttctaaaggaagtggctgctgcgcccctgccctgccattttattactatcacattcctgccttgacaggggtaaagattcgtgctgaggagttgttggatgggattctggataagatccccaccttccaagggctgaaattcagtgatacagatctcttagacttcgggcaatgtgttgatcagaatcgccagcaacagtttgctttcctttttggggtggatgagcaattgttgagtgctctggtgatgggagcaactggagcagtgggcagttttgtatccagagatttatcaactttgttgtcaaactaggttttggagtgtcacagaccaaagccatcatgactctggtctctgggattccaatgggcccaccccggcttccactgcagaaagcctccagggagtttactgatagtgctgaagctaaactgaagagcctggatttcctttctttcactgatttaaaggatggaaacttggaagctggtagctagtgcctctctatcaaatcagggtttgcaccttgagacataatctaccttaaatagtgcatttttttctcagggaattttagatgaacttgaataaactctcctagcaaatgaaaaaaaa

SEQ ID NO: 268236 - DNA, 489 bp, Homo Sapiens
  misc_feature (153)..(161): n is a, c, g, or t
  misc_feature (372)..(381): n is a, c, g, or t
  misc_feature (428)..(428): n is a, c, g, or t
agagctatgcattgcagaagtaactgcatttccaaatgaccgaaaatccttgacctgtcataggaatacctcagggtaaatgttgctgagggcagttgcaatctaagaaagaaaacatgcttgccctttatcatagtgtcaccttgcaggccnnnnnnnnncctttgtgactcaccgggagtgctgatatgtgtatgtcttttccccctcatagtaccaagcagagtaatagggaaccggtgtgcttttaggatttctaccttctgtggcgcgatcctcccactgctgcatgccagtcgcctgcctctttcatgaaatctccttcccgttttggtttggctttgtttctatgttcgtttttatgggatagannnnnnnnnncaggttaaacaaattttaaggggatttgcttattcaaaaaggaacanggaatacaggcatcttaactgaaagcttgtaaatacagtgagtgctttagattgggttttt

SEQ ID NO: 268237 - DNA, 756 bp, Homo Sapiens
  misc_feature (407)..(407): n is a, c, g, or t
  misc_feature (413)..(413): n is a, c, g, or t
ctacaacatgtaagaattatgggagctgcaattcaagatgagatttgggtgggaatacagccaaaccatatcaaggatgcgctctctattcttcactttcccagtgacttatctaaaaatgatttctcccttctacgtgcaagacttccactccagtttcttttctccttatattatttgcttccagtttctaaaatatccttgggatcactttgagaacatgggaggagagaagcagagggcttcaggaaatctgatgaccataacttacgttttataagttcttgtacaaagtcaagaacaggtgaaatttccagggaagaatgtagaagacacagtttaattcatggatgttattgggttgcccttaagtggggatggcatggtctccctaggggttcacaggnctggcnttctaaaaagtaactaatttttttctgattacaatcataatgtgggtttatgtgggaagaattctaagccacagaaaaatataaggaaaaacttgaaaagtactcctaatcttaccactcaaagataacgttagctggctgcaaggatcttcagaattctctaggccagttgcagaactgaaacaacaaaacagagccttgggagatgttagcttcatgttttatttagaagtattagcagatagaaaattgagctcattagcatgctagcatgtgtggtggctccataatgcatcatcttcgttagaccaactacatttcccaaaattccctttcttgcatg

SEQ ID NO: 268238 - DNA, 527 bp, Homo Sapiens
  misc_feature (240)..(240): n is a, c, g, or t
ttgtacttcaagctgtagtgtgagatgcttcactgcattccaaacaattccaataaattccttcattctttcttcaggacttctacagctttcagatatattcaacatggctttaacaggaactgacaatgggcgggattctgagtacgagaatagtgatggattagatgtatagtacaagagaaagcaaagatgattccaaggtattaggactgagagactggaagaatggagctgttnccgtttttgtttttacagggctggctggcatattaagaggccctgatatgattgcctgctttgccaagggggcacttccaaatagacacctcatcctctttccttctacaaactggcataacaagaggaacagctaccacaggctgatgtggattttcttcaacctctgccacttctgagacaagacgaacccctcctcttcctcctcctcagtctactattcaacatgaagaccttcaagaatgatctactttcgtcctatatagtattttgtcttccctcgtgcc

SEQ ID NO: 268239 - DNA, 656 bp, Homo Sapiens
  misc_feature (153)..(153): n is a, c, g, or t
  misc_feature (331)..(331): n is a, c, g, or t
cgacctcgtcgattgccggagtcagagaggaacgtggctacgaaagcctcggagtgaagttcccagaccctacgccccgctgtcaggcagcccgccgatcagatggaggagaacgaggtggagagcagcagcaacgcggcgccctgggcctgngccggcccgaggagccctctgagagcggcctgggtgtgggcacctcagaagccgtgtccgccgacagcagcgacgccgcggccgccccggggcaggcagaggccgatgactctggcgtggggcaaagctcggaccgcggcagccgttcttcaggtatggaccgggctgtgacggcgtngggttggaggcaaggaccgcgagcagcagtgcctgacagccaagaggaaacaaggcttgtttgttagcctaatacttggtgtttcctggtttactgtgagcccaggcacccaagcccaaaccccctaaaatggattttctcatttgagcttcataccttctaagacacataccattttttccccacatcttatagaaaaggatgccgaggtacagagtgcagacagagcccaggattcaaatctaggctgtggtcttagctactatactacccacagtcctcacactttgagaggcagatgtctaggccaggagtggtagctcat

SEQ ID NO: 268240 - DNA, 731 bp, Homo Sapiens
aaccagtaagctgaaagtgattggaaattcagagggacctcttttctccatattggatctctgttctttgttggacatctgcttaatacttctatatttgctgatcagcttacataaaagaaggttgatgtaccagcacttccaaggttattaattgtgtcacaagaaatagtctagactgagactgtggtagcttcattccaattctctgttatggaggagtgcactctgattggctcagtttgctgcaggtgttcaatcaacagcagttggacggggagtcatgttgtattcacctagctgcctggggagttctgcttaggtgggatgatttctagataaagttgagcaattctcagcccttgggctgaaagaacacccccaaattatcccttacactgaataaacacttggcaagaatgtggaaatcaagcatcagatatgattttcaaccaaacagccttccaggtctcctctaatgccataattccacaattgacaagaaaagatgaagagaatccgagaggagtggcagcactggattgtgcctaccttagtgacatttggaagattaattagacattttagtaagagctttgaagatgaaaagggctgaaaacagcattaagtctttactaccaagtcctgggaaagtaggttaggagatgaattagcatcaaggctgtaatgttgtaatgacattcactgaaaaattgactacactgtgtttt

SEQ ID NO: 268241 - DNA, 762 bp, Homo Sapiens
ctgatctggttggactgagtcaagggtctgcggtgcacaatcttcagcttgagaaaatgaggttgtcagtttccagcaaggctgacatccaccagactgatttctccgatgttgcacttggctggcttatgcctctgagatccgtgccacggctgtatttatttcagttgtcactgctgctccctcctgctatgaaacgacactgccagtgccagcagtgtccttgggaaaggcaatatttatgaagggcagaagaggcagccccaagaacctaaagactgcaggctgctaattgcagggaaatgactttggaagggcaggctcttgtccagttttcagggctgaaaatgcctgggcgaacttccatttcagccatcacttatttgactgagtggctgcttagcatgggccaccgcgctaggctcgggacagctggtctttccggccatctttcttgctggcaagtcagcaaacattaccttcttagtcacgtgcatatttttgccttcattcttaccaccttgcctgcaaagtttgcaggagggccaggtatattcacttgtgtcttctgggtcctttcattgctgacaggctgtgatggccctcttgagccttgggcagggtgggtgaggtgcagatgaccaggagtgtgtgaatgccttccaggaggtggctttgttccgtgcctccctgcccccatcgtcactaccaggtctggtacggagtcggtgctcagtgtttgcaaaacagagctgaaaatgg

SEQ ID NO: 268242 - DNA, 654 bp, Homo Sapiens
ctttcagtaagtctccttaactggcttccctttccctttttgagggtgtgaagaggacctgattcctggggcaggctcaggcagttttgctgatagaggagtagacaagcaaatgtgtggtaccactggcccctgcaggttctagttgtcttttagttttactggggccttcatacctcagggtctggtggcttctcttctctacccttttcttaagagtcactggtgtcataaagccccagaggatcaactctgtatatcagcctcatgagaactgaccttctcctgacctcattaatgctcttatttaaaagttctctaattaagctttgtattttgatataattagagactcacctgcctgtgtcttaaaaataactctcccagctactatctcacatgatctgtgggcccatcttgtgaagcctagtattaaaaaatatttttgtttttcagtggcgtgcattttaattctcaggccatagctcctaccattgaacagattgaccagtcttttggcgcaacccatcctggagtgtacaactccgctgagcagctcttccatctcaacttcagaggactgtctttctcttttcagttagactcatggactgaggctccaaagtatgaggttagcccttcctgtcccctggt

SEQ ID NO: 268243 - DNA, 770 bp, Homo Sapiens
  misc_feature (11)..(11): n is a, c, g, or t
ccactttaagnccctgtggtgattgagcaaacacaaagggaaagtcaaacctctgtcatttgcctggactatctggatgtgatgtaaactggtaaggtgaactttatgaaatctatgcaactaagatcagaagctgagctatgcccctcaaggagtgatatcttacaattttatcttaaacatgggtcatattgatcatttatgtcttaatttagtgatataaaattagagcctgaaagagtacctaaaaacaattgtccacacacaggacagttctgaaagaaatttatataacactattatatgcagtgtttttcaagttttcatttattaaaatcaccaaattaagtcatcctttcatacgctgtgattcagttaaaaggggcttttgttgcagaagctctagttaaggtttgaaaattcgatttctctacttctgcttccaagaggatggagtaggcatactttgccctattcttcccactaagtacacctaaaatccctagacatacataaaacaaatgtaagaacattctggaaggtaaagagaagaagacggactgattagggtccttgagacttgaggggcgccatagtgatgagctccaggggactttctttttgcctcatgtatccagacttggagccgaagtcgctgggaacccagaaacagtaatcggcacagactttagaaaaacaacaataaaagctgactttctctaaccaaataaccaggaaagggacagcccagcaagacacaaaagttttag

SEQ ID NO: 268244 - DNA, 202 bp, Homo Sapiens
  misc_feature (144)..(144): n is a, c, g, or t
tgtgggatattaaactgattctaaagtttatatgggacagacaaaggacccagaatacgccaacatgatattggaaagaggaaggaacaggaatcgtaggtactgatactacctggactttcaaaacttatttttaaaggcttncagtgatcaaggaaagtatgggtgttgggtggaaaggaccaggtcacatagggtgaat

SEQ ID NO: 268245 - DNA, 669 bp, Homo Sapiens
  misc_feature (94)..(145): n is a, c, g, or t
  misc_feature (167)..(200): n is a, c, g, or t
  misc_feature (330)..(330): n is a, c, g, or t
ctacaaaagatacaaaaatctgccgggcatggtggcatgcgcctgtagtcccagctactcaggaggcttaggtgggaggattgattaagcccannnnnnnnnnnnnnnnnnnnnnnnnnnnnnnnnnnnnnnnnnnnnnnnnnnntgacaaagtgagacctgtctcnnnnnnnnnnnnnnnnnnnnnnnnnnnnnnnnnncttgctgaaactacattctcagagaagcaattctttctctttaaaaacattaatttaggatttgtttctgcatgtcaattaacagataatgctagcaacctaatatatcccaagtgttatatattttgangaaacacacaaacacatatccatagcattgtaaaataagcacttctagtaacataacataaatatcagcacctatgtagggattttatcactgatttagattttcttggtattatttcaatttatccaagaatgttaaatctcatgcctaacacattacatcagatgataatactcaaactttgcctgccccaaaacgtatacaaaaattccaccccagtaacggaaaaatcttgaacagttggcattcatttacatatataacaagttctctaaaagatagactacagagtttcaaagtcatacagttcttaacaaataaaaatcctgcttatatggg

SEQ ID NO: 268246 - DNA, 726 bp, Homo Sapiens
atactgctgaccttttactctttgccattcatgccctcttggcttctacagcaagacactctcctagttcttgcctactttctcgccctttctcccccgcattctctgtgtccgtattttcttacttttgctcaccccagcagagcaattttccagagaatctgttttttcatttctctgtactctcttgcatagaaacacctcgctgtgctctcaccagggtcaactactgcatttccctaggtggcgtgaaatccacattcccagtacaggagcctcacttttcagtcctgagggactttgccattgtatatcctggatgacttcaaactcaatatgactttccttccaggtcacttcctctcctttccctgcttttgttgctagaccgccattcccctaggcacctatgctcaacattccagagacattttaagtgcttctcttctctcactgttcctatccaccgtcctctttagtctttctacccctggatctgacatccatggtttctatccttgccccagctccagccctacctagatcatggtcagggcatagcaattgcctctggggactctctatccagtctttcatcatgagccatcctgcatatgaccaccaaatcaatcttcctaaatatcgcttgtgttatacaaactcttttcagcatgtattaagtccctgtcactaaaatgatttcttggaaaataaaaattaagacgt

SEQ ID NO: 268247 - DNA, 533 bp, Homo Sapiens
ctgggagttgggactatatccagttatcaaagagccagtttttaagcaggagatgaagaattcaacttttgttttttagacagttgtggcaagagtgttaaggaactaaaaaggctgacagaccaacaaagaggttattacataatccagtggtaatgccatcttcaattacagcaatacaagacagagtggtaaaaagatactgggtataatcaacaggttaaatgtgttgcggagagaagacagagaattttggaaaacagattccagagacctgacaaaatttgttctttagccctagcagaaagagaatggacttgggggtccaaagatctggggcccaaatttccaccttaatctcctcaagaaactaggtatatcaccttaacaggatataaaatccattcatttatatactttgatggggttgctgtaattggttccatatattatgtataaatcctatgtaaacacacataaatatatattaaatgcctgtaacatataaacatatgtaaaatgcctgtcacgta

SEQ ID NO: 268248 - DNA, 914 bp, Homo Sapiens
  misc_feature (288)..(414): n is a, c, g, or t
  misc_feature (480)..(530): n is a, c, g, or t
  misc_feature (769)..(803): n is a, c, g, or t
ttcaagttttaacattttaattgctgaatatctttaagtgaacatcagtattttctggctatgaaatgcaaaaataacacatttacttaaatacagttaacacctaaaatttaggtagttgtaatgagttgtaataaacaacatacttgtaatagaatttacagaattagaaaaaattttttaaactagaatactctgaaaattttccaagcattgtacattataaaatacatatttacaaataatattagtagtgtattcatggggccaggcatggtggctcacacnnnnnnnnnnnnnnnnnnnnnnnnnnnnnnnnnnnnnnnnnnnnnnnnnnnnnnnnnnnnnnnnnnnnnnnnnnnnnnnnnnnnnnnnnnnnnnnnnnnnnnnnnnnnnnnnnnnnnnnnnnnnnnnacacgcctatagtcccagctaatcaggaggctgagatgaaaaggatcatctgagcacaaaaatttnnnnnnnnnnnnnnnnnnnnnnnnnnnnnnnnnnnnnnnnnnnnnnnnnnnaagcaagaccgcttttctcttttaaaacaattttttaaaagtgtattcacaaacatttgtccacgtattttaaacttctatagccttgttaaacattaaacccaagaaatggcaaactatctataaaaataagggcacagctacaaactgattgccaaaaaagtgttgttataaataaaaagacactagaaaatacaaatacatcttatcttgcaaactcaataatggttcttcgcacnnnnnnnnnnnnnnnnnnnnnnnnnnnnnnnnnnngtactcttatagaacttattttaataactttccattagtaactgttcttttttgttgatgaataactttgattcagtgtctattcatcttaacctagtaaataatgaatgg

SEQ ID NO: 268249 - DNA, 618 bp, Homo Sapiens
  misc_feature (39)..(39): n is a, c, g, or t
  misc_feature (69)..(79): n is a, c, g, or t
  misc_feature (222)..(222): n is a, c, g, or t
tcatgaaacactatgcagaagacgtagtttatgaagacntacaatacatactgtcggtatttttgtttnnnnnnnnnnngtggagggagacctagcagtgatatttagtattgctaaatgtcaatgtttacaaatcttatctatgacatttctaaaatgaatattataaagtgtattgcatatagttggattgggaagaaaaaacatttcctaattattctncctgtcaagcatctcccttcaaactacccttttaattaacagggatagatatgcattcacacggttcctcccagcttggttaatgggcaagaacacctaagatagccaaggccaccatgcatcccaggctcacatctccctaattgccctcctccatgattcagggacaaggaggatcaccatcgtgtgggaagatactagaaatgtagaatttggaaccccacccctacctacggaatcctgatctgcacttcaacaggatccccgaactattcctaggcgcgttcgaatttgaggaacattaacggaccaattctttgtccctgaaaagtgcccgttatagaggcggccgctgggaaatgacaacggggttggcatggagaggtattaagtaga

SEQ ID NO: 268250 - DNA, 528 bp, Homo Sapiens
  misc_feature (16)..(16): n is a, c, g, or t
  misc_feature (145)..(296): n is a, c, g, or t
aactttcaattccatnctcctcaattagagagacctcataccatccagctcccagctctggctgtgctcagtgaagtagcccactattactattactgttgcaaatagtgagagatacaggcgcatgccactatgcccagctaannnnnnnnnnnnnnnnnnnnnnnnnnnnnnnnnnnnnnnnnnnnnnnnnnnnnnnnnnnnnnnnnnnnnnnnnnnnnnnnnnnnnnnnnnnnnnnnnnnnnnnnnnnnnnnnnnnnnnnnnnnnnnnnnnnnnnnnnnnnnnnnnnnnnnnnattatatcatcctgaaatacctgatcattttgctatttcccttcctgctcttacctcttgcatgtacctcctctcttggcatagagctggaagcctcctattgtatgccaaatgttgggggaattggcagcaggacatatggcagggaggacaaaggtaagtggcctcaaggacaatggaggtaacattgtcatgttccctatcttaaagaaatgcatcggctgggcgcagt

SEQ ID NO: 268251 - DNA, 806 bp, Homo Sapiens
aaggaaaaaatgcctaaaagcaaagataatatgagggtagccatggggaaaacataaattggcaccaaaatccttgaaaagtatcctaacccatgctgtttcacgtttacactttactcaatttacctttatcagaggggccagaaacaatcaattcaacttcattgaccctataatttacaaaggaatagcgtatgtattggctttggggtttctaagaaatagtaaaaggataaatagtgaattggtcacctaatcgggaaaggtggttccttggtaagatgataatttcaggtgtgaatgaccacagtgtattcctctgcccactccttcagcctcatagcctcaggcaaggtggccacttcaatagaaccctgcaaagtcagagggcctgagttcaagccctaacgcctttgtctctctgatttacccactctgacacaaggcaggcttctcacttctcagagtgtttcctcattaggagtctgataataattcagatattacctcccaagggaaaagaggaaataatatatacaacaatgctttatatagtataccttgatatccctaaatcattatatttctggatgcttttcctgaagcaaatgtttggctggactaccaaagtcagtaatttcataggcttttctcaagtatttgtcgtaactactgtcgtctccattttacctaaaacattaattttcccatgagaatacaccagaggttctataattgtactgctagacttaatttctcaccctttcccccttagtctttgaataaaacaatttctatacatttaa

SEQ ID NO: 268252 - DNA, 491 bp, Homo Sapiens
  misc_feature (340)..(445): n is a, c, g, or t
  misc_feature (452)..(452): n is a, c, g, or t
tactatgtctcagagctcacctcgtaagttcttgtcctctctggttctactctggccacattggcatttttactgtttctcagttaaccttccctctttgagcctttgtgttgtttgttttctttgtcaggaatgttattcctccagctatctccaaggatagctcccatagatcctttaggtctttgctcactaataccttgtcaatgaggtttaccttgaccaccctttaaaaaattgtacccccacttatcttgctatttaaaaatttttttacagcatttatttatttattgtttactatgtaaaatgttatctaaaggtacataagggtaggaannnnnnnnnnnnnnnnnnnnnnnnnnnnnnnnnnnnnnnnnnnnnnnnnnnnnnnnnnnnnnnnnnnnnnnnnnnnnnnnnnnnnnnnnnnnnnnnnnnnnnnnnnacgaggncaggggtttgagatagctggcaacatggtgaaacccgtg

SEQ ID NO: 268253 - DNA, 615 bp, Homo Sapiens
  misc_feature (372)..(512): n is a, c, g, or t
gaagagtgtgtagaagtggaaatacgtatgcctcctttcccaaatgtcactgccttaggtatcttccaagagcttagatgagagcatatcatcaggaaagtttcaacaatgtccattactcccccaaacctcctggctctcaaggatgaccacattctgatacagcctacttcaagccttttgttttactgctccccagcatttactgtaactctgccatcttccctcccacaattagagttgtatgccagcccctaatattcaccactggcttttctctcccctggcctttggctgaaagctcttccctctttttcaaatgtctattgatattctcccattttcactgcccaactaaaatactattaatannnnnnnnnnnnnnnnnnnnnnnnnnnnnnnnnnnnnnnnnnnnnnnnnnnnnnnnnnnnnnnnnnnnnnnnnnnnnnnnnnnnnnnnnnnnnnnnnnnnnnnnnnnnnnnnnnnnnnnnnnnnnnnnnnnnnnnnnnnnntaaaatactatttcttattgaggtttaacctctatttcccctagccctgtccttccactaagcttggtagatgtaataataaagtgaaaatattaacatttga

SEQ ID NO: 268254 - DNA, 719 bp, Homo Sapiens
  misc_feature (18)..(18): n is a, c, g, or t
agaagaaaaaggaagagnatgacaaaagaacccggcagttcctaggagcccagccccgggcaagctctttctccatgtgttatttcatttaatcctgaaaacaacgttattaattcctatcattggtgctttacagatgagaaaaccacagctttgactgattaaatcatagcctttcttaacaccatgaattatactttgggaaatagtactccagagaagttcttctcaaccaaagagtcaggatccaggggaatagggggctaagcgtggactggaggaatgaagacacttggcttccagctttttgtatgtcagtctccttggtccacaccacagagctcctttggacatcattatatccgcaagatgtaatcattacatcttctcaggccaagcaaggtacaaagtgccaaaatcttaaaagagggggcattggatagaaaatattggacaacctcttttcctaagagaagaagatctttagaagaaaataaagctatttatacctctgtttctaaatacaaccatttttatacctgccctggagttggttcccagaagaggatacccattccatggctttctttgaattggcatttctaacttcaaactagaggaattagtcaaagttctttaacacactaaaccacccataggaatggaactcaccaatataggggacaggcaagcgggtttctgggttctttagtcattga

SEQ ID NO: 268255 - DNA, 463 bp, Homo Sapiens
tttgatttagtgcaaaaatgttttcaagactatttaatggatgtaaaaaagcctatttctacattataccaactgagaaaaaaatggtcggtaaagtgttctttcataataaataatcagacatggtcccatttgcaggaaaagtgcagactctgagtgttccagggaaacacatgctggacatcccttgtaacccggtatgggcgcccctgcattgctgggatgtttctgcccacggttttgtttgtgcaataacgttatcacatttctaatgaggattcacattaatataatataaaataaataggtcagttactggtctctttctccgaatgttatgttttgcttttatctcacagtaaaataaatataattaatggtttgcatgtgaaattcacttttgaaagaacatgttaccttaccttttgttttagaagttttcaagtattaaaatattttttag

SEQ ID NO: 268256 - DNA, 772 bp, Homo Sapiens
  misc_feature (721)..(721): n is a, c, g, or t
  misc_feature (723)..(723): n is a, c, g, or t
  misc_feature (731)..(731): n is a, c, g, or t
  misc_feature (746)..(746): n is a, c, g, or t
tagtgccacagaaaatcaccatataggggaattctatatagttccctccatgaattgtgacactaagtaaccatctagagcaggtttttttcactatgtctggaagatttgcttcaaaatgttttaacatattgaaaaaaggggttaaaaaactattatcttaactgaagtaagaggtaatatttaaggctaagcacttgaaaagaattacatggggattaaattaaccctaaactttccctagttttccaacttatatgatgaaaatattttatattttcaggatacatttgcaaacatcttcatggaggaaaataaacaaattaacaaaatctattccatttattcaataaaaatccataaaatccaacagttaatatcatagtcattgttgtccatcttggccccaaatcaggaaattccgtgtgccgtcttttcatcttctcgaggctgtgctagtgccagccatgtgaacagtcctcttttgttagcacagtgttgtttacacagtgacttctgctcccaggaccacacagtgtcaccaacaaatccctgtcaatcatcacttctaatgaaaaagacatgctgaagttttattaagtggagaatcatgttatttccctaactctttctcagcattcaaatgggaacaggtaatgcttcagtatgctttctcacacaaacgttggatttcttccatgcctgctggtcatagctctgngntggggtgnttttctggttgattngggattttaaaaaacacacaaataag

SEQ ID NO: 268257 - DNA, 424 bp, Homo Sapiens
  misc_feature (277)..(277): n is a, c, g, or t
gaaatagatgtgcctctttatctcaaatctctgtcctcttcagacagccgcttctctattctgttgggctgtggcagggattttcttcttttctttccaagggcttcctttatttctcgtgtctttcataattaaagtagcagcatgcggcacctatcttaatcctaggtgaccttcagaagctttagaaatattaccaacaatgactggggcttgctatgactgccatcaaattcaaaaggtcagttcccccaatctgggtgactgggagtggggnagagggaagaagttttatggagaacaggcagacaatcagtctggaacaaaataggaagatgaaggtatattttcccccatatctcctgtcacagtcctgaactattgtaaaaggtaaataattcaagaccagtctggccaacgtggt

SEQ ID NO: 268258 - DNA, 493 bp, Homo Sapiens
cctaatcacctcacgacagcaatacagcagtgatcactcacactcctcaccccatggaagccattatgatagtgagcatgtgccgtctccctacagtgaccatatcacctctccccacacaacatcgtactctggtgataatatggcagctaccttttcagcagagatgcccatcatggcgcagcacttgctcccaacccaacttgaggtgccacttggaggcgtggtaaaccccagaactcactggggcaatctccctgtcaaccttgggagacccctctccatttaggcaaccttcttcggcgcagatgggacatcttctttccacttccctatccacgccacccaccacttcgaactcagagaccacacagcctgccttcgccaccgtgacccccagcagctccagtgtgcttccggggttaccacagaccagcttcagtggcatggggccttctgctgaactaatggcctccacctctcccaagcagca

SEQ ID NO: 268259 - DNA, 479 bp, Homo Sapiens
ttcctgagcatgctggctagctcaaagacagtgtacacactgttcatcattccacagatgctctccagcttcgtaacccagacccagccaatctccctagcaggttgtaccacccaaacgttcttctttgttaccttggccatcaacaattgcttcttgctcacagtgatgggctatgaccactatatggccatctgcaatcccttgagatacagggtcattacgagcaagaaggtgtgtgtccagctggtgtgtggagcctttagcattggcctggccatggcagctgtccaggtaacatccatatttaccttacctttttgtcacacggtggttggtcatttcttctgtgacatcctccctgtcatgaaactctcctgtattaataccactatcaatgagataatcaattttgttgtcaggttatttgtcatcctggtccccatgggtctggtcttcatctcctatgtcctcatcat

SEQ ID NO: 268260 - DNA, 799 bp, Homo Sapiens
  misc_feature (77)..(77): n is a, c, g, or t
  misc_feature (770)..(770): n is a, c, g, or t
aaaaatagcccaagaatttaagttcctgtgataatttggtggtattcacttgcaattttcataaagtgtttttgtancttattcattgctctaaactaatgaatatacatcttacacttattaagaaacattgaaaagactaagtcactgaaaataatgcccttttgcttgtatgtgtgtgtatcgacaaatgttactgtctccatttatctggaatgtgttgtggttaatccacaataatagttcacatctgtcactgtataaaaatataatggaatgaaccttctcagagtttcagtttctgtaccctctgctcaaatctaaatgttgatgtaaattttgaaaattcaacaatgtgataattgaaaggacttgacatttaagacagatgggaatgctgcccaaggatagtgggaccccgcaggccagtcaggaagcagggccacagctgagctcctggatgaagtggcaaggcagagctgtggtccagggaagtttgtgtccaggatggggtgcctgcacagcgtgcagagagtgcctggaaaggcaggcagggctggggacgtaagtggaccacgcccaggctggacagcagatatatttttaattcctctactttgctaggtgccacaggggatgatcgattttgttaactttagggctgttcctacacttaaggagctaaaagtcttggagtcccaaagcactaacactataataatagaggataaagtaagaactatgatcattactaagaactttttgggatncttggcaaataaagtgtaatttattagga

SEQ ID NO: 268261 - DNA, 783 bp, Homo Sapiens
tgaggattccaagcccctgagaggagaggcgatttactctcagacacccagcctagctataagacagaaccaggatcagaaccaaggtcattttggtgtcaaagccatgcatgttttaaaatgtttttctacaaactgtcttgttttggccacgctctcagaataggtcatgcctacaggcaggtgccattgttgaggcttgttaagagtgtagagaaaaaagaatactggcaggcattgtgcagtggactgtgcatagacgatctcatttattccattgtacggtcagattagctgaggtcaggggcaggattcgaacccatgtctccctgacagcagaactcaggtgctcatccacttgccaaccagctttccacttagatcattaggataatagctactctctcaagactaagtgctaagatctcattaaatacataccaccaggggatgaggtgagaactgttatctctgttacacatagaaggaaatggagacatgattgctttgattttgacctaaatgctctcctgccccctcaccctttgatcttccattgaggtgagattgggggagtgccgcagtgtggtcctcagaagacacaccatagatacactgttagcattggatgaaaaagaagggcttcatacctttccacagaggtcggtcctcttcaagaccatttgaatttaatgctcaaagagtttccttctctccctgaggctcagcaaccctccggccttgcagtttagcctgccttagacttagtcttgcatgtgtaaa

SEQ ID NO: 268262 - DNA, 513 bp, Homo Sapiens
  misc_feature (302)..(302): n is a, c, g, or t
cttcaagatattgtgtaaatactgagccaagacatttctggagctgtgctctgtctccaaaaacctcaatgcctttagggcttttctcagtggtccagctagccttctctttggaggaggatgaagccgcattgcacattctctgcttcctgtcgtagcctctgttgtcaatggaaatgcggaagcccatctggtgcccgtcagtgagaagcaacgttctgcgctctctccgttagacctccatgctgtccccagtcttgtccattccatgctgctgtgttacaaactctcagaggtagttntgcaggggaggaaggggaatatgattttaaaaacaaaatatttacaacaacaaaaattcttagggatcacctgacctttgtaatgttatttatgttgggttcccgggaggggggcttgaggaaggggggaaatcaggcagtgttgcaacatcttttattaattttgttacttttaatttaccaaattcacaagggaaacccattaggtttg

SEQ ID NO: 268263 - DNA, 466 bp, Homo Sapiens
  misc_feature (427)..(427): n is a, c, g, or t
  misc_feature (434)..(434): n is a, c, g, or t
  misc_feature (442)..(442): n is a, c, g, or t
tctcctttcccccaaccaacctcagaagaggcaccttcagaaacacacatttcttaaaaggaaagtgcagcttcaagatattgtgtaaatactgagccaagacatttctggagctgtgctctgctctccaaaaacctcaatgcctttagggcttttctcagtggtccagctagccttctctttggaggaggatgaagccgcattgcacattctctgcttcctgtcgtagcctctgttgtcaatggaaatgcggaagccatctggtgcccgtcagtgagaagcaacgttctgcgctctctccgttagacctccatgctgtccccagtcttgtccattccatggcttgctgtgttacaaactcttcaggagggtagtttgcagggggagggaaggggggaatatggattttaaaaaacaagattatttnacaacancaaaattnttagggttcacctgacctttgtta

SEQ ID NO: 268264 - DNA, 751 bp, Homo Sapiens
tgatgtagcaacatgcaggccaagaatttctctaggccccagtgacatgggggctaggtttctctccaccttcttggcagtgtgtggctgagaaaatccctgctctcccttgtctgtggttgagagctcccaaagatagagttcagaatcatctttctaaatcaacaagaggctctttcatcttaattataacagcttaaacttttagagtaagtcaacgtttaccatcattttacgtgtgcttattatcaaaggtggatctgaaggaaaaatgattgattaccttcctaaccgttttaatacttttatatttattggcagaatttgagaagggtttgagctgtaaaaataaagctctcctatctaatcttgaggagaaaaatgaagcttggagaggttcagtaactttcccaagtaacaccactaatcagcggccaagcaagggctgagaagtcctgattcaaatatatgaactctactgtagcaccataccctggttttcttcccatccagggggctaaaagagcaatttagagatcatttttagtgtattatacaaaatttagtatcttatatttctgaattaccttggaacaaagagcaatttagagatcatttttagtgtattatacaaaatttagtatcttatgtttctgaattaccttggaacttttcattttatgcagcttttttcccctagaagaatgaaaaccaggtcctaggattctaatgcccatctgtcaagtgagta

SEQ ID NO: 268265 - DNA, 811 bp, Homo Sapiens
  misc_feature (274)..(334): n is a, c, g, or t
  misc_feature (336)..(436): n is a, c, g, or t
  misc_feature (600)..(626): n is a, c, g, or t
  misc_feature (639)..(704): n is a, c, g, or t
  misc_feature (783)..(783): n is a, c, g, or t
  misc_feature (789)..(789): n is a, c, g, or t
acttgacatgacatacagattcttcataaatttgtctttggccaaattacttgtaggtctgttaatgccatttgcttcctcactcttctgtcagctttgaatgctatgcttttcttttctccttaactaatgcatctctgtcaaaatctacctcaagggtcagtccctttaggaagctcccaccccaggtggaccacgataacctcaggagtcattaatagggtggcaaaagatttaccttcagagtaatatagtatgactgctcatagtcaannnnnnnnnnnnnnnnnnnnnnnnnnnnnnnnnnnnnnnnnnnnnnnnnnnnnnnnnnnnntnnnnnnnnnnnnnnnnnnnnnnnnnnnnnnnnnnnnnnnnnnnnnnnnnnnnnnnnnnnnnnnnnnnnnnnnnnnnnnnnnnnnnnnnnnnnnnnnnnnnntccacagactttaaaaagtatcactctttattttaaatagtttgactcacaagaaataactaaattcatccggagtccctatgtatgcagtacccaccttcctataacaatattttacataatcatagtacattatggataccaggaactgacattgatacagnnnnnnnnnnnnnnnnnnnnnnnnnnngagacagggtgcnnnnnnnnnnnnnnnnnnnnnnnnnnnnnnnnnnnnnnnnnnnnnnnnnnnnnnnnnnnnnnnnnntgggctcaggcagtcctcctacgtcagcgtccacccaagtagctgaaactatgggcacacaccaccatgcctggctaanttttgnattttttagtaagacgggattt

SEQ ID NO: 268266 - DNA, 519 bp, Homo Sapiens
aagcagtaataataaaatactttagcaacaaaatacccaaggaaagaaaaaaggcacagctggggcaagcatggtcaagtgtgggtaacactgaatttgaggtgatgcgggttccttacattcctgctttgtatattttgaaaacttcctaaataaaaaactaaacaattatctctagaaagtgaggttccattaacacaaaccaaaaacagcaagatctattttaataggaggcctaagtagaagatgcccaagaacaaaatttatttagaatctcgcacatgagcgagtgatgagatacctctgctggggtaggggcatgatcccactccttaggaaggaacattccagcttccacagcattagcttcaccagggagcggccacccctgccccacagcagtgctagctcaaaaccacccaaacctaacctgctgtccagacgccagggtgggttcccttaaaaacaaaaagacaactttgttagttcacagcatcagcaaggaccgtcgtcaggcaa

SEQ ID NO: 268267 - DNA, 761 bp, Homo Sapiens
  misc_feature (363)..(363): n is a, c, g, or t
cagaagaataaatggagtacttaatcccttttactaattcaagtgtgtgctaattgaaatctctaacacctcattaatgtggaatgacttgggagtttagtggttctcactggtcaaaaatttccctaattacttaaagatgtttattatcattaataatttaaatcagggaagtcacgacttctctgagctactcacttaagtagatcaaaccccatccaaccgtgttggaattcactcacgttctttccgaacagtaaagctaccatagatttttaccatggtcctttcaactttttacctctctgatctcattttattccattttaccctcaaaacaacccagtaaggaagggtaaaacntcaaaaagatcccttaccggtgtggctcccggaccctatttaataatctattaagatcataccagatctaaggaaaactgacatcccccgggtatttatacaagtgagtgtaatgtgtgagagagtcaactacacttgagttctgaagaatgggactgtcggtaggggctgatgtgaagggcaggcatagggtgaaagatcactgggcttgactcttggttgttgaagggaggacaccgactggcaaatatggccatgcctgtattattccactctgggacatatttgtggcatatatgagatgtaagaatgaatccttcacagggacattggatgggtttttcaggctatgtagtaaataactatttggatggtgcaggcaaagagttaacaaaaac

SEQ ID NO: 268268 - DNA, 781 bp, Homo Sapiens
  misc_feature (245)..(372): n is a, c, g, or t
  misc_feature (690)..(690): n is a, c, g, or t
cgtgagccccgtgcctggccccaaaccgaaactcttagctcttaaaaactgagtccccattgtcccctttccctggtccctggcaaccttttttctactttctgtctctgtgaatttgcatatgctagatgtacctcatgtaagtagactcagacattatttatccttttgtgtctggcttattttacctagcttaatgttctcaaggttcatttgagttgtaccatgtgtcaaaatttggtacnnnnnnnnnnnnnnnnnnnnnnnnnnnnnnnnnnnnnnnnnnnnnnnnnnnnnnnnnnnnnnnnnnnnnnnnnnnnnnnnnnnnnnnnnnnnnnnnnnnnnnnnnnnnnnnnnnnnnnnnnnnnnnnnctgttcatttgttgatggacacttgggtcattgtaccctttgactattgtaaaaaatgctgctgttaacattggtgttcatgtatctgttggagtgcctgctttcagtttcttggggcatatacttagaagtgaagttgctgaattgtatggtaattctgtgttcaactttttgaggaactatcgtgctcttttccacattgtctataccattttacaatcacagcagtgcacgaggatttcactttgtccacatccttgccaacacttttttgctcccccccataattatgatatcttttcacccattgaggaaagntgggctcacatagactctcttctttatgcgatagaccccaaatttcatctcgtaagagtaccagactggaaggtcataaagaaatctgcag

SEQ ID NO: 268269 - DNA, 761 bp, Homo Sapiens
  misc_feature (561)..(701): n is a, c, g, or t
agctgtcttgagcaaatatgggaggattactgtaacattattttaccagaaggcagaataaaggacagtagggcaagataattaaatatattggcaagagagtggttcacttgacccttgggatcttatttggatagagatgaaaatgaagacaggataagactgataagtaaaaataatagtggtgaagacactgcgaggttgtgaaaaatataaggaagtgagatttttggaaggctatgtggttgtggttagaaagtaggtcttttggaggaggacagtttcaagtgtggctgtgaaaggagtagctaaagtcttggaggtgtagaccactggagataaggaagcaaaggaactgagaggctagtttattgaatgggctaagtgcttagatcaaccaggatgagaagaatgcatgctctgagggaatctcttctacagacctgtatagcaagttcacagtgttattagtaggtataattccttccttttaagatggcagaaagttgtataaaaaatattggcctgagtagctgggattacaggcgcatgccattacannnnnnnnnnnnnnnnnnnnnnnnnnnnnnnnnnnnnnnnnnnnnnnnnnnnnnnnnnnnnnnnnnnnnnnnnnnnnnnnnnnnnnnnnnnnnnnnnnnnnnnnnnnnnnnnnnnnnnnnnnnnnnnnnnnnnnnnnnnnnctaaacccctgatttttaatggttaaataaacttggtttcctcgcagccatcagtaaaac

SEQ ID NO: 268270 - DNA, 1016 bp, Homo Sapiens
gaaccagccgagtccccttttatcagaagggtctgaaaagcagcagcacagagtaggtgaacacaggcctgcaagtgcgaccacctcagacccagtacgtgtgcccacagtggacacactcacacctccaacacacccacgcgcaggcatgtgtacacgcatgtacacacgcatgcatgcacagccagatggccactcagcacagatgtggcagagggaatggtctgatcctgctgaaagccattaaggagaaacgaatttcccagtgcccgggctgcaagagagccttataggggccctgtttcctgggcatgcgcttcctctgccagccaacccccacttgcccaagtcactggtgcaataacttttctgccttcctcagagcagagaaattgggaattgtgttaggtgggtgtgggcagctctgctaagccaagcagacacggatgtcccctcttctgggaggagggtagtgctcccaggccctcagggagtccagacagagacccccaaagcctgactgccaacaggaaaccctctcctagtgaggggcaggtgggtgcgccccaggtccccacacccacagggaggcttcacacactgcccagtaccggggatgccaggaggcaggcccctctgctgctgccactgctgccaacactgcccagcttgtgaggccaggaggagcccctgtccccactcggtgctgctgctcttctgacccctgctgtgaggaatgggattcttggtcgaaaaaattggttttccttttttgtataaatgaaaagaatcccaggagaagctgccaccctcccctcccagcgtgatgcgctaccttgcttcggcgtcttgtcgccctttccgcctttggtccagggacagcccagcagatcctcctggttctgacctggggggtgtttgcatcacccccttttacttgtattgaaaaaaaatgatgggttgaaaatgtactgaggattaaaaatgtacttttttataaataaagtgtttaaaac

SEQ ID NO: 268271 - DNA, 584 bp, Homo Sapiens
aaaaggcaagatataaatgccttttatagatctcttatttacattgaaaattattaccatactgtttagagcaaatccaagaaaacttcaacagcttctgaagatgtctatgaatgttgaaaacttttcaatctcttggaatgctcagttatgttcctagaccggtctttgctgactactggttgttaacctttccctagcctgggacctcaagccatatatatcctttgggtgacccatgggccaaagttattaagatgaactgactttcaaagtcagagaaggacagcatagggagaggcggttatttgtaagtcattacaggtagaacagggcagaaggaaaagtatgttctggagaaagggccatgttcctaactttggagatatgtcattgccgggaacctagtatcttccaacttgaattggtggcagctgttccagtgagacaaggcacatgtatgccttgtggctaagtgagcaaactgggtttccacttaaatgtttgggaccctcaattgattctttatttcaaacctttataaaaggtacagttttgtaagccattattaataattaatgctt

SEQ ID NO: 268272 - DNA, 1009 bp, Homo Sapiens
  misc_feature (487)..(487): n is a, c, g, or t
aacagtaacaatcaaactactgcccagtttccctggactagccgaggagcagggctttgagactcctgttgggacacagttggtctgcagtcggcccaggacggtctactcagcacaactgactgcttcagtgctgctatcagaagatgtcttctatcttttgtgaatgattggaacttttaaacctcccctcctctcctcctttcacctctggcacctagttttttcccattggttccagacaaaggtgacttataaatatatttagtgttttgccagaatctctcttgctttgccattaagcagaagaactagtttccctgtatagcctgctgggagagacccacttctagggtatgggggatgcagcttcaagcccagtgcccagtgtctccctgttaactgcaggaatgccaagcacctgggccagagcagcccagccccaatatgcttaggaggagacagagttccctctgtatagcctctngggacaagaaaaagaaaacacaagaatgtatacactggaagatttgggcctcctgcctgccttctctttgtttctgttcctcttcccatctactcccgtacgccccttcaaccttttttctctgtctgcttcacctgagaagaaagtgtatgaagagagtgtcctcctctcgcatgagccagatcagccagaaaatgcaacacttggaagagttaaatgctgttcagtgaagatttcagccccaggcctttgctgcaagtgaccctgtggcttctcagacatgatactctcatcatatttgcaactcttctctctctttcttccccacacccaagaggaggattggtggtagggggcaggcagagggggtggggagaagtttcctgggctccatcaatggctgcatcttttctggactcagcagtctccttgattccatgtagagtgtggaaaggagttgctgattgcatttcctctcattaacaattgggtgtgtaataaaaagcattgtacttcatctta

SEQ ID NO: 268273 - DNA, 505 bp, Homo Sapiens
  misc_feature (42)..(42): n is a, c, g, or t
  misc_feature (65)..(65): n is a, c, g, or t
  misc_feature (153)..(153): n is a, c, g, or t
aaataagatagaaaataaaaaaatcaggatgaatttttttanaattaaaagaaagaggaagaaanaaggaaggaagatttatttcttgaaggagaaatacaaagagcttaattgggttaggtctctgggtagcatttggtttctaattcccanctgtacagcctatgcaacaacatacttgtgaccaattctacatacagatcatgatttgcatagctttcctttgtgtcaaaaagaaaccagggctatgtcctttcaaagaggaagtaaagaaaggctggagaacagtctagctgatgaaagctgctttaaaaatccttttccaaattcccaagactgcctttctaaaaggactctctaacattcttattttaatatcctcttgcagcataccttgatttccaagatacttctgaaacctaattaaaatggaacagaaagtgaatttggtgttttccacctattttttaaatgagaaatgaaagactgtatatttattattgtt

SEQ ID NO: 268274 - DNA, 328 bp, Homo Sapiens
gaggtaggatggatggggtttggggtgggtaggccatgggaggggagaagccctacttggcaccccctcttccctgactgctgtcccctacccagccttgcccccttcatccttttgcgtttggtattgagactctcctagactctactcctctttctcttgtatggagagttcccgttcagtcccattctcccaccccactcccagccttatctatcccccctcactgtccccttttctccactcccagccccatttcctttttttctggagtgtgtggtgaaacagaaaaaaacatgtttaataaacggagattgttcttttaaaa

SEQ ID NO: 268275 - DNA, 335 bp, Homo Sapiens
aaataattgaacagattaactgggcactgaagtaaaattctacctactttattctcttagtaaaaactatacacacaataaacaactgtcaaggttgccatcatttgagttttgtcacctaggaaaacattgtttatactttgtttttgaaaaaattcatatgaatttcccctgggaataacttgttttatttcagtttttattttctattgaaacacttgttttctagtctaggattttagccaaatagaaaagctatcatttaatttgggggaaaaaaatctattgtcctgtgaagaatttatagcaattattaaactatgttgcttaaatat

SEQ ID NO: 268276 - DNA, 528 bp, Homo Sapiens
agacaataaagctaagggcctcggggttgtccttgggttagcccaaggacactagattttagcacaagttgatcaagaatagtgtccggctaaggttggaaactctatgtcagcctctgattggatgaaaataagcgcgaatgacagcaagaacttaacgggctctagaaggattctgaacccagaaacagcaaggggacaagaaacaaatagtgaatgtgcttaaggagtcttgctaacaaaattgtatggagtttccctcttagctttgtgaaatttggttcattttgaaggttcatgtgttagtttcatggagatgattctgctggctctaaacaagccatgggagaagccaaggcacaccagctctcctgatgtgggttagcaatgtgatccttgtttttccagccagcttattgataccttctatctcatggaaaagccttccttgctgccctaactgacctacataaagccatggaaataattgattaggaacaaaaggaccttagacccatctgtattcag

SEQ ID NO: 268277 - DNA, 839 bp, Homo Sapiens
  misc_feature (363)..(363): n is a, c, g, or t
  misc_feature (513)..(513): n is a, c, g, or t
  misc_feature (597)..(615): n is a, c, g, or t
  misc_feature (650)..(658): n is a, c, g, or t
tttttactgcataaggctcggcatgggtgacaatattagtacaatgctgatggctacataattcagcacgataaaggaaacagctcaatgccaacaactaaaagaataatttaggtcccaagaagggtctcagtgaggttccatccaagctcaaagtttccaggcaccagaccaatactgaaaaccagaaattggggattaggggccaaggagaaagcatgaccaaggaggaggaatgagccacagtaaacttactcatgggaacatggcaggaagtaaaactaataagagtgagcccaaggccagctttgaggccgtggaacaatgtcaccctctctccattgccaactctgatagactatntgaccccagcaatttctagctttgttccaagccccatcccaaacccagggagcatctgctctgtccttaaaaagtttctaaaagtccattttgacccttatgtaagaataaggtttgaagttttgtagtggagaaaccatctcttttacnagttgcaaaaatatttacttacttagaacttctgatgtgaagaacctggttaatttcaagtgctaatttatcacaaattaaccnnnnnnnnnnnnnnnnnnntgggcttgttggtttcacactatcacactgatggnnnnnnnnntcatcatgtccctaggtagctattttcacaggcagatttgtggctattgaatgactgtcttatggacatttcctttctttgtttttttctagttgtgtacagttcagagactcaagtccgattagcgctaagacaactctgtccaactgaatttaaaataggtttttctaaaaatagaaga

SEQ ID NO: 268278 - DNA, 673 bp, Homo Sapiens
  misc_feature (24)..(24): n is a, c, g, or t
  misc_feature (31)..(31): n is a, c, g, or t
  misc_feature (61)..(61): n is a, c, g, or t
tttggccctgcgcggccacagtanttcggcncgaggtaaactaaaaaattaagaaaataangccaacaaaatgtctccaaaaatatctcccaaagtgctgagattacagacgtgagccaccatgcccggccagccttatttttcataaacacacgtagtagggccaggtgactgtcagtccccttctcttccctgtagcagagctagggagcttcgttcagcacaagagggaatggccaggactatagccagtaggaaacagttttcttctaaatcaagttatggccctcaaagagttcatagttgatgcatttctttgcttgggatttttctttttaggcccagggcacatctaatttatatttttctggaggatgaaaatttgattgtgtttccataagaagtggcacccagaaatgctcacaacatgtcccctggtgtcgactgccatgcagagatgtttacgagcagtcatctctcctcttcccactgccaaacttcaatggtgcccctatgagtccattggtggtacagtttatagcagtgcgctcaggaagtttgcaaacaagttgtaattttagcaattctcattcctcagctttttatgagtccttgggagaacattttttgcttagccaaagtttatttgatattgctgaacattaaaaaagaa

SEQ ID NO: 268279 - DNA, 295 bp, Homo Sapiens
  misc_feature (166)..(166): n is a, c, g, or t
  misc_feature (191)..(191): n is a, c, g, or t
  misc_feature (250)..(250): n is a, c, g, or t
aacttgcgcagcctgtcaacccagggtgtgtaggctgaagcaggtcctgactgttccacagaactctctggccctcagctcccagaagcaggggcacaaggggcctgggccccatccgttctcaagcttgccccatgtttttttatccaaagaatttgttaattanttatgaagagaaactacttattagnccatatattcatgaatagttcaggtcagtgacaaacttctaagtaattcaaccccaagnaattcttcatattccaaaatcacttttgcatttgagagatagcag

SEQ ID NO: 268280 - DNA, 752 bp, Homo Sapiens
  misc_feature (39)..(39): n is a, c, g, or t
  misc_feature (227)..(259): n is a, c, g, or t
gtgctgggacctgaacttgctctctttatccccacaggnagttggaccctttgggggaccgcaacctggagtcccactggggtatcccatcaaggcccccaagctgcctggtggctatggactgccctacaccacagggaaactgccctatggctatgggcccggaggagtggctggtgcagcgggcaaggctggttacccaacagggacaggggttggcccccagnnnnnnnnnnnnnnnnnnnnnnnnnnnnnnnnnaagttcggtgctggagcagccggagtcctccctggtgttggaggggctggtgttcctggcgtgcctggggcaattcctggaattggaggcatcgcaggtaacatctgtcccagcagggggcgggtgtgtccttgagatggccacagggcaaggacctcaccctctgtggctgtgttttcaggcgttgggactccagctgcagctgcagctgcagcagcagccgctaaggcagccaagtatggtgagtgcctcccggggtggcaagtccacggctcgggcccctgcatagacctcggagaccctagccgcaaagccagatggacttggcctttgttccttcccaaatatgcattgttcatgcctccttacctttgccccttctgatcactctacctgagatgccatctctattgttttgccctgattaactcagcagagggaggggaccctgcagaggggacatggctccttccacttcatcccctccaggcca

SEQ ID NO: 268281 - DNA, 442 bp, Homo Sapiens
caaaggatgaataggagttccccagagagctacattcttaataaaacctcacttctttaagattcgtctctgggaagagatttacccagtagagatcagagccggacattttattgttttccaagtttgaccttttcatttcaggagcgtcaagcatgaacagccaatccagtttaagtgtgggcatcttgagagtaacactgtgtcttgttccttcttgtgttcctgctattgactgcaatgctcagtaaatgtttcaggcatccacgaatgaatgattgaacaaaacaacaattaatcaattaataaatgaaagctatcatcatcaggtggaaataatgcttttaagtaagactaagggcttttatcactacagagcataatagaaaggaaacaagccaattaataagaaataattttgcttaaaaaataatttttcagg

SEQ ID NO: 268282 - DNA, 491 bp, Homo Sapiens
cagaaccagctccagagcaactttccccaggacctgcttggggcttcaggctgctcctggcccaggctcgagttctctgccgctccacctcctgcagggcactccccggctggcctctcggatatctccggtgtgctctcgtgggcctccttctccagctcagagagggggcagttccgagtccaccatgtgaggcgtgtgagctgttcctcagggatgggagttgtacagaggctgacaatgacaatgacgatggcagtgagcccgcagaggaggattgcaaagtacaggtagtggaagtccttcagcactgctggcctccggtccacctccccacaggctggcgctgggtatgagaactccaggatcatacgcagaagccccactcccaggccaaacacgaggccccagaaagctccgggctctgtgaccctcttgcagaagatggccagcaggaagagagcggtgatgggtggggccaggtaactggt

SEQ ID NO: 268283 - DNA, 384 bp, Homo Sapiens
tgttccaggatacaggtgcagagtgtggaggtttgttacataagtagatgtgtgccatggtcgtttgttgcacctatcaacccattatctaggttttaagccccatatatgttagctatttgtcctaatgctttctctcccctcacccaccaaccgccctcaagtcagttttctaagagtattaatcaagaaaccatctcataatcacaccaaagcatatttctacacaagatataaaatactaggatatttgctaaagaaaaatgcatgccatacactgtaacaatgggaaatgacttcctacagggataaacaatgctaaaattaaactctttggtaattaggtaaaggtggaacatgtggggtaatatattgtatatattt

SEQ ID NO: 268284 - DNA, 628 bp, Homo Sapiens
tttggatccagttctgtaagggcagaggattcattatttccaggtaatttaagtatgttctggggagaagtgttacaagatggactggggactcggctgggatcctgatgggatctaaattattgatttcacctgactgaattgctatttgcgtcacacctcaggaccctggaaacaatacacaatttgcccattcattaatttattaattcactcaacaaacttgtacatctgccataagtctgacacccatcctagttatcagggatgtagatagtcaaaagaagatgtaaacctaacctcatgcatctgtgaatctccccatctaaaaagacacagccttgtaaagaagcttgtgtgaaagtgctaacgacagacatgccaagtgtttaagggggatgcaggaagaggcgtggtaaaatggggttgggagggcagcttcagatgtctaaaggggtcaggcagacaatgcagataagtgaaagagggccagttgatgcagagtggggacatctggaaagcacccgccccatctaaaggaggcagcctctgagagtctggggatcagggatagaagggagatgtacttttcactgtacatccttttgtattttttaaattttgttac

SEQ ID NO: 268285 - DNA, 514 bp, Homo Sapiens
  misc_feature (24)..(24): n is a, c, g, or t
  misc_feature (40)..(40): n is a, c, g, or t
  misc_feature (49)..(49): n is a, c, g, or t
  misc_feature (54)..(54): n is a, c, g, or t
cctcctgtgtgttcccctggcagnataccttgtccaaacnagctacccnacctnaaatccccctgtagtttaggaacacaaaacagctaccacggtacaaaacggtgaatcaaaacccgaatacttaacaactctggtaaaccctaagccttctccggccctcagccccttctgccttctggaagggctatccctgggggtgaacttgaaactctcatcaggcttctgcaaaagctcttcttcctgaagacagacccagcctttgtgctctcaccctccactctggtaaagctgcacctctgggggaatgaggggctgcaggaatctctggagagcctggtgcttcacgatgctgctctggtgattcttgtacctaatctggtgtgctcaccaatgagtgaaagggatcgtgggtcagggacaccgagagagtgaggtcacttccacttcaaaccttcagtgagggggtgggatggagagaatgctgaatcttttttttgacgggatggggttt

SEQ ID NO: 268286 - DNA, 459 bp, Homo Sapiens
taaaccccatcccgtcaaaaaaaagattcagcattctctccatcccaccccctcactgaaggtttgaagtggaagtgacctcactctctcggtgtccctgacccacgatccctttcactcattggtgagcacaccagattaggtacaagaatcaccagagcagcatcgtgaagcaccaggctctccagagattcctgcagcccctcattcccccagaggtgcagctttaccagagtggagggtgagagcacaaaggctgggtctgtcttcaggaagaagagcttttgcagaagcctgatgagagtttcaagttcacccccagggatagcccttccagaagcagaagggctgaggcggagaagcttaggctttaccagagttgtaagttactcggctttgatcaccgctctgttaccgctggtagctgttttgtgtcctaaactacaggggagttgaggt

SEQ ID NO: 268287 - DNA, 443 bp, Homo Sapiens
  misc_feature (398)..(398): n is a, c, g, or t
aatgtgtcctcaagggagaggcccaaccctaattaaggagctaaacttcctgagtgaggggctgtgaggatggaggtggaggaggcatctggggcgggtggtggccgggcccagcagatggcgcctccctggctgagctgcccgcaccgccagttccctcatttccactcaggaaggcagagaaggcagagtgatctcctcaaggaagagcttccccagccttcgggagcagctggcagggcgtccgggaataagccctacacgccgccgcctgcctccaactcactaaccctgcgcctcttgtctttcagattcaacgcgttcaacagaagccatccccagcccagcttaaattattaaagataggacaataactctgtttccaatcttgcgtggtngcttctttagtaaatactgtacagattttaccatggagaactttt

SEQ ID NO: 268288 - DNA, 374 bp, Homo Sapiens
aatcaagtcagacaggtaatgtgctgacgtattaatagtaacaaggttcaagggtggcatctttcacatacgtgcatgaacacctaatcatgatcatgaactatataaaaggatcgttttttacattttttaatggttgaaaaaaatttaagagtattctgtgacatgttaaagttatctgaaattcaactttcagtgtctatgaataaaattttatattatttgagccacactcatttgtttaagtatttcatgctacaaggtaggggttaaacagttacaatagacactttatgacccacggaagcctaaaatatttactatctgggtcctttgcagggaaaagtttgtcaactcttgccttaagggtatcc

SEQ ID NO: 268289 - DNA, 427 bp, Homo Sapiens
  misc_feature (390)..(390): n is a, c, g, or t
  misc_feature (416)..(416): n is a, c, g, or t
ggttgttaagtctcccatgtttagtaattaacagaccccgccagagaggaacagaacaaaaatgagcatgcaaatgactaatcaaggaaagctggaatcaacaagatatgggtaaaaagatgctcctctgagcctggccatcatgcggcaggttctgcgcctctgatcacactgagctgcccaccttcccatgccctgggaggtaaagctatgtagtcctaccctgggtagcataggctgtgcactacacaattcagcatttgacttgaacaagaatggggatactttgggatacttttttctttaaaatgggttccagtctcccaaacacaagtatgggttgtatggatgcattttaggggatttatttatccacactgtggaattttnccacactggccttctttcataagggntttcaaaatgg

SEQ ID NO: 268290 - DNA, 294 bp, Homo Sapiens
  misc_feature (232)..(232): n is a, c, g, or t
  misc_feature (238)..(238): n is a, c, g, or t
tagcctcccaaagtgctgggattacaggggtgagccacccgccaaccagcagttctctttcacatgtgccaagagaaaaggctacagagaattaacctagctcctgccaaaatgcttttagcatcattataaatgacataaaacttaactttaaaaatgtgtcagaacaaaacaaaactaggagaatgtcaggaaattagttaaatgatagctttacacccaatcaaggggntttaanaaaaaacctttctcaaataataaacactttggggtcaacaaaggtaggttacctct

SEQ ID NO: 268291 - DNA, 1062 bp, Homo Sapiens
  misc_feature (17)..(17): n is a, c, g, or t
  misc_feature (37)..(37): n is a, c, g, or t
  misc_feature (82)..(82): n is a, c, g, or t
  misc_feature (105)..(105): n is a, c, g, or t
  misc_feature (125)..(125): n is a, c, g, or t
  misc_feature (129)..(129): n is a, c, g, or t
  misc_feature (154)..(154): n is a, c, g, or t
  misc_feature (164)..(164): n is a, c, g, or t
  misc_feature (174)..(174): n is a, c, g, or t
  misc_feature (176)..(176): n is a, c, g, or t
  misc_feature (186)..(186): n is a, c, g, or t
  misc_feature (789)..(789): n is a, c, g, or t
ccctctcttcagcaaanaaaacttttgcaaaaccctnatcaaatttcaattcaccccccagaataacccttccaaaaacaanaaggctgaagccggaaaaagctnagccttaaccaaaatttgtnaatnactcggctttgatcaccgctctgtnaccgctggtnagctgttttntntcctaaactnacaggggagttgaggtgggtagctggttggacaaggtatcctgccaggcaacacacagaagggcctgaaagtaagaccccctcccttcttggggaggggaaagaaaacgcaagagcgaactcctgcaggtggcacagctgggctaaggacttgggtgcatctgacatgaagaagccctgggaaggcatggggacagaccagcgtgggctggaggaaaggaaggaggtgggtcagggtttggtctctggattctgaaccccaaaggagcctttccaggaatggaaaatgcctgggagggggagagtcccaagagaggcaaatttcccagagataagtgcctcttacccactgggataggaaccaaaatgtgttcactgtccctgtttagccaagggtaggtggcatggccctccctgcctgcttatgtatggacagagtatgttgtctcagcttcctccgagagagactggtggtttagcttctgtctacacaggcagaagggctagaactatcccttgggacttcccagcaggagtcctcaggaacagtgggtgttcagcagaaaaacacaggctcttctggtgaggaggataggtttcctcntcccttgggtcatcctattgttggcacaagtcagagtttctggccgggatttagagagccccttcccaggtgtgagcaagaagccaagagggccagcagggagccaccagaatctgtgcccagagctctggttggcagaggagatttgggggaacattctcagtcttccagggctgggctgagacgagcgagggaggcgagagatgccatgggtgggggagctgctccctctggctccctcactcccagtcctcccactctacatcttccagt

SEQ ID NO: 268292 - DNA, 505 bp, Homo Sapiens
  misc_feature (433)..(433): n is a, c, g, or t
  misc_feature (464)..(464): n is a, c, g, or t
  misc_feature (469)..(469): n is a, c, g, or t
  misc_feature (475)..(475): n is a, c, g, or t
ttcaaaaagtgttgtgtaatagaaacatactgtcggctttacaaatcatgtctgggttatacattcataatgtaaatactcatcataactgggaaattgattgattggaacagttccacaaagttcaaaaacagaacttgtctataaaatacatcttcaaatcctggaatacaactaaaataagcaaattagtttctagtatcagacattacagaaaacagactgctctccaaagtctaggtgagagcttgtgagtttttaaataagtctttaaattaaatatacacactgtcagtttgtacttttgacaattccatggtctcccggttggtcttgcaccaggatgtctaacttggagggaacattacatggaaattacaagtaatcggacccgagtctgtaattaaggcgcctttgaggatgttctattccnggggccttttttccatgggggtttatatacncgggntttttnccatgggtcagccgtggtaggaaagtgttc

SEQ ID NO: 268293 - DNA, 589 bp, Homo Sapiens
  misc_feature (16)..(16): n is a, c, g, or t
  misc_feature (23)..(23): n is a, c, g, or t
  misc_feature (57)..(57): n is a, c, g, or t
  misc_feature (66)..(66): n is a, c, g, or t
aacttctacccaagtnccttggntctttgtacttctagcctccaggaactatagggnaaataaatnatgtggtttaagcccctccctagtgtgtggtattgtgttacggcagcctgagctgactaatacacatgtccatctgccctcctgcccccatgcccacactctgtgagcacctagtgaaatcagtggctctctgtgtctcccactacctagcacatatctgatgcttaaaggatcccacggatagttgcctggaatgaatggttagatggacagatggatgaagagatggatagatggagagacaagctcccctggattctactagattctagcccatggaattttaaaaggcctaacttattttgttaaaaaataccaatctagcaaaagcctactttctttgagacagtattcatgaccaggcttacctttttaaaattgttctttaagttatttaaacaaactatggtacacccataagataacagaaaaagagaaaacaacccaaatgttcaccaacttatgaatggataaataaaacatggcccatccataaaatggaattgtattcagcgataaaaaa

SEQ ID NO: 268294 - DNA, 935 bp, Homo Sapiens
  misc_feature (79)..(79): n is a, c, g, or t
  misc_feature (82)..(82): n is a, c, g, or t
tacctctcactgctaatcaggctgccctttgatgtcaagcgcaaggatttcaaggagcaggtgatacaccacttcgtgncgngtcatcctgatgaccttctcctacagtgccaacctgctgcgcattggctctctggtgctgctgttacatgattcctctgactacctgctggaggcctgtaagatggtcaactacatgcagtatcagcaagtgtgcgacgctctcttcctcatcttctcctttgtcttcttctacacccgactggtcctctttcccacccagatcctctacaccacatactacgagtccatcagcaacaggggccccttcttcggctactacttcttcaacgggcttctgatgttgctgcagctgctgcacgtgttctggtcttgcctcattctgcgcatgctctatagcttcatgaagaagggccagatgggagaaggacattcgtagtgatgtagaagaatcagactccagtgaggaggcggcggcggcccaggaacctctgcagctaaagaacggggacagctggagggcccaggccagcccccactgatggccctcggagccgggtggccgggcgtctgaccaacaggcacacaacagccacatagccgggcggggctggctgtaaagggttgcccccccgccagtgccttggatatttctggggtgactggactggcgcccctgggccacctttctggagacagggagggccccacccggggtgggtgggaaggctgatgatctgtctccagccccttccttctgcccacccacccttcttcctctgggcaactggacagatctgggagccagcagctggatgctgtggctggccagagacaccttcaggctgtggcctgggggctggggggagccccaggctgaaaagggtccaattaaaacaaatggagccaaatta

SEQ ID NO: 268295 - DNA, 380 bp, Homo Sapiens
ttccttttttcttttcctttaagtaagctctttattcatcttatggtggagcaattttaaaatttgaaatattttaaaatgtttttgaaccttttgtgtaaaatatatcagatctcaacattgttggtttcttttgtttttcattttgtacaactttcttgaatttagaaattacatctttgcagttctgttaggtgctctgtaattaacctgacttatatgtgaacaattttcatgagacagtcatttttaactaatgcagtgattctttctcactactatctgtattgtggaatgcacaaaattgtgtaggtgctgaatgctgtaaggagtttaggttgtatgaattctacaaccctataataaattttactctatac

SEQ ID NO: 268296 - DNA, 298 bp, Homo Sapiens
accagaagaaccggacatctaaagatctagggaaacacattccataagagggaggagtaagtgccaaggtcctgagtcaagctgagcttggcaagttcaaaaaccagaaataaagctggtgtggctggaatgcagaagggaaagagggaggcagcaggtctgatcccacagggcctggagggcatgacccaggaacttcagtgccatcccaactgcaatgggaaggtggaagcagggaggtggcaatgtcaagttcttgcctttaaaaagttcctcttagctgggcttggtggttcat

SEQ ID NO: 268297 - DNA, 445 bp, Homo Sapiens
  misc_feature (209)..(209): n is a, c, g, or t
attatagctgtgaaccaccatgcccggccaggaaaccttactgtagaacaattttttatatagctgtataaaatgtatatgattgtcctgacagtctcaaatactgtttttaatagcttgtaaatgtaatctcaagtgcttagaacagttccttacatataaggttgctctgtaggttgctcttatagttagccccaaagactctgggntgtgaggcctgctgtaaaccaatgttaaactgcttattagaaagccctaaccacctgctttgtaggcaccagaaactcaaaaccaaatctcaactcagctacagaatctactgtggtccttgtctgaaaaaattagttcactcggttggaatcttgtctcagagcatcctcatctctttctcaaaagcccctaaccccaacaccggcgtgttggttgtctattgaaacttaacaag

SEQ ID NO: 268298 - DNA, 523 bp, Homo Sapiens
atgagcaccatgcccggcctctttttttattcttgatattggttatttgtgctgtattatttcctcccccttgataatcttatcagagacttataaaacataatgggatctaaggtatatttgttttctatttcatcatatttgctcatctttaatattttctttctttaggttggttccttgagatgtatccctagctaattaatttgcagtttttcttttctaatataagcactaaaagctagcaacttctcctaggaagtctttaattgcatgtgacaaatttcaatgtatgtagtactttcatgaacatccagatcaaaatgtcttctagttttatgatttatagttgagtatttatttatttagaagtgtatttcttacctttcaagcatatagcccttgcctttaaaattttacaaacgtctgtatccctaaacaatactgtaacattgtgttatcacacatggcttttaaaatctccataaatgtatgtaggtatataggatttatccccgaggta

SEQ ID NO: 268299 - DNA, 392 bp, Homo Sapiens
  misc_feature (108)..(108): n is a, c, g, or t
ctggccctaaaagcccacaagatttggaaattaagtaaaactttaacttgaaactcacaggaaaatactatttactctgatatctttgccaatttaaaaaatacagantctagttgtctttgataattttacattgctgattccaatattatgcccttttaaaattaaacccccttctccaaaatttaagaattcctataccagtattagtaattatctgcattttgtaagatatattaacaatataaattatgctagataacagcctgttataaaagacatcaaaagctaaatgtaggctttctccattacgaaatctttataaagcttcatataagggattctgctttgggtcttaagaaactggtaactttttgagtctttaaaaaaaa

SEQ ID NO: 268300 - DNA, 581 bp, Homo Sapiens
  misc_feature (14)..(14): n is a, c, g, or t
tgaagtctgggatntatgacattcattgctggagatgatggactagtgtctcggcttaggttcaggacttgcccatgtaatggaaaaggcaaactttggaaaagagaaaccaagcacggtttcacgttatttatagaaaaaaactgtggatatgtgaatatacaaccacctttacaaaataatgtaagcactcaaattcaaatttaatctcagttcataacatcaggttagcgctataacgggaatctggacagcaacattattaatcactgtttgttacataaacttctattacatttaactattatgcctaaatctaatcaccaaggccaccgaataaaccagtactttagtaggaagaaaataaagtcactgtcacaaattagcccctaattgctggcccccaaaaacagttcaattgtggggggcaggggagttgaatctatatcaaaacttcatttacctgagacaggcccaaagcttttctgtgccagacacctcggccccaattccctggctccctgcagctgaacgtagactcctccccaggggttgggctcacttttggttttttttgggtc

SEQ ID NO: 268301 - DNA, 632 bp, Homo Sapiens
  misc_feature (14)..(14): n is a, c, g, or t
  misc_feature (24)..(24): n is a, c, g, or t
  misc_feature (42)..(42): n is a, c, g, or t
  misc_feature (57)..(57): n is a, c, g, or t
  misc_feature (63)..(63): n is a, c, g, or t
  misc_feature (106)..(106): n is a, c, g, or t
  misc_feature (507)..(518): n is a, c, g, or t
tccctaacatctgnctaagctacnttccctgccctgggaccnaccctggagatggcnttgttntcttccttaaatcacatcttgggaacttaggaaaacccacttncttcctcgatgtcagcctaatgtcaaactttaaatagccaaaaacctggaattgtgttacaacaaaagaaatccaattcccacacacttttatttttcctatacagcatatgcttactggttggattgctgaaacgctggtggtggacagaggtgcctatgcacggagggtgggccagacctctgcatccctttagggcccccaggtaggagacctctggctgggtggccggtggggatatgtctcatctctgctctactaaaatagaaccatattctgcaaaatacagcttagctcataatcctttaattctttccacagctttttactcaagccatcattctaataaaataattggtgattccgattacctaaacagtagactaccagtggctaattcnnnnnnnnnnnnacttttaaacttgtctctaacttagaaaattttttctaaatgtatcgattagtgtaaagaaaaagtatgagtagttaataaatctgacctattatacaagaaatgcaattttga

SEQ ID NO: 268302 - DNA, 432 bp, Homo Sapiens
  misc_feature (401)..(401): n is a, c, g, or t
  misc_feature (419)..(419): n is a, c, g, or t
aaaaaagctacagttcacaaaccatatagaaaactgggtacaaactggatgctctgagaaaaaatatattccctgccctcccagtggaatcctttcaaataccttactggaaatctcaggggtgtcctatttatatttaatctccttggactaagaaatggatgattggcctttatgatgaaagcaatttatttatcctattcctgtccaagtttacatttgtattgtgggacaccatccatgcaaacctatataatagctgatctcagttattcttcttccaggaaataggcaaagagggatttttcccttctcaaaagccaagtttggtaaacggctgaggaaagggtttaccctttttattaaggtggtcatccctcaaaatggttggtaaaactggnaaatggaccttcattggnccggggggctttg

SEQ ID NO: 268303 - DNA, 394 bp, Homo Sapiens
  misc_feature (21)..(21): n is a, c, g, or t
  misc_feature (28)..(28): n is a, c, g, or t
  misc_feature (36)..(36): n is a, c, g, or t
  misc_feature (56)..(56): n is a, c, g, or t
cccaggggccccttaaaatanaggtttnaataattnaaattggaggggtaccacanccccaccccggggaagaaattgccggcccgcctttaagattttaaaatgtttttgtgtaaaaaacctttttattttgtaattaatatttattttaaaaacttgaaaatacagacaagtaaataaatataagacaaaaatcattcataatccttattccaggttcatcccaggtctttttctgtgtatttttgcttatagtatatgcttacaaaaaagttgaatcgttttcgcttatattttttctttgcttttggaacttacacagcatcttttgcgagtcaataaattgtgtttctgctgtatttttaatagatacttagtctgtaataaataaaat

SEQ ID NO: 268304 - DNA, 475 bp, Homo Sapiens
  misc_feature (49)..(49): n is a, c, g, or t
  misc_feature (67)..(67): n is a, c, g, or t
  misc_feature (461)..(461): n is a, c, g, or t
ccaggccctaaccataatgaacctttggcccttaacccacaaccagaancccccttccatgtgaaanacagtggatcaaaacaatggccagcaagagactctgactgagaaggaggagaggtcaagctggtgggcaccgtgagttatttcatccatgtctggactagtgacagaatctttacccccaaaatcaagagctgcactcagaatctccaggtccttcaatcttattgggaatatcctcagaggttgcacttatgccggacacaacactgaggcctggtgtgctggggcgggaactgacctccctgacatccgtatcatcagatgtgctacccagtccagaacagctctccagttcttgcagacgctcctcctgctttaggtctggggcctctgagtcacttggcaatacctctacactccaagcttcacttgttgtctctgatatggtagaaccnagtgcaggggtcaa

SEQ ID NO: 268305 - DNA, 522 bp, Homo Sapiens
tatgatgaccccaccactcattggctaaaggatttggggtctctccttcctataggggtcacctctagcacagaggcctgagtcatgggaaagagtcacactcctgacccttagtactctgcccccacctctctttactgtgggaaaaccatctcagtaagacctaagtgtccaggagacagaaggagaagaggaagtggatctggaattgggaggagcctccacccacccctgactcctccttatgaagccagctgctgaaattagctactcaccaagagtgaggggcagagacttccagtcactgagtctcccaggcccccttgatctgtaccccacccctatctaacaccacccttggctcccactccagctccctgtattgatataacctgtcaggctggcttggttaggttttactggggcagaggatagggaatctcttattaaaactaacatgaaatatgtgttgttttcatttgcaaatttaaataaagatacataatgtttgtatgagataag

SEQ ID NO: 268306 - DNA, 432 bp, Homo Sapiens
cctaaagaatattttcactgtcccttcctttccttaaagcccttatgtttcaaccctttaaccccaaatgtattcctttgttagaaattacccctagattccttatttaatgtctgcaagtagactgaatgtttgtgtgcacccagaattctaatgttgaaatctcatttccaatgtgatggtatttggaggtggggcttttggtaagtgataggtcaggagagtaacagcgctcatgaatgggattagtgcccttatataaagagacccagagagctccatcaccccttctgccatgtgaaagggagaagacaaacatccacgaaccaggaagtgggtcctcaccagaaaacaaatctgtaagcaccttgatcttggacttcccagcctccagaattgtgagaaataaatttctgttgttgataaaaaaaa

SEQ ID NO: 268307 - DNA, 393 bp, Homo Sapiens
ttgccgcttatggattttcttctttgtagaaatgtctattcaagtccttagcccattttttaatcaagtttttttggttgttgttgagttgtaagagttctttattgtatatattctagatattaatcccttatgagatatatgattcggaaatattttctcccattccatgttgacttttcaatctgatgatgagtcttttgatatacaacagtcattaactttgataaagtctagtttatctatttttcttctgttgcctatacttttggtatcataatttagtaaataaattctaaaactaaggaatatttaattacaataaaacctttttattcatatacctataaatacatgcccatttcatctataaaattcatatattaactaatg

SEQ ID NO: 268308 - DNA, 457 bp, Homo Sapiens
  misc_feature (113)..(121): n is a, c, g, or t
  misc_feature (357)..(357): n is a, c, g, or t
  misc_feature (386)..(386): n is a, c, g, or t
  misc_feature (431)..(431): n is a, c, g, or t
  misc_feature (443)..(443): n is a, c, g, or t
ttgataattattcctgattattcacggaagagttttaaagaaatatatatatgcttcccagttaaaccaccttagagtctatttgaggagatcagctcctttgtgagagttgnnnnnnnnnattgagccccactgtaatgtctatatttgaattgcctaagaaactcattatagcagagcttattccttgtcaaagatggtcaaaagaaaattagattcagttcattagcttctacctaaaccttgcttaatgggggcccatgttgtgggttttgttattgggatcacaaacatttaacttgatccttcctattcctgggcactgggcccatattgtcatgggcagctgtgccccgnaggggccctctgtgggcgtgggcctcctncatctcacttctcaaaatgggctgaggccgtggggttccgagggnttcatttacatnggggcccaacccgt

SEQ ID NO: 268309 - DNA, 436 bp, Homo Sapiens
agtgctattttcctatggacttttgcattatttcattgtgcatgcatccagtgattatacataagcaacatatgtaatctgcttatatatttttaaaaatccatccacacacatggtaaattaagtataaattcttttgcaaaattatagttcatgtcattgaaagtttaaattggtttcatttaaagatcaatatactaggtctgccttcactttatagaaaactagcttctataaagattttttcactgtttactagtgaaatgagaaaagcaaagctatttataaaaggccttatgtcgtgtacatacattgtctttgaaatatttgtgatctagtttattgcttgtaaaagagaaattatataatttatttagtaaatactactgtaaactatagttttgtgagagaaataaaatattttgttctcaaaaac

SEQ ID NO: 268310 - DNA, 387 bp, Homo Sapiens
tttgcctgcactttttacctttttgcctgtggagcctgtaatccccgagacccaacgaaacgttgggatacctccattaaatgtagccgacctgtcaacagcgtgccaggttttcctgtttcctgtgttgtggggtcaaccgtacaatggtgtgggagtgacgatgatgtgaatatttagaatgtaccatattttttgtaaattatttatgtttttctaaacaaatttatcgtataggttgatgaaacgtcatgtgttttgccaaagactgtaaatatttatttatgtgttcacatggtcaaaatttcaccactgaaaccctgcacttagctagaacctcatctttaaagattaacaacaggaaataaattgtaaaaaaggttttct

SEQ ID NO: 268311 - DNA, 491 bp, Homo Sapiens
  misc_feature (18)..(18): n is a, c, g, or t
  misc_feature (33)..(33): n is a, c, g, or t
  misc_feature (51)..(51): n is a, c, g, or t
  misc_feature (57)..(57): n is a, c, g, or t
aaagcaataaaacccaantagttctctaagcanattgctaaaagagatganccacanttataagtatctttggctgtaaggcattttcatctcttcctcgggttggcaaaatattttaaaggtaaaacatgctggtgaaccagggggtgttgatggtgataagggaggaatatagaatgaaagactgaatcttcctttgttgcacaaatagagtttggaaaaagcctgtgaaaggtgtcttctttgacttaatgtctttaaaagtatccagagatactacaatattaacataagaaaagattatatattatttctgaatcgagatgtccatagtcaaatttgtaaatcttattcttttgtaatatttatttatatttatttatgacagtgaacattctgattttacatgtaaaacaagaaaagttgaagaagatatgtgaagaaaaatgtatttttcctaaatagaaataaatgatcccattttttggtaa

SEQ ID NO: 268312 - DNA, 372 bp, Homo Sapiens
  misc_feature (112)..(112): n is a, c, g, or t
  misc_feature (249)..(249): n is a, c, g, or t
aatgtatatccacattgaaaagaaataaaaaccaagcgccatacatgtcaattaaaggcataaacaattaagagatagtccatttcccccttgaatctttcatgcttatttncccttcttagaataacacttaaaagccatcgaagcttcaacgggaccagtgtctccccgtttcgtggggtgtagagcaaggtgtgggaggagcgtttgggcatgtcaagtctctgctctacagtgggatctccacgntcccggcttccagtgggacagccctgtgaggatgggggaaaatttccttccgctcagatactgtcaagggccaatgtgcctttcagggagattgtctgagagatttcgaacattggaaactgt

SEQ ID NO: 268313 - DNA, 800 bp, Homo Sapiens
ggttttaaacccttttaccttttcagtctggcagctcctactgctgctttcctaagttactcaaagcactgcttcttggtccttgttttcttttgccttgtactatcttgtataatgtttactaaaagagcctccccataaatcagagaggcaaaaaggtagcatataaaaagaagaaccaaaagaagagaaaacctgacttctagatgactgtggtgtcatctaaaaggcagaggtgcctgaccctcaggaatgtgtatgatgcaacagagctgaagaatgggttcccttcacctactgctggccattgtcccttctgttggagattcctttctttatggttgctgttcataaccccttcaacacccccccttgctggtcctgccggtcacagttgaggattttggctgtgatgggctcatactcataatggcctgttgagttgtttttagtgacaggttttgtttgctgcaacacctcattggcttgcttaccaacaccagctagaagtggtccctctttcatatccaaaccagaacacatttgggtattcctgagactttatagagcgtgtattgtttgttatacgaacctaacctaccttgttgttttctcatattaagaaatttaaatctactttgttttagtgaagctattttggtaatgtataagcaattttggttctgtttagggagaattcagggtttccatgacttgatttgagctttgcatatttcaaataagtaacacagccattttaatttagctaaataaaaaaatttcttttttctctcaaaaaa

SEQ ID NO: 268314 - DNA, 428 bp, Homo Sapiens
  misc_feature (59)..(59): n is a, c, g, or t
  misc_feature (93)..(93): n is a, c, g, or t
ttggcctgttatttaggccccttcccaaatttccccccttattaaccctccttcctccncagcctccaagttccaccatcctagttccatttnattcccctttccttccttagcattaaacctaagaaggccaggatgagtttaagcaggaggcgacatcactaacaggtgtcctaaggagagaaggggcaagtagagcagggggcaggtgggagccatggccagttaaaatgagcaaagtctgaatggaggcagcagccatcgggttgaaatagagggtcacggtctaaaggatacagcaagtaaaaaggagagggccttgaggaagaattaggcacagaaagagggaaaagacacaggtttccagtttgtgcaatgagggaagaagtggtgccatcaacggaaacaaggagtttaagaggaagaga

SEQ ID NO: 268315 - DNA, 606 bp, Homo Sapiens
tgaggtcctgtcctaaattctaggaaaactgactcagactatttagaaatgactagagttactagaaattactgtctcagggtaaattaactgtagaggcataaaaccttttcagacattagtaccccagtttgaaactatatttcattttaagaaaatggcaaaaatttagatttataaattgggtgtcactgttcactttataaagatggtttgctataggactcccttagactagcaggctgctttcatgcatgacgatattatccaacttggggatgcattaatctattgtgcgaggcaaggcacacctcaactaggcagtttaactgcaccagcaactgtccctaagaaagcctcctgttacacacttgagaaagttcacatcctctggctcattaaaaacagtgtcaatagagaatagaagaatggctatcacagactgtgaagggtagtggggggttggaggggagatggggatagttaatgagtacaaaaaaaatagaatgaatgaataagacctactatttgaaagcacaacagggtgactatagtcaataataaccgtaattgtacattttaaaataaagagtgtcaatggattgt

SEQ ID NO: 268316 - DNA, 258 bp, Homo Sapiens
acaagtcaggtgccataaacattcaaataatccatcttttaaaaagtacgtttacaacatcaaaagaattaagatgaaatataaacctttctacttacaatttttatacagattaaccaaatcacaaataccacaaataaatgttaatgttaaattgtaacaatataatgaataaacattcagattcttaataaaatcttcctttaacattttttaacttaccattatactaaataatctatgcaggattttgggggg

SEQ ID NO: 268317 - DNA, 255 bp, Homo Sapiens
  misc_feature (96)..(96): n is a, c, g, or t
atgggctcagaaaatctcaagtaagtaccaacagaagggccgcttggcctctgtgaggtgcaggcaggcacggcgtcctcacctgtcctgactccnaagaccctctgtaacagtgtctcacccctgctggcagatctccctcgtcccaggaggacacatgcccacgccctcactgtacacctctgggtccacccttgattgttttgttcctgtcaattactgtaataagtaggaagggaaagcaccattttcttt

SEQ ID NO: 268318 - DNA, 754 bp, Homo Sapiens
  misc_feature (346)..(355): n is a, c, g, or t
aagtaacttttttctccatgctaaactttccacgtcttctatctaaaaggtccccaaaggcaccactatttggtgtgaagattttgagcagcacttagattgctgattttctgggaggttgcatgcctgtaagttgctgctgactctccttttaacccactgaactcccccaagagcctccacgccaaagtttcaccgttttctaaaaacatcttaagtccctgtagaattacgggtgtggaactggtgggttgcaaattcctataagtactggaggtttgaataagttgctaagaaacaagacaacaaggagaaagaaaacacagaaggttacacctgcaagagnnnnnnnnnntattagaaaccaagtacctggaataaagattccatttttggagcagctattctgcagatacttagcacagctctttcaaagcaagcacagcttcactttcccccaagcccagtgttgcacacagatacatcacttcatccctttggtttgaggtagcttcttagggcaaagcgttttctcacatgagaaagtccttgctctgagacatacgtacaacatgtctttcttgtatcatgctgctacacgggcagatcgaatcttgctgagaatgagcaggtaatcgatcatcttagcatcatgtccaactattcagagctaggcctgaacagcaagctaagaggcctcatcatcggatgatcggatgcatcgctccttaggcgaatggccccccaaagcact

SEQ ID NO: 268319 - DNA, 395 bp, Homo Sapiens
  misc_feature (182)..(195): n is a, c, g, or t
  misc_feature (370)..(370): n is a, c, g, or t
  misc_feature (378)..(378): n is a, c, g, or t
taagcttcaaatctgatttggtatcaccgaggaaaccttgcccccatcactcagcattgcacttagatacagaatgagttagataaacttggcttgtctagagacccatgtcatcttaacctaaagggaaatcttattgcgttatcataaaattgatgatatcttagggtcagaattgcccnnnnnnnnnnnnnngaatggggaagttctcactaaaacaatcctgaggatttcttaatttcatgggttctttaaatattataaacacagaggtcaacataggaatggaaattgtatttggttaaaatacacacatggggggggcaagaggcagatgactacttttcggaggtaatgcttgctccctccnaaaaggcnggttttccatccggggg

SEQ ID NO: 268320 - DNA, 462 bp, Homo Sapiens
  misc_feature (272)..(272): n is a, c, g, or t
  misc_feature (307)..(307): n is a, c, g, or t
  misc_feature (373)..(373): n is a, c, g, or t
  misc_feature (383)..(383): n is a, c, g, or t
  misc_feature (389)..(389): n is a, c, g, or t
  misc_feature (438)..(438): n is a, c, g, or t
agtggaaacacggtattcatttctgaggactgtgctaggttttaaggcaattgtcacatgtacaaaacagtcagatgagcagtatctgaacagatttaccacaacatgttagaaagagaacagcaggggaaatgttttcagacaaggagatgtgagattttccccagtcacgtaacccctggggctaccgactctgtggactgaaaaccagggaagatagacagcacattctctcttctcgcctccaagggggaagggccacctgcacactntcgggaaggcacccttctccaggacccagacacgnttcttactgcagggccacgcaggggacacaggatgggtcggccaatgagtcttaagtccagctctnattttcacgntttatnggctttgttgaaatttcatctttaggaattggggaattcaaggttaccncaggcatacaccttgtaggttaat

SEQ ID NO: 268321 - DNA, 1079 bp, Homo Sapiens
catggctgccatcaagccttttctggatccagccatcaaggacatgtttgtggtgtgatgcacacttttgcaagcgtgtaagatgttacctggtttgtctcttttggaaaacaaaaatcagaaggctgcattctagagggcagagaaattcccccgaagactgagctggttgcctgcatcctctatcttctttgacccttatgactgaaagatcatcagtttggaaggtactggtccaatttatttaggaagtatctcttggagtttcagaaatgctagcttggacaactgaaaagtcacatcacagctggcattctgggggctaccaaaacaccccttctggagtagaagctgctggaaggcaggcctgagccattcaccacggacaggaagagcagctctggctatcaccactggcctctggggtcttcatatcttgccatctcatccagggttccatgaaagttacccagggtcctcatgtccttccttagagcctgagtggtgtgaggtgacaggtctctctctccactgcccctttctggtttaaaaaaatgggtgcttgatgagggaaggtagactcttccctaggactgacgagtttacggctgccagatgcctgcatgggaagaggtggacatctgcatcttccattggtggtcaaggatgggtgtgggagaaccacacttagtgcaagcctggtactccagtaaatatttgttgaaatgaatgataagagcattggtccccaagccagagagccagaagccatcacccaatgaccgcccccttccttccggtcttacaagagctcttcaaggctgggtctgccacccactctgctttgcccaagtgtgacagcactggggaggagagacaggattaaagggcagatgtcagcaatactaagggcttcctcatgggagggcatgaggctccactcattgtcttgtgacttccatccctgctgaatggggctgcaaggccaaggctccttaggggagaggtccttacctctgatccacttagagcaataaccactttttaaatgtaaaataaaaagacaaatggaaattgtt

SEQ ID NO: 268322 - DNA, 668 bp, Homo Sapiens
  misc_feature (139)..(240): n is a, c, g, or t
  misc_feature (336)..(336): n is a, c, g, or t
  misc_feature (511)..(554): n is a, c, g, or t
ctctgttgcccaggatggagtgcaattgttgcaatcacagctcactgcagcctacacctctgggactcaagcaatccttctacatcagcctccctagtagctagggccacaggcttgccccactgcatcctgctaacannnnnnnnnnnnnnnnnnnnnnnnnnnnnnnnnnnnnnnnnnnnnnnnnnnnnnnnnnnnnnnnnnnnnnnnnnnnnnnnnnnnnnnnnnnnnnnnnnnnnnttcagcactgtgcctgggctcttcattaatttctatgactatataatggaccagagttcatttaattaggtccctactgataggatttttgagggnactgcccatttaaacaatgctacaatgaataaggctgtacattcacaattccattaagtaaaattcctaagtcaaagggcatgtgcatttataattttgatacttacaaattgttgctgcaaagatcgcactactttaccttctcactagcaatgcacaaaaattaacaatgcannnnnnnnnnnnnnnnnnnnnnnnnnnnnnnnnnnnnnnnnnnngccttttgcctgtgacaagttgcatatattcttttctcaggttgtcttttgtttgtagtggttggtaccaggtaaaatttgttaaacatttttacacagttgactttattcatc

SEQ ID NO: 268323 - DNA, 693 bp, Homo Sapiens
  misc_feature (130)..(173): n is a, c, g, or t
  misc_feature (432)..(432): n is a, c, g, or t
  misc_feature (440)..(541): n is a, c, g, or t
agccattaatgaaaagatgaataaagtcaactgtgtaaaaatgtttaacaaattttacctggtaccaaccactacaaacaaaagacaacctgagaaaagaatatatgcaacttgtcacaggcaaaaggcnnnnnnnnnnnnnnnnnnnnnnnnnnnnnnnnnnnnnnnnnnnntgcattgttaatttttgtgcattgctagtgagaaggtaaagtagtgcgatctttgcagcaacaatttgtaagtatcaaaattataaatgcacatgccctttgacttaggaattttacttatagaattgtgaatgtacagcttattccattgtagccattgtttaaatggcagtacctcaaaaatctatcagtagggactaattaaatgaactctggtccattatatagtcatagaaattaatgaagagccaggcacagntgctgaannnnnnnnnnnnnnnnnnnnnnnnnnnnnnnnnnnnnnnnnnnnnnnnnnnnnnnnnnnnnnnnnnnnnnnnnnnnnnnnnnnnnnnnnnnnnnnnnnnnnntgttagcaggatgcagtggggcgaacctgtggccctagctactagggaggctgatgtagaaggattgcttgagtcccagaggtgtaggctgcagtgagctgtgattgcaacaattgcactccatcctgggcaacagagtgagatcctgtctc

SEQ ID NO: 268324 - DNA, 166 bp, Homo Sapiens
ctaagagaagagatttcaagtgctctcaccacatacacaaaaatagcggtaactgtatgaggagatggatatattaatttgtttaactggaataatcatttcactatgtatatgtatatcaaaacgtcatgttgtaaatatgatgtttattaaaaatagtttttat

SEQ ID NO: 268325 - DNA, 467 bp, Homo Sapiens
  misc_feature (18)..(18): n is a, c, g, or t
  misc_feature (52)..(52): n is a, c, g, or t
attccttaaattccaggntcctttaaatattataaacacagagtccaacatngaaggaaatgtaattggtaaaaatacacacatggaggaacaagagccagaggactacttttcgaagtaatgctgctcccttccctaaaagtctgttttcaaccctggtaatattaggggcactgcggcacctaagaagccttaaatgagagctaatccaatctagagagcgatggtgtcagcatttcggtctgcatatctgtgtgtccgtatctgcgtttgtgtgcgtgtacgtgtgcccctgtgtgtgggcccagttttcaggcatgtagaataagcatggagtcatattgaggaggactcacttcttgaagatatgcttgttgctttacaacatatgtaagctattctttagcataaatgcattcattctttaataaaaatatgtttgcattaataaagctgaggagtttcat

SEQ ID NO: 268326 - DNA, 712 bp, Homo Sapiens
cattcaaatttgacctagatgatgacaaccccgaggagatagcaacaattatggtgaacaatgactttattctagcaatagagagagagtcgtttgtggatcaagtgcgagaaattattgaaaaagctgatgaaatgctcagtgaggatgtcagtgtggaaccagagggtgatcagggattggagagtctacaaggaaaggatgactatggcttttcaggttctcagaaattggaaggagagttcaaacaaccaattcctgcgtcttccatgccacagcaaataggcattcctaccagttctttaactcaagttgttcattctgcgggaaggcggtttatagtgagtcctgtgccagaaagccgattacgagaatcaaaagttttccccagtgaaataacagatacagttgctgcctctacagctcagagccctggaatgaacttgtctcactctgcatcatcccttagtctacaacaggccttttctgaacttagacgtgcccaaatgacagaaggacccaacacagcacctccaaactttagtcatacaggaccaacatttccagtagtacctcctttcttaagtagcattgctggagtcccaaccacagcagcagccacagcaccagtccctgcaacaagcagccctcctaatgacatttccacatcagtaattcagtctgaggttacagtgcccaccagccttgtcct

SEQ ID NO: 268327 - DNA, 438 bp, Homo Sapiens
  misc_feature (353)..(353): n is a, c, g, or t
  misc_feature (409)..(409): n is a, c, g, or t
  misc_feature (414)..(414): n is a, c, g, or t
tcttccttaggaaccaaagcagttgctttcctggaactgcatttttcagaactgctcaaagcacctcatctagatgagtgttttaaaaaatatatataaaaagtctataaagagacttcaaacatcacatatttcacctcttacaggcttttttaaaatcatgtatcccttccttaaagtccttcagaataaaataaaaataaactctcacattccattagaaaaaaatggaaacattcattcatggtctgaaaatgttatggatttccccaaattttgctactgtgtgcaatttcctcacacacaggttttgaggaaaccccttaatcatctatcatgaaatagctaatggncatgccataggaaaatctaccttaatagtagtaaataggtttaaaatctattcccntaaantaaaatgtcccatggcttcaattt

SEQ ID NO: 268328 - DNA, 449 bp, Homo Sapiens
tgtgagaaggagaatggcaggttcaaaggcacaaattgaaattaaaatattgtagttaggcgagcacaggacttttgattacaccgagcggactcaagtctttgtatcccaaagtattcctatttgtaaatcatatttaatttctagaaatctgaaatattgaaatagcttctaaagaggtccataggaaatgtatgtcagggtagaataaaaattacacattctttcttattcagcattgtttaaatcatcatgattgaaacttctgtaacttcagtacaccatgcagccttctatgtggtatggatttctaacattggagttctctgcccaaaattttctgagggactttccctccctacctcaatctgaaagtctgtgggatgggggagccaaggctctgaacagctctttcatccatcttatgtgcaaggataaaaatctctagg

SEQ ID NO: 268329 - DNA, 502 bp, Homo Sapiens
  misc_feature (300)..(300): n is a, c, g, or t
  misc_feature (402)..(402): n is a, c, g, or t
  misc_feature (413)..(413): n is a, c, g, or t
  misc_feature (435)..(435): n is a, c, g, or t
aagcaatttatttacttatttaaaggctctgtcaggtattgcctaaggtaaaagtctgtattgtaagacagaaaacctctgcccaggacttcagtagctcagagagggaaaggcttgatatgtgtctgaaaagacaagttttagacagcaagaaaaaagagatccttcccatttcaactccttaccctcctctacccccaatgaaaacagaccttccttcggccttatccacaaggctcctccaccaaggccaaggccaggactcctggcaatcataggatgggaacaccaccttctaangcacagaacttcaggctttgcttcggaagtgggaaccatgggtctcttcattttccctttccttcaaggtcagaaaacctggaagcggttaggagtttttangtgttaagttnccttccggggatggttaattanggcttcaaacggttttggttcccggggaatttaaaacctaaactccagtcattcaagcttaaaagtt

SEQ ID NO: 268330 - DNA, 414 bp, Homo Sapiens
  misc_feature (176)..(239): n is a, c, g, or t
  misc_feature (287)..(324): n is a, c, g, or t
  misc_feature (343)..(343): n is a, c, g, or t
  misc_feature (363)..(363): n is a, c, g, or t
  misc_feature (384)..(384): n is a, c, g, or t
tattagcaaacatagaacccaggaaataaaaatgaattataatacataaaatgtaaaatttatgaagaaacctatgatctggtcttgggtttattcacacatatatgcaatataaattagtctactagtttaactgcatatgaaaagagagtataaagaaattaaaagactgaatnnnnnnnnnnnnnnnnnnnnnnnnnnnnnnnnnnnnnnnnnnnnnnnnnnnnnnnnnnnnnnnngagttttaggaccagcctgaggcaatataggtgaggaacttgtctctnnnnnnnnnnnnnnnnnnnnnnnnnnnnnnnnnnnnnnttaggctaggtcattgggnggggtgagcatgtgggtccngtactacttcgtggaggctgngggtgagggggtttctttgaggcccggggg

SEQ ID NO: 268331 - DNA, 239 bp, Homo Sapiens
cagttactcagagaagttgttaaaatctctaactatgtaaatggaatgttatccctgtttttagttctgtcaagttctcctttacatattttgaacctgtattattaggtacatgttaattttttaatgtatacgattgttagccctcttaataaggtataatatctcttgtaatatttcttgtcttagagtctactttgttttatattaataaagcacaactgttttcttttattttt

SEQ ID NO: 268332 - DNA, 935 bp, Homo Sapiens
  misc_feature (661)..(661): n is a, c, g, or t
  misc_feature (667)..(667): n is a, c, g, or t
  misc_feature (772)..(772): n is a, c, g, or t
  misc_feature (783)..(783): n is a, c, g, or t
  misc_feature (792)..(792): n is a, c, g, or t
  misc_feature (816)..(816): n is a, c, g, or t
  misc_feature (828)..(828): n is a, c, g, or t
  misc_feature (841)..(841): n is a, c, g, or t
gggcggttcccagcatggccccttcacaggcatcgcatgcggaaagtccatgatgagctccgtgacctgatggggggccggggcggggtgccctctacgaccggaaccacgtcacaggggcctcgtccagcagctcgtccagcacgaaggccacgctgtacccgccgatcctgaacccgccgccctccccggccacggacccctccctgtacaacatggacatgttctactcttcaaacattccggccactgcgagaccgtacaggccctacatcattcgaggaatggcgcccccgacgacgccctgcagcaccgacgtgtgtgacagcgactacagcgccagccgctggaaggccagcaagtactacctggatttgaactcggactcagacccctatccacccccacccacgccccacagccagtactgtcggcggaggacagctgcccgccctcgcccgccaccgagaggagctacttccatctcttcccgccccctccgtccccctgcacggactcatcctgacctcggccgggcaactctggcttctctgtgcccctgtaaatagttttaaatatgaacgaagagaaaatatattttatgatttaaaagataatataattgggattttagaaacacaagaagcaggatctttattangggcgnaggctatccgttagtgaggttagttagcttgactgcgtcgtgtgaggcgtgactgaaccttgggtagagtaactcgttggaatccgttcgagtcgtataggaagngacgatcttcnacgtcgctnatcgatgagccgtacggtacgggnttgtggtcgaangaattacgtagcntggtccttgagtgccgacataggttgattcttcgcgagtaggttgcttagttcttggttcgtgccaaggttgtgttaaaaatatgcgtcgcctg

SEQ ID NO: 268333 - DNA, 273 bp, Homo Sapiens
  misc_feature (76)..(89): n is a, c, g, or t
  misc_feature (213)..(213): n is a, c, g, or t
  misc_feature (221)..(221): n is a, c, g, or t
tgggctcaagcgatcctcccacctcagcacccccagtagctctgactacatgtgcatgccaccatgcccagctaannnnnnnnnnnnnngtagagacagggtcttgctatgctactcaggccggccttaaactcctgggctcaagcgatcagcttgcctcgacctcccaagatcctaggattataggtgtgagcgagccaccaatgcctggcncttaaaantttttttaacaactaccctggaaagcactcaggacttaaaaagtattttgac

SEQ ID NO: 268334 - DNA, 428 bp, Homo Sapiens
ccaatattccaaaggctctaaataaatacatatataacaaaagtgaaaaaaagtaactaatagtgagatgaggttcttcccaaaaaaattctgtcttgtccaagcattcctaggagtctgagccaaagaaacagcgcccattttgttcattcctccccctgcccacggacacttcctttgagccacctctatacccagctaactctggtattccctctagggaaggttctgtatcagccctgggactcgccagtgcctcagtaaacagacggactatgttaaaaagttaagttgtacaacgtgctgatggctggaaagatgtagtacctttgttattcctgataaggaacaatgccgtgctgactggctaaggggaggtttgccagccctgcagccattgactgccacatcagcaggattggaaagat

SEQ ID NO: 268335 - DNA, 503 bp, Homo Sapiens
  misc_feature (358)..(358): n is a, c, g, or t
  misc_feature (391)..(391): n is a, c, g, or t
gaggagaatatatcctctaaatctgattctgaacaacccagtcctgccagctccagctccagctccagcttcacaccatcccagaccaggcaacaaggtcctttgaggtctataatgaaagatctgcattctgatgacaatgaggaggaatcagatgaagtggaggataacgacaatgactctgaaatggagaggcctgtaaatagaggaggcagccgaagtcgcagagttagcttaagtgatggcagcgatagtgaaagcagttctgcttcttcacccctacatcacgaacctccaccacccttactaaaaaccaacaacaaccaggattcttggaagtggaaaagtccaataaagncaaagcaaattcagattaaggcaaattaaagantggtgaatgttgacaaggccttacctagatggaactggtaggagctttcacaggaaggtttattgactttgaggaggaaagacacttctgcagccgatcgtgaaccttattt

SEQ ID NO: 268336 - DNA, 516 bp, Homo Sapiens
  misc_feature (16)..(16): n is a, c, g, or t
  misc_feature (24)..(24): n is a, c, g, or t
  misc_feature (39)..(39): n is a, c, g, or t
agtataacagagggtnccacaggncatgcatttcaaaangaacaccttgggtaccactgaaaacagccataacattggtcctactcaaccaaacacaatattgggtgctgctgtcccaaagtcggtgtgtgcccctaagaagaacctgcgcttccttccgccagggggctgtggctgctgcagagtttcaattcctgcatactgcacctgtgaaaacaaatagccgtgatgctggcggttaggtaaccctagctcgccacagtgtgtgctaatggctccccaaggacaaccgaaggcaaaggaaggaaggttcaaaggtaatgaatcattttctaaacacaggaacatggagggattaattgcaggaaggatttgagaagtcatgcatcatttcttgaaaccaaaatattaaaagcagatttttctaatgagatgcgtgggtttctaccttcgctgggcactgctagatgatgttcgttttgtgtgtgccagttttcaaccataagtaagcttaaa

SEQ ID NO: 268337 - DNA, 389 bp, Homo Sapiens
atacatacatacataaaaactgcacaaagtatgtgtcaacaaaatacagtctttaaaacttaaatatcatttaaacagacttaattgcatacattttatatacgcacaaagtcaggatttttacatggcagggaaatactgtggaatgatgaggtctgcaggagacagatgctatcaaatgaggactctggggtggtattttctagaaatggggttctgaaataaatttttattgtatgtagcttattttacttctaagaggaaccaaaagatacatttgggcagccaaagtatttctacttcctgcttaaaacattcaggcaaatgaaatgattataataattaggggaagcagccttattagtctctcgggtcttcagtttcttatc

SEQ ID NO: 268338 - DNA, 524 bp, Homo Sapiens
  misc_feature (20)..(20): n is a, c, g, or t
  misc_feature (168)..(168): n is a, c, g, or t
cctcaactccttcaacctangtcctgaagcctgcctcctcaatgcactcccatgctatctcccccaggcccctgtaacagaaagaccaccttccaggttcaccccacaaactcaatccctcttgattcagaggtccctaagggttttccttgaacagactaaaggttnaaaggtacaggaaaaggagagaggtcagttccttcagttaatgccctatggccttcccaatgggggagaaattgaggaatcactaaggtgttggaaagggcaagaaggtaatctcagagacgatacacatggagaaacaggtattcaatgcaggtgtggattctgttctcttcaactggtggctttgctcagcagagtccatttccagtgggaccatgggcaggagcttttcttggtatcttaagggtggccccaatttcctcagagacaatgtccatgccctcaggatggcttggtccacaaaatggagaaatggggccatggaagagtagatgtgaagtggcaggatccagagg

SEQ ID NO: 268339 - DNA, 290 bp, Homo Sapiens
  misc_feature (192)..(192): n is a, c, g, or t
  misc_feature (219)..(219): n is a, c, g, or t
  misc_feature (229)..(229): n is a, c, g, or t
  misc_feature (244)..(244): n is a, c, g, or t
gttcaagcaattctccaatgtcaaggaaatcttagaaagtttcaaggtaaatttggtctttcacaagcttgatgaacaaagagaagcaaccctcgagtaacacttgcgctatacttgaggaaatggcactcagttcttcaataaaacaactcatcattccgttgtaaataaccattaaaaagagaaatattngatttctatggcaaaaaaggtttagtngggaaaaatnttctttcatagtgtngcataagtatgtttcttgcaatgtctgaaagtcttcatgtgtacat

SEQ ID NO: 268340 - DNA, 298 bp, Homo Sapiens
tttgtagagacagggtttcactctgttagccagcatggtcttgatctcctgaccttgtgatccgcccacctctgcctcccaaagtactaggattacaggtgggagccactgcacccagctgcagatattttattgaatcttatttttggcaggttgataacagggattttttgctgaataagataggtttggccctgatgagagttacacaaaaaagtaaaaataaagtatctttactgtgtatgtctcatgagactttcagtcattgcagaacatacttatgaacactttgaagata

SEQ ID NO: 268341 - DNA, 358 bp, Homo Sapiens
  misc_feature (228)..(228): n is a, c, g, or t
  misc_feature (339)..(339): n is a, c, g, or t
taggttaagaaaactgcaggagttgtcatgaaattctattggaaagaatataaaaattatcttggttttaaattgataccaaagtctgtctagaaacaacccaaccactgcaaatttggtttttgcaagttaatttaattcaaaaaaatacttgtactcccgtgttttaaatggtcttaattattcatcaccataaaaagtagtttaggagaaaataaaatatttgancaacagtctaaaatttaatagcactgtttaggaataggtctgtttgtgggcagacagaatccaaaatgggctaatttcctaatcccgatgctctgtgtattaccgggaganataatggaaattcctttaa

SEQ ID NO: 268342 - DNA, 219 bp, Homo Sapiens
tcaatcctaaattttatgaaatttatattcaagaatttctttgcatagattgtcataaaatgttttccattagaatgatattttacttgtagtaagataataaagagttctctgagctattcagatgtttactttggaataaaatactgttaaatctagattaccagcagttacctttttagtttgtagaaaattggaatacaggtctaaactttacaa

SEQ ID NO: 268343 - DNA, 499 bp, Homo Sapiens
  misc_feature (15)..(15): n is a, c, g, or t
  misc_feature (26)..(26): n is a, c, g, or t
  misc_feature (53)..(53): n is a, c, g, or t
  misc_feature (59)..(59): n is a, c, g, or t
  misc_feature (96)..(96): n is a, c, g, or t
  misc_feature (141)..(141): n is a, c, g, or t
  misc_feature (194)..(194): n is a, c, g, or t
  misc_feature (417)..(417): n is a, c, g, or t
  misc_feature (419)..(419): n is a, c, g, or t
aataaaaaggtgggnaaccccgggtnccaaaacctgccgcctaccccccggtnaaaaancttcaaacgtttaatcaaacttggtttaacttgccgnaggtgcctaacaggggcaaaccctggtttcccatcccaaaacttnaaatattaattatcgaatccaatgttctgtcaacgcgctcaacccgggttaantctggattggaggcaggatcacaggctcgggtcgctgcagacgctttcagtgggttgacggcagccgctggaactttgcgtaactggctgctcaccagccctggtcccgcggtggtactgcgtggccctgtgtacccgaggaggctactggcgtcgagcccactgcctcagaagacttcctttcatctgttcctactgagtggtcccagccagcagttcaagnangccctctcctggcagctgcctcccctcctctgcttgccatccctccctccacctccctgcaataaaatgggttttactga

SEQ ID NO: 268344 - DNA, 501 bp, Homo Sapiens
  misc_feature (42)..(42): n is a, c, g, or t
tcccaaaaactgccggctacccccctggttaaaaaaaccttnaaaacgtttaaatcaaaaccttggtttaacttgccggaaggtgcctaaaaggggaaaaccctggtttcccatcccaaaaacttcaaatattaaattatcgaaatcccagtgttctgtcaacgcgctcaaacccggggtcaaagtctggattggaggcaggatcacaggctcgggtcgctgcagacgctttcagtgggttgacggcagccgctggaactttgcgtaactgggctgctcaccagccctggtcccgcggtggtactgcgtggccctgtgtacccgaggaggctactggcgtcgagcccactgcctcagaagacttcctttcatctgttcctactgagctggtcccagccagcagttcagtagtgccctctcctgggcagctgcctcccctcctctgcttgccatccctccctccacctccctgcaataaaatgggttttactgaaatggaaa

SEQ ID NO: 268345 - DNA, 840 bp, Homo Sapiens
  misc_feature (16)..(16): n is a, c, g, or t
gattcggcacaggtcnagatctaaagacccaggaaggtctctgggtgggataaagccaagatgaaactccccctacttctggctcttctatttggggcagtttctgctcttcatctaaggtctgagacttccacctttgagacccctttggtgctaagacgctgcctgaggatgaggagacaccagagcaggagatggaggagaccccttgcagggagctggaggaagaggaggagtggggctctggaagtgaagatgcctccaagaaagatggggctgttgagtctatctcagtgccagatatggtggacaaaaaccttacgtgtcctgaggaagaggacacagtaaaagtggtgggcatccctgggttgccagacctgccgctacctcctggtgagaagtcttcagacgtttagtcaagcttggtttacttgccggaggtgctacaggggcaacctggtttccatccacaacttcaatattaattatcgaatccagtgttctgtcagcgcgctcaaccagggtcaagtctggattggaggcaggatcacaggctcgggtcgctgcagacgctttcagtgggttgacggcagccgctggaactttgcgtactgggctgctcaccagccctggtcccgcggtggtcactgcgtggccctgtgtacccgaggaggctactggcgtcgagcccactgcctcagaagacttcctttcatctgttcctactgagctggtcccagccagcagttcaggagtgccctctcctgggcagctgcctcccctcctctgcttgccatccctccctccacctccctgcaataaaatgggttttactgaaaa

SEQ ID NO: 268346 - DNA, 591 bp, Homo Sapiens
  misc_feature (60)..(60): n is a, c, g, or t
  misc_feature (547)..(547): n is a, c, g, or t
  misc_feature (572)..(572): n is a, c, g, or t
gaaaaggccaggagtctcctttgaagaaaagtccttctgctggcgacgtacacatattgnactggctttgccaagcctatggatatttactgccaacagatttgtgcaagatgcacagaacaaagtgacccacctatcagagaccagatctgtgtctcagcaggctagtcaggaaagaaatcaaatgaccaatcaagtttcaaatgaaacccaatcagaatcaacagaacagacaccttctcggccatcgcaattagatgtctctctttctgcaacaggcccacagtttttgtcagttgagccagcgcattcagttgcatctcaaaaaaacccccacctccgcttccagcatgcttgaacttgagacagggcttcatgtaactccttctccttcagagagcagtagcagcagagcagtctctccctttgccaagattcgaagttccatggtccaggttgctagtattacccaagctggattaacccatgggataaactttgcagtgtcaaaagttcagaaagagtcctccagaacctggaaaatcanttaatcaagtccagcaaaatggaantttaaaaaaggatggttta

SEQ ID NO: 268347 - DNA, 567 bp, Homo Sapiens
  misc_feature (21)..(21): n is a, c, g, or t
ccccatcagttcctcaccggnaaataggctgcccaaaaagaaaaatccagcttttcctaagatcaaagcccagagttgcttctcttacaaccttacggcgctaatgcattaagttgaagtccgactgccaaagaggcccagcagagggcagcacccccatcatttttttgaatttctcccttaggaattttgccttcctttgtcttctgtccacccaggccttctctccagctggacacaaacctcctttgacgggaaataattgccgttaggcttcacagtagtgctttttcctttcacttggatttgcattttaacctgcatttcgaagatttttatacatgttttctatttccgacaatgccaggaggcttcattgacgttgtagtctgtgttaataaacttgtgtatcactctgctctgatcttttaggaattaacttgcaaatgaaatgaatatgttgggactttggcataatttgaatatagcattgtgtgagttgtgattgtctcttcctaattgtgctgtaataacctgtgtatgagaataaaatgatttccaccatca

SEQ ID NO: 268348 - DNA, 752 bp, Homo Sapiens
  misc_feature (698)..(698): n is a, c, g, or t
  misc_feature (703)..(703): n is a, c, g, or t
cagacgctgctgccgccagggaacaatcacacctgtacatggaaggcctgggaggatacccttgacaaatactgtgaccgggagtatgctgtgaagacccaccaccacttgtgttgccgccaccctcccagccctactcgggatgagtgctttgcccgtcggtcccttaccccaactatgaccgggacatcttgaccattgacatcagtcgagtcacccccaacctcatgggccacctctgtggaaaccaaagagttctcaccaagcataaacatattcctgggctgatccacaacatgactgcccgctgctgtgacctgccatttccagaacaggcctgctgtgcagaggaggagaaattaaccttcatcaatgatctgtgtggtccccgacgtaacatctggcgagaccctgccctctgctgttacctgagtcctggggatgaacaggtcaactgcttcaacatcaattatctgaggaacgtggctctagtgtctggagacactgagaacgccaagggccagggggagcagggctcaactggaggaacaaatatcagctccacctctgagcccaaggaagaatgagtcaccccagagccctagagggtcagatgggggaaccccaccctgccccacccatctgaacactcatttacacttaaacacctcttgggattttggtgtccttcattgttntattntaattgtttttaacccgcagtgttttttaagtgggatttttgggttgcc

SEQ ID NO: 268349 - DNA, 489 bp, Homo Sapiens
  misc_feature (61)..(61): n is a, c, g, or t
  misc_feature (79)..(79): n is a, c, g, or t
  misc_feature (98)..(98): n is a, c, g, or t
  misc_feature (117)..(117): n is a, c, g, or t
  misc_feature (127)..(127): n is a, c, g, or t
  misc_feature (146)..(146): n is a, c, g, or t
  misc_feature (148)..(148): n is a, c, g, or t
  misc_feature (160)..(160): n is a, c, g, or t
  misc_feature (256)..(256): n is a, c, g, or t
tatgggcccatcccacagcctgtgaacatctgctcagtgaagggggcagggcgtggctcanggggcaggcactgaaggnaatacaagcaggcttaggngggtgtgtttgtctgtggngtgtctgaanacgccagtgccctcctggncnagggcaccaagntccacttaaaacactgcgggtgaagacattaaaatagacaatgaggacaccaaatccaagaggtgtttagtgtaatgaagtgttcagaatgggtgngggcagggtggggttccccccatctgaccctctagggctctggggtgactcattcttccttgggctcagaggtggagctgatatttgttcctccagttgagccctgctccccctggcccttggcgttctcagtgtctccagacactagagccacgttcctcagataattgatgttgaagcagttgacctgttcatccccaggactcaggtaacagcagagggcagggtctcgc

SEQ ID NO: 268350 - DNA, 272 bp, Homo Sapiens
gcccagccaacaagtctttatttaaatgagagatataaaaagtcccaatttgccccatgtttccacatgcttttcttcttcatcctctcaaaccatactccataaatatttgtaaaaatgatttgattttggtctgtcaccaaggatacactcctcaccctaaggggttatgacaacagggaaatactcatctcatttttgtgatgggctgattagagccagaaaaccttctgatttccttgatctaaatatttttccctcttgtaggcttc

SEQ ID NO: 268351 - DNA, 876 bp, Homo Sapiens
atgaaacttggaggcttacaggtatagacagctttcagctacagcacattctaattttttattttgtttagttcttttgtattcacttctggtctctttaagactgttttaaaagaaatcaatttagggaacccagttatataatataaactttgtaatctgagagaaaaaatgtatagtaaatctaagtcttgatttttaactttctattgtaaaaaataataatatacagagtttaatagaaggtgatgttttggttttgttttcccagaggctgccatatggtctttgagtacggggatgtcccaaactggcccaccaatgagcatggcggctctggccaggaaatgccagagttagcctcccaggcttgcgggtggacatgcctgctccctgccagcctccagtggcctggcaggccctcccgagcctgtctgccctccccaggggtggaggagtctctggggccccaggaggattccctcccggagactcgcacggtgctcccctctcacgcgttgtcacagttagtccggaaatgactgaaaccaggcattctcccggacctcagcgtgggggagcctccaggcagacgctgggtatggagctgtggtgtggtctgtcctgtatggtggccagtgctttctgccagcatttctggatggatatagggactatcattagtatcctaatacacggtgattttaaaacaaccataaaattgattcagagtccactgacccttacagatgtaggtatacccttactggagagggaactctgatgaggagatgctggtaaattatcattttttaaattgctggtgagtctgacacttggtgagttttcagccagtttgttaaacttttaatttaa

SEQ ID NO: 268352 - DNA, 527 bp, Homo Sapiens
  misc_feature (12)..(12): n is a, c, g, or t
  misc_feature (52)..(52): n is a, c, g, or t
tgccccggcttnaagtttcctgcccccacctggctttttcccccagcttganccctaatagaactcccagagtttggggggaggccccagccctttgttttccggcccttgaagcatattcacacataaaaagttgtaatcccccttatacaaactgttttggaggccccttacccgtagtccgaaggtatccttagatccttcccttagtgatcctcattaagaatatcccgaaagtgtataaccctcttcaacaatctgaaacaaagatcagatccttaagagctgagcagctgtgtaacaacagcataagaatttctttgttgtaaatttaccttttcaattgtctttgcatcagctccttgcagccgcaaccagtctataagctctttatctgttcttctgccgtaggggcctgctgggttctctgtaatacctgtaacgattggcaatttgttatatattagtctaaccataaaactcttcaaaagtaaccagttggattaataaatgattccagaatgtaa

SEQ ID NO: 268353 - DNA, 354 bp, Homo Sapiens
  misc_feature (311)..(311): n is a, c, g, or t
  misc_feature (318)..(318): n is a, c, g, or t
tctgtttgtattttaataagtccgtccagaataatacaggttacatagctgtaaccatcttaaggaaaatgacattaagtttgcaacaaatacttgctggtgaaaacacattactagcatttcaaaaatttacaaaaatgtaacaaaatatcctaaacagctatctttatatttgtaaaggaagtatgaacaactggcttaaccagtttccactgcacatcaaacaggtggcaaagtgatagagatcatctttgatttttaagagaataataaaacctaatttatatcccacacattacaattctaggggnttagggncaggctaacacatgatgtcatctactttaacagcct

SEQ ID NO: 268354 - DNA, 473 bp, Homo Sapiens
  misc_feature (25)..(25): n is a, c, g, or t
  misc_feature (99)..(99): n is a, c, g, or t
  misc_feature (125)..(125): n is a, c, g, or t
gttgccaaaacccccccaccaattntccttcaccctcccacttgtcttcttaaaactttttgaaaaaactttttaaacatggcccctccttgtctcccnaggctgctctgaaaccctgactgaanaggaggcaccctggcaaaagacaggggctgagggagggagggaagaggagaagggaggctgcttttcccccaggggctgcagctggagggctggagccaagtaagcactgaaggggaagcagggagggagagagggggaaggatgaaccaactacctggagcagctggagctaagagccgggggcagaggggaggagaggcctggtgagtggtgggttgatcgctgcatccagtgtaaagcttggggctgctggggagggaggggccgagtaagggactttcccatctgagtggctcaggagacccacccctctcccctcagagcagcaggggacagagaaaagccat

SEQ ID NO: 268355 - DNA, 470 bp, Homo Sapiens
  misc_feature (445)..(445): n is a, c, g, or t
  misc_feature (460)..(460): n is a, c, g, or t
agcatctgccctctggagagactgactcccaaatgcaggtgcttccattggagctaggtcggaggctgctttatatgacgaactccagaaatggatgcccagaatacggaggccaaaacgttcctgaagtcctggtaaggacagtcgctctgggggtcctcattttacctgaagttcctgcacgcccagtgaaagagaggagatagaccctggaaggcagagctgcagatgctcatcatcaggtcaattctggagctacagttttgtttctgactggatagggatgcaccagtgactgtcacatcaagcagtccttttattctctctcctttagtatcgattttaaagggcattaggcactatggttccagagtttcttggggaaaacttgcagattcttattaattggttctgcaatacttaaataaattattttaacaattgngaagttttccagatntatgaagcat

SEQ ID NO: 268356 - DNA, 444 bp, Homo Sapiens
  misc_feature (19)..(19): n is a, c, g, or t
  misc_feature (91)..(91): n is a, c, g, or t
  misc_feature (196)..(196): n is a, c, g, or t
gaaaaacctgtgtcccccnggccaaacgaggtccatccactgaggcctgccagggaagggcccatgggcacccccagccaaatgggggaanggcccgcactgcccgctgaagagccaggtaacacgtgccgccctttaaacacatcctgaagagcaaaacgcgaagaggctccgtcccatctcctactaacccagnaccttagtgcagcaatttaaggagcctaacattagtgtgtatgtgtgtacaaatttcatgtaaagcctcatatttagaggtctatttttacagagaatgtacataaagctacgtaaatagtaaatctaagaagtatcttggaaaatcagtaaaaattaatacaaatgttataatctgaaaacttataattgtaaaataatttatttaagtattgcagaaccaattaataagaatctgcaagttttccc

SEQ ID NO: 268357 - DNA, 451 bp, Homo Sapiens
  misc_feature (418)..(418): n is a, c, g, or t
agacataacatctgctccagcctgttcactatccatgtggttttaaactcttaactttacttcttagcttcatccctgtaagtaagtgctctctacctcacaggggtcttatgagggggaaaaaataagatgtttaagggttgttttaagagagagatccttcttttaaagtgattttatcaaagccccttgggttagaaatgaaaaactctatagctatttttttcctattctcgttttgctatttttatttctgaaaagtgatctgtctgaaaagagccttatatctggttttaacttctcctcattgacccttttcacagtgaaatctctactttatccatggctcttaactttttatttatggagcccaaactaattttcccacaacaaatctcacatactttttactcctatncattaaaacaaattaatggtcctccacaaggga

SEQ ID NO: 268358 - DNA, 585 bp, Homo Sapiens
  misc_feature (99)..(107): n is a, c, g, or t
  misc_feature (390)..(390): n is a, c, g, or t
  misc_feature (419)..(419): n is a, c, g, or t
  misc_feature (431)..(431): n is a, c, g, or t
  misc_feature (448)..(448): n is a, c, g, or t
  misc_feature (460)..(460): n is a, c, g, or t
  misc_feature (487)..(487): n is a, c, g, or t
  misc_feature (502)..(502): n is a, c, g, or t
  misc_feature (520)..(520): n is a, c, g, or t
  misc_feature (565)..(565): n is a, c, g, or t
  misc_feature (575)..(575): n is a, c, g, or t
aaaattgcctcttggtctgtgtaaatttaaattgcagtagcttattgttttcatagggtagttgacatctaatacctctattctgagaggggaaatcannnnnnnnngtaaaactaactgcttctctttattttctccctataccagctacaggccatatagctaccggcactttgcaccccccaccacaccctgcagcacagatgtttgtgacagtgactatgctcctagtcggagaatgacctcagtggcaacagcaaagggctactaccagtgacttgaactatgattcagaacctgtgcccccacctcccacaccccgaagccaatactttgtcagcaagaggagaactatgaaagctgcccaccttctccatacacagagaggantatctcatgactctaccaccgccacctcncctgtacagacnctctgaggagggcctcncttgatgctcangtaaaatgtaattaatttggttgagantggaggggggaggantattagagaaggatgagnagccatgtcagttaaatataaatgggtaggatctgagatttgtcngagaaagatntattattctt

SEQ ID NO: 268359 - DNA, 873 bp, Homo Sapiens
tttgaagagtgtgctgggaaaaaggaagcatttcttcattgatttaaatcagtatgaatattatatgcctaaataaaaaatttgcacacggtaaattctctcacttgtgaatgggagaagctgccccaggaatctgtgaggatggtattccctggagtctggctttgaaagatttcattgttggtagaaataacaggttgagaaagagggagttagcatcacctaaaacctgcacgtgaacaagggttgacatgatacactatggccttagaaaagggccaggtgaaaccccaagctaatcactgcggtctttcagagccggacagacaggtgccagcagagcccggggctcactctcctttcagtcattcctcagcccttcgaagggaagcccaaacactttgcacgctgtgctggcagacattctggcctggtgtgtctgaaagttgcatcagtcctcacggtgcaaacacagttgatttaggaagtcacacaatgacactgaaatcctacagaccaaaatccacttgtcagcaggagcagcagcccaggcccagcaccagcggtcttccggctcctctgagggctgccacgttgggcgaggggagccatgccaagggtccaggctgctttaggccatctgtgccccactcatctggggacagatggtttttctttattgtaaaattgtggacttttaaaacctgttgactaaacagtaattaatttatatttgtgaaaaatgccactgtcctagtgatttctgatgtaaataatgttgtttatatagtatgtattaaattttcctacattgtaaaactgctgtacttttgattcttgtatattaaaaagtgttactgagcatttttaaaa

SEQ ID NO: 268360 - DNA, 595 bp, Homo Sapiens
  misc_feature (330)..(330): n is a, c, g, or t
  misc_feature (385)..(385): n is a, c, g, or t
  misc_feature (541)..(541): n is a, c, g, or t
  misc_feature (557)..(557): n is a, c, g, or t
  misc_feature (568)..(568): n is a, c, g, or t
  misc_feature (585)..(585): n is a, c, g, or t
aaaaataggtaaaaagagcctccaaacctgctttgattttattcacctattcttttaggccaggaactaatttacctctcactatcctgttccctcttgctatcttgtggagtctctaaagacaaaggtataaagagcttttggtaggtgaattaataatcaactagatggcatttccaaatgggattgcacatactgtggggcaagtcccaagtgaacttcaaagtgagacgtttatttgagtaatccttccagattaacaataatcataatagcagttaccacttcctgagtactttctatatgccatgtattgagcttgctcacttnctttatgtggattcttatttaatcttaataccaagatgaggtgtaggagattaantaccaccatttaataggagtttgaaatttgggtttatgaaaagttgaggcacagaacccaaaatgttaacaaaggtagtaagtgacagagtcaagatacaagcctggtgcagtcaaatttcaggggccttgccagaaacctgttaccggggatccncccggtccctcccttnaatccatccanatccggggaaaaccaancccttaaggt

SEQ ID NO: 268361 - DNA, 593 bp, Homo Sapiens
  misc_feature (159)..(159): n is a, c, g, or t
  misc_feature (529)..(529): n is a, c, g, or t
gcccttgttcaggtgaactttggaatgtagtgtcaaaaaacccccattcatttcctgctgcaaagctccccaaagaacagacactgtggcccccatcattggcattccagaatccgccacaaagaattaatcccacaattcaccatcttttagctcagnaaatattttggctaagtttcccagaaggacccatcccagaagacctgtaggtgttccttgaacaatagtaaatgtgctaaatctgctataccaaacaggtctacctggtagggagaagaacagttagccaggatcttttgtccttccaggatctgtacagtccgaaagccgctgagggtaaaaacatccagctgcaccctaaggtcaacactgtaggaaaagtccactatcttcaaagcttgattgttcttgttacaatcatagggatcgtggattctgtttctgagaatcagacaccttggactcaagtcaccatggactatttctgctttgtgtagcatctccactattgtcaaaaggttataaatantcaacactgttatttcatgggtaatatattcactgtgttggagaagatcctgaagggtgaagca

SEQ ID NO: 268362 - DNA, 274 bp, Homo Sapiens
  misc_feature (31)..(31): n is a, c, g, or t
  misc_feature (41)..(41): n is a, c, g, or t
gcaaacaaattctgttaacataattgagttnatggccatgnaaatgaaatcatttcttcatccaattaaatgccccaaaatatactaataggacctctataatatttcaaagtacaaagcatttcaaagcatataaagagcacttaacattataaaaggcaaaactcactgagaaagtaaggctattaattccaaataggcaaatactactggatgacatttttaaatttataataattataactcaccaggtcaatcacttaaccaaaatgta

SEQ ID NO: 268363 - DNA, 508 bp, Homo Sapiens
  misc_feature (168)..(168): n is a, c, g, or t
  misc_feature (255)..(255): n is a, c, g, or t
  misc_feature (268)..(268): n is a, c, g, or t
  misc_feature (340)..(340): n is a, c, g, or t
  misc_feature (344)..(344): n is a, c, g, or t
  misc_feature (392)..(392): n is a, c, g, or t
  misc_feature (433)..(433): n is a, c, g, or t
  misc_feature (468)..(468): n is a, c, g, or t
  misc_feature (476)..(476): n is a, c, g, or t
ggctactgtggcactacactttactgattctccacatacctttcttacttctcttttgtttttttcctgagtccctccagatgtggcctaggaatccttttaaacacagtgttccaggcagaaattagttggagttagttcacaagatgcaatttatttgccatccancccttgcattttcagctccattatttgtccttgacaatggcttgtctataaaaacactttctccttcccagagatggcagctaacantacctagcaaagngaaatgggaatttcattcacaatgtcatagggaaagcaattggtaaaattattttactgccaaggatgaatnaagnttagagagttgaagaaagagggcatgaattctggaaattgtattaganccatcttaaaaggtaaagctgaggagttttatcctgacttnaacagggtgtgactgttttcatagaagtactctcngatttatngggcatgtcattgattacaactaggattgcag

SEQ ID NO: 268364 - DNA, 497 bp, Homo Sapiens
  misc_feature (56)..(56): n is a, c, g, or t
  misc_feature (63)..(63): n is a, c, g, or t
  misc_feature (68)..(68): n is a, c, g, or t
  misc_feature (90)..(90): n is a, c, g, or t
  misc_feature (129)..(129): n is a, c, g, or t
  misc_feature (453)..(453): n is a, c, g, or t
ccccttccaaacatgctcacggctggtcagctccagggtcaagttctggccttgtnctagtgntccantctctaatccctggtgtggctnacaccttcaagattcctgtctgcaaaccccaggttctcnaccaaagcttccctggccagaagccagatttcctcccaggtgtcccctgggagcctgcctgccagttgtcaaggggcacagggcctccctgaaagccaaacacagcctggacctgaagccccttggctctggcctgagatggggaatccagaaaatcaactgagattctacttgggatctcttgagctgcatctggtaccataagcacagctgggggtagttgggggactgctttccaataaggccttgatcagaaagcaaacacatcctgtccagaatcccatcaagcaggatatttcaagttcactaaaatactaaaagcanaacaagccttcctgccatggaaaactcagtgatggtaaaaatgc

SEQ ID NO: 268365 - DNA, 464 bp, Homo Sapiens
atcccaggcacagcataattatccaatcttgcctgacatgcgaggattagaaagaaatgacatagcatctggctctgctactcttggtcctcatagttttcatagggaagctgcagacccatatggattgctgtcttatcagaccacctgagcagagcaggttttgtgtgtatttctgtcttctttcattgaaaatattagcctagatttccagaaatccagcatcttcacgggcattggtgctgcaggagagccatttttcactgtgacagggtcagcttaactgccctctggtgtagttatttgattgcagttttctttgatataaactgctctgagatgtccttaaaaaaattgtggatgttgacagacttcaaagtatgttgggaattaatgaccaggtttctcctaagcacccctctgatttttagatatagtctgtccttcatagtgggtttgtcaga

SEQ ID NO: 268366 - DNA, 632 bp, Homo Sapiens
  misc_feature (26)..(26): n is a, c, g, or t
  misc_feature (138)..(138): n is a, c, g, or t
  misc_feature (140)..(140): n is a, c, g, or t
aggatcacacaaacggtagtaaccangggttgtgaatctgagtacaccctggcaaggcttctcttcagactgaagcagcaattctgccactaccagccagcaaccaggacgtctgttctttgtgggggccagatcagnangagagaggcccctgtgacgcccgggctgcttggtcacaactctgtccaattcaaggatgtttatcggcctctcttagatcctgagtgagacaaatacagaaatgacccattccctgcccaccagaaactcagaggtgattggggagactgacacaggaaaatgaacttaatcaagagagactgtgatatgtgctaagaagggtgtgagggagggagagatgaattttccctggagggatcctaggaaagcattgtcatattgccatctccattagctcacttttaaacaactagggtgctggaagaaacctttgtctgaggggagttcatagctggaaatacttggaatattttccagagtctctaaactctcatcttcccccacagatacacatccaagctcacaaataggagtagcaattctaggtggtagggttgtgtacgggaacccctggctgtctgcatatatctcagaaattacccccaggacca

SEQ ID NO: 268367 - DNA, 375 bp, Homo Sapiens
  misc_feature (219)..(219): n is a, c, g, or t
ccaaggaaagatttaagtaagttgaataatgacctgctgttttgtgaagaggctttctttactcacatctaatgatgatcttttgagtatatttccagcttctgactctcctgtgtagccagtgacgatgggccagccgatgtgcagggtgatagctttaggggtaaccagagggttggtcacagcaaccgtcagaagataaatatactccatgtcacntgacgcacattgaaaaaattggatggaaactatgacatgataatggtgatttgccgaattttctcttaaatagttttgtgcagctaaacacagtgagaaataaatgttgatgttgagagctgagttcaaacaaattagtctcaaatagaatctcag

SEQ ID NO: 268368 - DNA, 335 bp, Homo Sapiens
  misc_feature (1)..(1): n is a, c, g, or t
nttgttgaatgaaaatagacctggaatagggagaaatcttgagtgtgactcggagaaaggaaagggaaaaaaatacccttgtaaaggggaaagggagacgagaagaggaattgtggcaactgggtagagggaaaagggtattttccgggggtaaaattttcaagagatctcttagggggttttttcccgggggatatgtgcaaacccaactctccccaaacccccggattttcgtgaaaaccccccggtttttcaaacctttgggggacacatttgggggtttttccagggaaaattggggaatgttcccccggggaaattgggcccgaaaaccg

SEQ ID NO: 268369 - DNA, 490 bp, Homo Sapiens
ccgagtttcccatcgcactgagcactgagatcctgctggaagtctgccgcagcatgagctccgcagccgggttctgcgcctcacgccccgggctgctgttcctggggttgctgctcctgcccacttgtggtccgccttcgccagcgctgaagctgaagaagatggggacctgcagtgcctgtgtgtgaagaccacctccccaggtccgtcccaggcacatcaccagcctggaggtgatcaaggccggaccccactgccccactgcccaactgatagccacgctgaagaatggaaggaaaatttgcttggacctgcaagccccgctgtacaagaaaataattaagaaacttttggagagttagctactagctgcctacgtgtgtgcatttgctatatagcatacttcttttttccagtttcaatctaactgtgaaagaacttctgatatttgtgttatccttatgattttaaataaacaaaataaatcaaa

SEQ ID NO: 268370 - DNA, 518 bp, Homo Sapiens
  misc_feature (454)..(454): n is a, c, g, or t
  misc_feature (469)..(469): n is a, c, g, or t
  misc_feature (486)..(486): n is a, c, g, or t
  misc_feature (499)..(499): n is a, c, g, or t
tggaagaataattaaagatctttaatagacccagcccgagtttcccatcgcactgagcactgagatcctgctggaagtctgccgcagcatgagctccgcagccgggttctgcgcctcacgccccgggctgctgttcctggggttgctgctcctgccacttgtgttcgccttcgccagcgctgaagctgaagaagatggggacctgcagtgcctgtgtgtgaagaccacctcccagggtccgtcccagggcacatcaccagcctgggaggtgatcaaggccggaccccactgccccattgcccaactgatagccacgctgaaggaatgggaaggaaaattttgcttgggacctggcaagccccgctgttacaaggaaaataatttaaggaaatttttgggagagtttagctaattagctggcctacgtgttgttgcattttgttattattaggcntatttcttttttttnccattttcaattttaantgttgaaaggaanttttgatattttgttgttt

SEQ ID NO: 268371 - DNA, 367 bp, Homo Sapiens
  misc_feature (13)..(13): n is a, c, g, or t
  misc_feature (46)..(46): n is a, c, g, or t
  misc_feature (170)..(181): n is a, c, g, or t
ccatttttttcangttaaatgtacagggccccagctgggactcaanaactttaaaaacagcaaactggaccaaaaaaatagaacaacagagaagaaaataattagcaagggaatgtcttaacatatagactagatctcttctacagcacataaacttttctagacttacnnnnnnnnnnnnccctgatatgcccattattatctattatctctaaaaacaatccaacttctcacttggcaatcaataactatatttaatttccttcatgcaaattctcccccatcatgaaataaaacatttaaaatattcatgacaccgagcacagacttcataggttacttagatttaaaatgattatgcacacat

SEQ ID NO: 268372 - DNA, 376 bp, Homo Sapiens
  misc_feature (350)..(350): n is a, c, g, or t
  misc_feature (366)..(366): n is a, c, g, or t
tagagacagtggcgtttatcaccctcaaccaggcctggcttgggcttcactgtaactgtgtgacgtggggccagtggatcacttgggtgcctcaatttggcctcttctacccatgtgcaggctggtagggcagtcgggttgggcatctggtgaggttccccctattgtacccagttacggccccactccccaccatttcccagcctcctgttgcccctctccctgtggagacgctgcctgtggaaaggggcctccttctggctcatggctcccttcttgcagctggaggaatgggagctcaaaaagaacttcctagtagcagccagtcagcatcttcgaaaaggagcgtntcccctcagggggctnggcaattggg

SEQ ID NO: 268373 - DNA, 248 bp, Homo Sapiens
gagaggtgaaaaaaagagaaaacaagttagactccaaaggtgaattcctggtcttggcagatggctctgggaacagcgagggagcacagaagtcgtgcctgaggctgttctatgggcacttggggctaaatcgcctcctgagggtgactgttgcttattctgctggacaggtttttacataaagcaaagggcatgtgaggggtgggattccttgttactcttactgcaataaaaatcaattgtttgat

SEQ ID NO: 268374 - DNA, 374 bp, Homo Sapiens
gactggaagaacaaatgtaaataaaggtgctcaaaggagaaaaaagtttcaataagtgatttttaaaaacaggtataaatgactttttgctgatgaaaggagaaatgttcctgaataccatgcctgaaagcatcattccttgataatcatattatcatatgttcctgaataccatgcctgaaagcatcattccttgataatcatattatcataacttcctatggaagtgtttttgtgaaatgtaatgctatggcttgagttctactgaagggatggaagaaatatagttatgaagacttttacatcttttccaaaactgttgttaaagccaatacccattatgttagtcaatgcctcaccatatgaaaaaattt

SEQ ID NO: 268375 - DNA, 493 bp, Homo Sapiens
  misc_feature (183)..(213): n is a, c, g, or t
  misc_feature (235)..(349): n is a, c, g, or t
  misc_feature (357)..(357): n is a, c, g, or t
  misc_feature (383)..(383): n is a, c, g, or t
  misc_feature (424)..(424): n is a, c, g, or t
  misc_feature (445)..(445): n is a, c, g, or t
  misc_feature (457)..(457): n is a, c, g, or t
gaggggaagcactttaaagtctgagcctttagaggtgattcctcaagaccctgcttaatcctaacaattttcctcattagtaaaagtcagcccaaactgggggcttgttaagatccttaccagccacatccatctgaaattatgaatttcaaagtatcttacaaatttggtgccacattatcnnnnnnnnnnnnnnnnnnnnnnnnnnnnnnnggacagagtctcgctctgtcannnnnnnnnnnnnnnnnnnnnnnnnnnnnnnnnnnnnnnnnnnnnnnnnnnnnnnnnnnnnnnnnnnnnnnnnnnnnnnnnnnnnnnnnnnnnnnnnnnnnnnnnnnnnnnnnnnaccacggnccgggctaaatttttttgtatttttnaattaggagacggggttttcactttgttagccagggtggtnttcaatctcctgacctcatgnattccacctgcntcgggcttccaaagtgcttggggtttacagggaggg

SEQ ID NO: 268376 - DNA, 371 bp, Homo Sapiens
  misc_feature (32)..(32): n is a, c, g, or t
aatggtaatggtaattgaaccttcaaagcacnaaccattggatgctagaaaaaaagaatgccttcaaagttttaaaagaaaacacttttctaccttgaattctgcaatcaaccataccattgatcaagaacaaaagtagatagaattatccttagacatgcaaggacgaaaatttaccttccatatgccttctaggagctaatagttgatgggtttcaggaaaagaaaggaatataaatgaaaataagggaagagaagggacctaggaaccagtgagtccagtcagcagggtggaagagctgacagctacactgtgcagtccacacaagagtagaaggggaagacatccagggtattgaagctcatggtgc

SEQ ID NO: 268377 - DNA, 272 bp, Homo Sapiens
atgggcatgagcaccgcgcctggccggaaactggcttttaaatggggagaagtgaagcatgaactgtagctcctttcagacttgggaaggcccttctccctgggcactggttgcctcactgggaagatgagagtgccagcctctcaagagctcctttctgttcctgatatttccagggagcacgtgaattgcctctgcttacgttcagggccctgtcctaaacccagccgtctaggcacccagtgattcccatgccttttgggaatcccagg

SEQ ID NO: 268378 - DNA, 451 bp, Homo Sapiens
  misc_feature (27)..(27): n is a, c, g, or t
aggaaaaaaagcccaagtgaccaagtnactgaccctgtgcaagaaacctccctgggaaagcgaagctttgctggggaaaagggggtagctagcctgagagggaaccctccaagggacctcaaaggtgattgtgcccaggctctgcgcctgccccaaaccctcccttaccctcctccagaccattcaggacacagggaaatcagggttacaaatcttcttgatccacttctctcaggatcccctctcttcctacccttcctcaccacttccctcagtcccaactccttttccctatttccttctcctcctgtctttaaagcctgcctcttccaggaagacccccctattgctgctggggctccccatttgcttactttgcatttgtgcccactctccacccctgctcccctgagctgaaataaaaatacaataaacttactataaagatgaa

SEQ ID NO: 268379 - DNA, 890 bp, Homo Sapiens
ggatgtctcacatcctctgtctatttgagacttagaaaaatcctacaaggctggcagtgacagaactaagatgatcatctccagtttatagaccagaaccagagctcagagaggctagatgattgattaccaagtgccggactagcaagtgctggagtcgggactaacccaggtcccttgtcccaagttccactgctgcctcttgaatgcagggacaaatgccacacggctctcaccagtgggctagtggtgggtactcaatgtgtacttttgggttcacagaagcacagcacccatgggaagggtccatctcagagaatttacgagcagggatgaaggcctccctgtctaaaatccctccttcatcccccgctggtggcagaatctgttaccagaggacaaagcctttggtccttctaatcagagtgcaagctgggagcacaggcactgcaggagagaatgcccagtgaccagtcactgaccctgtgcagaacctcctggaagcgagctttgctgggagagggggtagctagcctgagagggaaccctccaagggacctcaaaggtgattgtgccaggctctgcgcctgccccacaccctcccttaccctcctccagaccattcaggacacagggaaatcagggttacaaatcttcttgatccacttctctcaggatcccctctcttcctacccttcctcaccacttccctcagtcccaactccttttccctatttccttctcctcctgtctttaaagcctgcctcttccaggaagacccccctattgctgctggggctccccatttgcttactttgcatttgtgcccactctccacccctgctcccctgagctgaaataaaaatacaataaacttactataaagatgc

SEQ ID NO: 268380 - DNA, 440 bp, Homo Sapiens
  misc_feature (36)..(36): n is a, c, g, or t
  misc_feature (58)..(58): n is a, c, g, or t
  misc_feature (80)..(80): n is a, c, g, or t
gtactcctccggccaaagggtcatttaccctccaangaaagttttcctgccttgtaancctatagaacacctagtcgccngccttaaaatgccttattcctatgattgtacatttgtgtaaacctattatttttttccttcagaaaacacattttagtttaaaacagagaaacacaaacctgaatactgaataacctaagataattggcaatactgtgaagttttaaaagcactcttaaaacttctcaaagttcattaataatttttaaagtcaccatcccttaaaaataaattatttacaagtatcaccttaggttgatggagtttatgcagtcattacatgatcaggatatgcttgagagactgtgcctacagtgcagaaaaccttgaacatatcctgtctacttgccattggaaaactgaaggcagcataactttat

SEQ ID NO: 268381 - DNA, 656 bp, Homo Sapiens
  misc_feature (136)..(136): n is a, c, g, or t
  misc_feature (319)..(349): n is a, c, g, or t
  misc_feature (510)..(510): n is a, c, g, or t
  misc_feature (543)..(543): n is a, c, g, or t
  misc_feature (568)..(568): n is a, c, g, or t
  misc_feature (636)..(636): n is a, c, g, or t
caagccaggccagttctccaggtggaactgtagtgtagcgacctcactgctgcgcgcacagtctcccgggacttggactcgagggagtgacgaggaggagctccgagctgcgcctgagccgtgccagccggcggancctcaggcggtggacgtcggcgatactgttgggacggtgaccggctcactctgcggcgccgtgctcccgctgctcacccaaagaagttgtttccattttaaaccggtcttttggggctgcagtaaaaaataagaaatggagttttcttgctttttactctaaaattcaatgtaattaaatttnnnnnnnnnnnnnnnnnnnnnnnnnnnnnnngtgtaaaataaaatgtttcttggacaagaaatcccctgaaattcagctgttatagtgcttcactgtttttgcactgatttttctataccttaggtgggtcaggaagacaaccttgaatgcactcatagagaaaactgttactttctgacgtaatgtaattncagggaagacagacgctgcaatcacagattttnaaaaaattgtttggcacttaaaatnagttgaatgctgggtgggaagttactttgcagatgggtgtaaggactctgggcctctgaggtgcggcntgaaggtgcccttttaccct

SEQ ID NO: 268382 - DNA, 406 bp, Homo Sapiens
  misc_feature (32)..(32): n is a, c, g, or t
  misc_feature (89)..(89): n is a, c, g, or t
cctaaccccttaggtgggtccagaaggaccanccctgaaatgcaccccatagagaaaactgttacctttccgaccgtaatgtaattcanggaagacagacgcctgcaatcacagattttaaaaaattgtttgcacttaaaaatagttgaatgctggtggaaagttactttgcagatgggtgtaaggactcatggccctctgaggtgcggcgtgaagatgccctttttacccgttgacgtttattttacgtaaaataaactgttgtttccaatgcaatcaactctgtattatatgtataaatattgtaattctgcaattggggaaaatagttacttcactagtaattttcatcatttaagagtgatatttctaattcacaaaagttaatattaaaactatcttgaat

SEQ ID NO: 268383 - DNA, 354 bp, Homo Sapiens
  misc_feature (215)..(224): n is a, c, g, or t
  misc_feature (319)..(319): n is a, c, g, or t
tagtcatggaaatgtaaataatgggtcaggaatgggaaaaaaggacagttggaataatagaagaaataaagctaaagtcgaattatgaaattttaccatgataagttgcagaatattaaaatatcgaaggcaagaaataataaaataaataatacatggacattttctcagaataaaagataattattctccccccccaatccctacatatatannnnnnnnnnctttgaaacaggtttttactctgttgccccggttggagtgtagtaagattatagctgtctcatctcaaactgctggggtcaaatgatcttcctgnctttagcttcccaaagtgctgggattacaggcgtg

SEQ ID NO: 268384 - DNA, 691 bp, Homo Sapiens
  misc_feature (154)..(154): n is a, c, g, or t
tggtgagattggggttattttcatgtttattggccatttatagtttactgtggattgtttgtatcccttacctgctttctattgggttatgtgtggatatattgtttttatttgttcagcatctccttccccatcttctggtaacacaaccttntatttatttgtggggaacctattccctgtgggcttaggtgagcatgtgaccagggcctgggcctcctgagtcccacagcttcctagccacagtgataaaagaatgggtatataacttaagccagggctaaggaaagcccttaacagaacttctgctggaactactggaaagaaggctttatggagatcccagggaaccaaggaccatgtaagcctgaatttgtgccatgtggagagagtctgtctgaggagaaactcggatgctagcagaaatggaaagagaactaagttctgatgtcatttttctggaggccctagatccagctgtgcctaaagcctgcccctacctccggactttaaagttttgtgagccaataaagtccctttcttgtttaagataattgaattgagtttctgttctgattaatataggttatttgtattttcttattgatttgtagaaaacctttgtaattttaaattctagactttatgcactatataagttaataaaattagcatggccttccatgaaaaa

SEQ ID NO: 268385 - DNA, 421 bp, Homo Sapiens
  misc_feature (387)..(387): n is a, c, g, or t
  misc_feature (394)..(394): n is a, c, g, or t
cagacataacagataacacatacaaagtgcctaccacatgctaaccactgctgcaggcactttctatagaagaactaatttaatcatcaccataaccctatgggtagatgatatttttacaacctccattttacagatgaagaaactgaagcatagacctgcttatgtgagaagaaacgcagggagacagttcagtcactgcaatcttcatgcccatcagtttcttgtgagaagaaaacaagactgggcaacgctgtcttcctcctctgagctgtcaagtaggaagtccgggctgctctgctaggaaaggaggaagttcatgtggcagggagccttggagggcatcccagggtgttgacactctttccacctaggaggctttccgtnttctccntcctcttgccatgttaggcaaactgct

SEQ ID NO: 268386 - DNA, 478 bp, Homo Sapiens
ttaaaatgggaaagaagagggggagggtagaagaggtgggagcacaaaggcctctgagaaaatgtgtaagcttcctgtggggtcactgagcagggtgggccgggggagcctgaggaagggaagttaggtgactggaaacacaaggggaagaaaagaaaacagaaccagacacccaggccagggtgccaggaaagccactctggggagggccaagagggacgcctttcctcccctccatgcctgcccccgacctggccctcaggaacgcacagccttgggagggcggacgtggctgtcctcagctccgctttccctccccgcaaaagtctctccccagggtgggcggcacggggaggaaaggaagcgcgctcctctctctgctttcccatctgcctctgcttcctcccaacagcaatggtaaaatgtgctttctttagattattttaaaaacagagagaaagagaaaggggagaggagt

SEQ ID NO: 268387 - DNA, 366 bp, Homo Sapiens
  misc_feature (38)..(38): n is a, c, g, or t
  misc_feature (138)..(138): n is a, c, g, or t
ggcccaacccagccatgctccaggactgccctgggggncccagagctaaaaggtggttgcgggctgcccaggttccacagcccttgcagctacagggcaagggtgctttacaaagttaatcctaggagggagtttgcngggttctcttgtcattcttcccagactctggtcaacccagggtgggttctgggggaaaaggagaattgtcaaagaaatcacagggaagataagtttggccgatggagactcagcagccgtttccaggaacaagaaagagggggaaatggtgatggagataaataggggtggatgaggagggtttattcattcagtccacagacgttgagaggtgccagccctgccctg

SEQ ID NO: 268388 - DNA, 759 bp, Homo Sapiens
  misc_feature (43)..(43): n is a, c, g, or t
  misc_feature (69)..(69): n is a, c, g, or t
attcggcacagggaaagactgacccccatgattcaattacctntccctgggtccctcccacagcacgtnggaaattctgtgcgatacaattgaagccgagatctggatggggactcagccaaaccatatcacatgccatttcatttgatccatacaacatggggcaaagatgatcgggttgacaaacagattctaaagggttctggaatcgtctggtcctccagccacaactcaacatggatctcttaagtctaaagttctgtcctgtacctgcagcctcctttggcctagttattttgtgaaatctcatgcttcacagtcgaatctgtgtagaacctgggttaatcacgccagtatgcgatcaatatcctcatctccccatctgctttgtcagtggattctgagggaaaacctgtaaattagagagggatgagcccatataagaatgtctccttgtgagtgttcattgtgcagagaaagctgaaaattgcaaaaccctgtaatcatgaaatgaaagagaaggaacatctaagtggtagctttggggtcaggaagagggtagacaaactgtcccaacaccaagcagccatctacatgacccagccacctgatgtggcaccaaatgacccagagtcttgaggttctgaactgttcccagactcggggacaatgtgaggactgggtcttccatgctccttttcactcccactcaccctgagatttttctcaggtggaattaaacagggagccaagtgaaaa

SEQ ID NO: 268389 - DNA, 391 bp, Homo Sapiens
attcggcacagggtgactttcatgttagatcttcttcattgatgccttggttttattttaaaattcatttgtatatgtctgttgattaaagcattcgaaatgttatcttagaatttttcacccaactgcttggtttcaaagatcttaagtgaaaaactgcctcctggtcaataccaaatttgtacagagtgtgaagtggagtttttatgcttctgtcaaacttccatccatctaatactgtacctgtgtcatattttattcctttgtagtcttctaaggaattgggaagtttctgtatgatgcgctttactagttgtaaaatagactatcagagggaaaaggcctctctagtttatttttgaaaaatgctccagggtcttaataattttca

SEQ ID NO: 268390 - DNA, 457 bp, Homo Sapiens
agggctcggcgtggggaagaaacaaggactgctgtgggcatgcggaatccaaggggcccatgggacagccaaggaaggtgttgcccagcaagcaggtggaaccagagctaaggtacacacctgggaaccgacactgcataggtgctcaaactagttaagtccgtgaggatgtccagggggaatggaagagtgaaaagagaactccaacagtcccttcaagactgaaaacattcaaccggcaggtgaggaaaaccaacctgctgagaaatggccagaaaggccagacaagcagtaggaggctgtggcatcacaagagccaagcaagtttcaagaagggagcagttacaagtttcaactgtcaagagaagtgagaaaaacagtaaaatgtagctatatgtttttacaattaagacagtcccaagttttctgccaaagtactccaaataacattacacgg

SEQ ID NO: 268391 - DNA, 341 bp, Homo Sapiens
  misc_feature (92)..(112): n is a, c, g, or t
atgagctgatgtttccagcctaatttttttaatcaacaaatatttctgagccactcccctccacgtataaaacatggctctaggtgcagagnnnnnnnnnnnnnnnnnnnnnaagcatgagactcagttccccattgcaagaagcttgaactaacagtgtagaaggcaagttgacaattacaaaacaagatgatccacctgtaagaaaggagtgaaaagggtactgtaaaaatacaaaggaggaagcaatcagcgctaccccaggacctggtaaggaagaggggctgtcaggcaaggttacaaagagaaggcaacatgtaagttttacagaggaatccaca

SEQ ID NO: 268392 - DNA, 406 bp, Homo Sapiens
  misc_feature (11)..(11): n is a, c, g, or t
aaaccctttcnagtattcgtttttgtgtaattggaagaggaaggataaggaagtagggatattgtaggttctgtcctacaactccttgcagtgtgttaactgtacatttgttttatggagatctttgagaagacagataagaggtataaattcatcaagccatgtttcatctgtcctgagtttaaggtctttatccttcttcctactattaaaaagtaagttttgcattctaaccatgatttggtcagactttaacataaagacctcatttacttactggaaggcatactgtagttgatattgtcagactgaaataaattcctaattaagtacaagtgttgtaacaccagtcctctgctaccatttatcactggaaaaagttaatttgcctttatagagttaaaaa

SEQ ID NO: 268393 - DNA, 424 bp, Homo Sapiens
  misc_feature (66)..(66): n is a, c, g, or t
  misc_feature (402)..(402): n is a, c, g, or t
ttcactgtttacaattgtatgctaaagccctgaaatattgtctgtgctgtggtgtatgagcattgnccaactttatatttattgcagtgaagaagaaactaaaaatatatggaaatgaggagcatgtccaagctcctaaatccgtgtgggtgcatgtgggagaagtgagttagggcctcttgaaaaggaggctttttggagaggggtcccccaggtttcttggtgttcctgcttggggatcactgctgctagctgactgggacctccccattgggaagtttgtgattttgctttgggcaaagtttcattgactaggtaggaactcattctgttttaggtgtatatttcaatataaatgtaaacattttgctcaataaaaaactcgtgccgaattcttgggcncgaggggccaaattccccatag

SEQ ID NO: 268394 - DNA, 148 bp, Homo Sapiens
atttatccagaaaatagaatccaaaaccgtggggctgaaatcttctctaattgcaccatgtgatcatgcttttctgaggattgtatttttggtgtgtgtaggtggtaggggagtcttattttgtggctggtgtttactgagagatcac

SEQ ID NO: 268395 - DNA, 640 bp, Homo Sapiens
  misc_feature (13)..(13): n is a, c, g, or t
  misc_feature (33)..(33): n is a, c, g, or t
  misc_feature (46)..(46): n is a, c, g, or t
  misc_feature (55)..(55): n is a, c, g, or t
  misc_feature (70)..(70): n is a, c, g, or t
  misc_feature (610)..(610): n is a, c, g, or t
  misc_feature (623)..(623): n is a, c, g, or t
gcaaacagactcnccccggccatcgtttagaangctgaatgtcaanacattttcngggtgcccagccccnacacataacccacacaagtaaaaaaggaagcttttctccctaaactgaacattcctttttcctcttttctgagaggtgtggacactggggctgggaaatgctcaggcctccccctgcagacaaggactgggctgttaagagaggcctcttgtctttcatgacacaagccttagctcacaagacgagaagtacctagtcccagaccacctcttccatgatgacagaaacccttctaaaaactgaaatctatgtgatagaattaatgaaggtaggctaacccaaattactgctcacattttttcaaataaaagtcacacaaataccataatgttgttggttagaacattatgtttctcatatctataaataaggggctagtactttttatcacccaaaagtagacaaaaaataggaaatgcattcattcccaaatttaggattttggataactttccaaaagggttggaggtaggttttaattgccgggggacatggggtccggttggggtgtctttctggttaatctggcaataaccctcngggactgtatttncttttcttggggaccgg

SEQ ID NO: 268396 - DNA, 795 bp, Homo Sapiens
  misc_feature (135)..(135): n is a, c, g, or t
  misc_feature (206)..(206): n is a, c, g, or t
  misc_feature (247)..(247): n is a, c, g, or t
actggactggatccatgattggattggatctgataattaactgacttggattcagttaagaggctgcagatgtccaggatcaggcagaaactagcagaaatggtaatattacagtgggtgcagacttcagaaatntgcagagatttttgtgttctacattctttttcttgtacccttaggtagggaaaaatcattaactaaattgntgaaggggatctgaggaccaaatccaggattctagggaaanattggatcctgagtatctgaagaacaccgtattctaccttctagctataaggtagaatgtataaatattaggcctcagaagaaataactacttacagaaatggcaaaatctttgtaacttaaaattacaatggaccgttcctaatgaacaacacagcacttaaaaatgaggggtcctcaattagtcttcaaggatgcctattgatgtgcagaagcttctaaaaacatttcaatatttttattgctttattaaaagacttcataaaaggcaaatagggccaggtgtggtgctcatgcctgtaatcccaacacgttgggagatcaaagcaggaagatcgcttgagcacagcagttcaagacaagcctatgcaacatagtgagatctcctctctacaaaaaattaaaaatcagctggatgtggtggtgtacacctgtagttccagctactcaggaggctgaggtgggaaattcacttgagcccaggaggtaaaggctgcaaatcagctgtgactgtgcctttgtgattacacagagggaaaccctgtcttt

SEQ ID NO: 268397 - DNA, 493 bp, Homo Sapiens
  misc_feature (15)..(15): n is a, c, g, or t
accaacacaaaaacngcagaattacatgtttgacgcccatgttaccttaatccaatgaatgtgtgggaattcttcttttgccccacagatattataaagaagaaagcccttttcttcttgaagaggactatcactgtcttactcttgcatgggaaaaccttaggggtcaatacaacctcctctcacatttctccaccaaacaaacctcacaaaggaggtatcaaactcagtcactacatcctaaaataacagtatgtttccatatgaaaaaattctttttttaaactttatgcattgtcaaagatgatttgataatattttccataattttattctaaggctttagaaatgaaaatctctagattttcttattaaaacaagttggtacgtttttagtagtttctctaaaaggtgcctgacaaggtctacaaaagttattattttgattaatgctcatcttctcagacatctgtaaaatgaggctaatattgcc

SEQ ID NO: 268398 - DNA, 468 bp, Homo Sapiens
  misc_feature (424)..(424): n is a, c, g, or t
  misc_feature (440)..(440): n is a, c, g, or t
taaacacatagccaaatcacagaatgactggaagtgctcacacaaccaagccaagaagcgcgttgtgtttgctgactccaagggcctctctctcactgcgatccatgtcttctccgacctcccagaagaaccagcgtgggatctgcagtttgatctcttggaccttaatgatatctcctctgccttaaaacaccacgaggagaaaaacttgattttagatttccctcagccttcaaccgattacttaagtttccggagccactttcagaaggaactttgtctgtctgggagaactgctcgttgcaaggagcgaacagtgacagggactgtttaaagtcaaaaatgtggagttttgaggaagaaagtttcagatccgtaatcacttttcgaattcttgggaaaaacttacacttgacgtaggatntgtctatatggaaaangtgtatgggtgggcacaggtagtgatac

SEQ ID NO: 268399 - DNA, 278 bp, Homo Sapiens
  misc_feature (41)..(41): n is a, c, g, or t
  misc_feature (82)..(82): n is a, c, g, or t
  misc_feature (103)..(103): n is a, c, g, or t
  misc_feature (107)..(107): n is a, c, g, or t
ttgggagtgtttcatattttgatttatgttgtgtgtattanccatgtcttctataaacaccctatagatggctccaaatatnccaattctctctaccctagcngacntgagggatacactaaaagcaaagccctcaggagagagttgagtgaatagatcactagcactggggttacaaacaattcacgaaagaggaaatacaaaagactaagaaagatttggaaagctattcaacctccctaatagaagaaaagtgcagaattaaaatagcaatgtga

SEQ ID NO: 268400 - DNA, 391 bp, Homo Sapiens
  misc_feature (38)..(38): n is a, c, g, or t
  misc_feature (46)..(46): n is a, c, g, or t
  misc_feature (304)..(304): n is a, c, g, or t
  misc_feature (346)..(346): n is a, c, g, or t
  misc_feature (353)..(353): n is a, c, g, or t
  misc_feature (381)..(381): n is a, c, g, or t
gtatttaaatgtgaatattcactacctatttgttgcangcctgcantttttatactgggcttgccaaaaacccgaacagctttctactttgacaatgtatcagaatttaaatcagcaatatgttaataagccaagcaaaggttatatatgcaaataaaactgttgtctataacctcctgttacactggggcacagcaaaagtcatgggtgtagtcgcatgtgaacctgtccctttcataggctgctcattgccaggggaacatcagggaatagccatttgggaaggggtcatcagccctcccancatccgttttctgtcttgtcttttccctatgaggcagggggnaattccncggtggggccccaatccccagtgcaggnggctcagcct

SEQ ID NO: 268401 - DNA, 431 bp, Homo Sapiens
  misc_feature (51)..(51): n is a, c, g, or t
  misc_feature (123)..(123): n is a, c, g, or t
cctttggtgtcccaacccctgttgttaactcaagaactcaagtttcccttnaccctggtaagggtgtccccctgctgtgttttccaattgtcctgtgactgtccctgtgcgggcccattaggncaggccctgccccagcagatgggcttgggagggggctccctaaagccagtggacactgccagagtctaccttcctggcaagaggcagaccccggggccctcaggaaggagggagttggcagcgggggctgcagcaggagtaggagcagatgaggcgtcttgccaggaacctcaggaggagggggcccgggacctgtgtgggacctgtgtcctgtggtggccgtttgcagtttctctctgtgttgtgattcccttctcttcaacggtttcagtacgtgtttctcttcaataaacttcattcagtgttga

SEQ ID NO: 268402 - DNA, 464 bp, Homo Sapiens
  misc_feature (304)..(348): n is a, c, g, or t
gattaatctgtgtctgttacccatgttcaatctgggtatatgccttgtgcactatcacactttcatttctaagaacatactgttgaaggtggttacgatttctgcatgggacagtgggtgagcctgaaagagcattggatatcattttggaagaaaaccttgttagcctattttttaaaaatacgcacgaactcaaataaattgtataacaccgttaagccttagttttttcatcggtaaaatggttgtcataatagtaaaatccacaaattccaatgtcacaaaagcaataaaacaaactagnnnnnnnnnnnnnnnnnnnnnnnnnnnnnnnnnnnnnnnnnnnnngcaaccaaccacattagaagtcttggcactttgtaacggaacgggtactacactttatcttaattcttaatttaaaaacatgtttacaagttacaaccaacttctatgaaaagttg

SEQ ID NO: 268403 - DNA, 388 bp, Homo Sapiens
agtattgccctggcaaatacaaataaaagcatataataaacagcaacaaaaaatgaagttcacacacagaattatgacaccaaagccacgtgacttctcagcttgtttggcctactaaagtgccgcacaggcaacttgggaggacagaggtcggtggtcgggggcaggttggggggtggcccttagtagagagtcattgaggaatagcaggtgtgccccggagaggaaggaagcacaggccatgctgcatgttctgcggtgagcatacatcagactggcactgttgtgaaaactgtacagtttttaaaccgaagctcaggctgtttttctgactcttcttcctctgaccagtcgacatagacactcaaatccaaaaaattagtccgtc

SEQ ID NO: 268404 - DNA, 287 bp, Homo Sapiens
cttaatcaaagacctaagtagttggagagacataatatgttcatgtgttggcaactttatattgctaagatgctacatatacagtcaatgctccccagtctgatctaaaatttaatatcaattccaaccaaaatgttggcaagagttttttggagatatggacaagctgattctaacatttttatggaaggtcaaagaaccttaaatactcaaacaattctataaaagaataaagctgggaagacccacactgtgtacctgattttaaggacttgctgcaaaggaaa

SEQ ID NO: 268405 - DNA, 161 bp, Homo Sapiens
ggaagtggtgcagagactgaagagggtcaacccgggcatgggggacacagggactgctgagaacgtgcgtgtcatctttgctctgatggggtggacatagcagaaaatctaactctgtctgtagccccatacagaatgccagggtgagcacagtggctggt

SEQ ID NO: 268406 - DNA, 464 bp, Homo Sapiens
taaagatctatggtttggatatgaaagcctgaaacagaaaggagacttctaatcagttcctcaaagcctccaagttgtaatttcaaaaactacaacagagtttctagttggaatattttttatttttaaaactgactaacagataaaactgtgtttctcatgtacaacatgatgttttgaagtacatatacattgtggaatgaccaaatctagctacttaatatatgcactacctcacatagttataatttgtttagtgagaacactttacgtccactctctagcaattttcaaaaatacaatatagtcgaccctttaacaacacagggattaggaagcaccaacccccaacacaggtcaaaaattggaaacagtttttactccccaaaactttaactgttattcaccagactccttactggtaacagtgggattaatatattttttatgttatgtgttacata

SEQ ID NO: 268407 - DNA, 865 bp, Homo Sapiens
gagagctcaaggaagaggtgtcttaaatcacatcttcttctaccggaattgggaaagaggttgggaaaggaatgcagtaaagttccatgagaccaatagtttgaattagccgggaagcaggaggaataatccaaaccggacgttaaatacagggatctcttctccgttgtggccctggcttagtgtcccttactggcttagcgttctgtttcaccgtttcccagtttattgccctcaaaatctttagaatagttaaattggcttgtttaaggttcttgctgccccacaacacacctggcccatgcacaagaatggaattttttcctaccattatggctttgtgcttgttcttcctcttacctgtaatatcctcaccttccctagttctttgcattcgtccttagaatactgtattgttacagctgaaagacagtaaagaccatttagtcctcaccttctgttttagagttgagcaaactgaagccccacagaggtggaacttaattacctaagagccacaataagccactggtatctgggggactagaacacaaatccaacgcttttcccacctctttggatgttttccccaattatcctccttcactccctgtcatagttaccgatggtgtcccgttgtgtgggtttactctgtgctaagttgtcttacacttctcaaatgctactcagtatatagccttaagtcttactgttttgtgcggtgtgtctccagctgattttaacttttttgatggtagaaattttatctcttcttccttttgtatcctccattgtatcttcatacaaaggacagtacacacttgggtaattaaaaataaaagttgattgaccataatttaaaaaa

SEQ ID NO: 268408 - DNA, 392 bp, Homo Sapiens
cctcccttactgagccctgtcacctgtttgggcttttatgccatactgtgatttgggaggctgctgcctcaacatcctagccccatttcccagagtgtcccattattctaggacatggctgtcatgggagtctgcacaaggcaactaatgctctagatttaactgccttttttaaatcagtagatcattaattgtttcagttacataggagccataggcagtaatagaaacatcacaagtattgtttccaaaaatatacccaagtagagataagaccactaagatgttccctttattacccttcagcatttaatgatacccagcttgtagcttccaaggtgatagagtgtgctgtgtacatacaaggcatagtaaacgtgtatttaaaacta

SEQ ID NO: 268409 - DNA, 470 bp, Homo Sapiens
  misc_feature (13)..(13): n is a, c, g, or t
  misc_feature (24)..(24): n is a, c, g, or t
  misc_feature (51)..(51): n is a, c, g, or t
  misc_feature (69)..(69): n is a, c, g, or t
  misc_feature (191)..(191): n is a, c, g, or t
gaggctaccgganaccggttccanaaggaaggtcccgtaggcacctaaagncccccatcatccaacccngtttccctaggccaggcttttggacccatgccttaccgtatacccctacatatgttaggtcattcccccccaacatcatggtacatttaaaacatggtgcccattgttcattgctctttccngtaatacatgttttcttcttccatttttattccctcaagcatttattcctcaagcatttttattttccagtatatgtaaacaaaatactagagcccttctttccatagcagcaccaatcatattgtattataattagttgcctgctattaagactgcttatcattaatttttgtacaccccacttttcaatatacaaggggtactcaataaagatttgctagattcagttaaagaacatttttgacaacttaaaattccatcgaaataatttaaataat

SEQ ID NO: 268410 - DNA, 355 bp, Homo Sapiens
  misc_feature (26)..(26): n is a, c, g, or t
  misc_feature (69)..(69): n is a, c, g, or t
cccaccgtgggggatttccccctganatgaggtgtgctttgacccagctgcatgtggcttgattgcatncctgtttctcttagttccactggatcttgttttcttttatttcgttatattacctgagctcagggtagttccgttcatctttagaaagagctcatctcttccatccttagaaggatctcatcagagaactcatatgtaatcaatcaggtaaaagaaatactgatgtacttctgagagactggtgagaggtgggtcataggaagcccataggtctgaggaccgagtcagtgtcttggggatggggctgttccatatgattatttttgtgtggcataaaagatgtaat

SEQ ID NO: 268411 - DNA, 512 bp, Homo Sapiens
ggactgtgtggctcctgtcccaactggcctccccattccacattcccattgctggaccagcaccaggactgggcacagggcttccttttgctgattcatttcccccctaactcattcagagttgagcccccatcctgagtcccccacatgctggcccctgaaacggttacaaaggctgaaaccagggatggcaggcccaggatcagtgctgtggctgttggagtgtcctctcccaacagcatgacagccggcctcccaggtgctcccagcatctgttgcagtcatggccactcacggcaacctctgaagaaggaattatagaaccaactttttattgttgaaaatggagtcttgtagagttcagtgatgggaaactaaagtagaaaaagcacatcacaaagaaacatatatagtacagtgtgatcccaattttgtaaaaatatctgtaatatgtaagcataggtatttgtatatcttaagaaaaaaagcctagaaataaagccacaaaaata

SEQ ID NO: 268412 - DNA, 351 bp, Homo Sapiens
  misc_feature (72)..(72): n is a, c, g, or t
  misc_feature (113)..(113): n is a, c, g, or t
  misc_feature (118)..(118): n is a, c, g, or t
atgtccccattgtaaagggtgaactttaatcagaagtggaccatttggaattttagaaaatgaatggcaaanagcctttgatttttggaaaatgcctagctttcttgcataanagtcnctggaaaatttgagaaggctctgaagcttccagtatatagtctctttctctcatcctcaaaatggtactaagctgcactcaattatggatgtgggaatattcccctggtctttgggtttataggttttttatactgatgtcttatttttctctaaagtaatatgggtgcacattgaccagctaagactgtcttagcaaggaatagttctaaaacactttgaaagaggcatttg

SEQ ID NO: 268413 - DNA, 359 bp, Homo Sapiens
aaaaacgtttaggaagtaaaatggatggaacttgatgatagattcaatataatgcatgagagaaagggagagagtcatgttgaggatgactcaacggtttccagcttcatagctttatggataatgataccgttgctgagcaaaggaacactggaaaagaaccatattctacatatccaccaatttcattatttcgtacatagcattaatatatctcccttgtattatagttatttataggcatataggtttctgatatcaaggcttttcagaggtttgcaaagtaaggcccacgggtcaaattaagacctgtttggcccatagctaagaattgtctttacatttttaaggttgttaaa

SEQ ID NO: 268414 - DNA, 566 bp, Homo Sapiens
  misc_feature (16)..(16): n is a, c, g, or t
cccagaaggcagaacnagggaaaaacctcaaaagaaaggaatggggaggaaatggaaaaccgtaacaggacatgttccccctcagtgagtccccccaaggccttgggagtcccttagcccccaaaatgtggttcctgtggaggcctgagggacaaaacttcaggaccagagcatgcccttaatcgatgtgcctaaagccactggctcgggcagtcccttaaagcaagggctccctctgattcagacaaggaattgtttcccttccccttttactcccagatggacccctaaaggtgcaaaagaaaaccatctctgcacactaccaaacagacagtgcgtgaacgaagcagaccctcctgaccacagccaaggactggagagcttggtgaaactggtgctcaaggtagaaattccctgcgattgctactgcaacttatactaaacgtcccaagtgaagtgaagggagaaaaaagagatattaagcaagaaggcccacttgtttatgcattgctttagaagataatctgtaattgcatattaataagtaaagttaatgttacacttaa

SEQ ID NO: 268415 - DNA, 416 bp, Homo Sapiens
  misc_feature (95)..(95): n is a, c, g, or t
  misc_feature (113)..(113): n is a, c, g, or t
  misc_feature (184)..(184): n is a, c, g, or t
acaaaaccctcccactggtgactggggggccccactgtgcccaaataaatggaactggttaaaactttccctggtccccctgcccagttgtgtangaatagagtaaaaactgnccccaacacagaaccttggcctgggccagctacctactaaccccacgacatgaaagctttattgacagtcnggaaggcagcccatttgccctaccaaaccttcatagaaaaagtaaacataaggaaacctaccaaacatttcaaacattcctaagtgtcagccctattaactttgatgttcgtttggttattactacaaatccccacgtttatttcttttcaagagaaagttgttcgaaatgtgaacgttttccatctttacctgactggccaggagtaatcttataaaaatttgaaatttaa

SEQ ID NO: 268416 - DNA, 490 bp, Homo Sapiens
  misc_feature (37)..(37): n is a, c, g, or t
  misc_feature (67)..(67): n is a, c, g, or t
  misc_feature (87)..(87): n is a, c, g, or t
  misc_feature (164)..(165): n is a, c, g, or t
  misc_feature (416)..(428): n is a, c, g, or t
agacccctgtgtttgagagatgacttaataaccctgngttttgagaggtcgctcctaaaccagtganttttccctcccctgctttantccctttcccctcactgaaactggcttctcccggctagagtaaatgtcttttagcacagcactgtctttctggggannctgctgtcctgcaggcaagtccattaaactctttcttgctttagggactctgaaaacagcaagaaacaaacaaacaaaggtcaagctctaagaaaattactgctcaaacttcactaccctggaagccttacttacagtagcacagaaatgttagcatatttatttaaatagtcctgcagcagagaccctgcgattgtaaagtgatttaagtatttctgggtagtgtttgtgatttacggatttgttactgnnnnnnnnnnnnntcactactgtgaatttactactatgtaaccttgtggtcgtatttcattataaataaaataag

SEQ ID NO: 268417 - DNA, 400 bp, Homo Sapiens
  misc_feature (35)..(35): n is a, c, g, or t
ggccacccttaagccccgggacacctgttggaggnccggatgggatctgcctagcctgggctggagtccttgctttgctgctgctgagctgccgggcaacctcagatgaccgacttttccctttgagcctcagtttctctagctgagaaatggagatgtactactctctcctttacctttacctttaccacagtgcagggctgactgaactgtcactgtgagatattttttattgtttaattagaaaagaattgttgttgggctgggcgcagtggatcgcacctgtaatcccagtcactgggtagccgacgtgggagggtagcttgaggccaggagctcgaaaccagtccgggccacacagcaagaccccatctctaaaaaattaatataaatataaaat

SEQ ID NO: 268418 - DNA, 445 bp, Homo Sapiens
  misc_feature (33)..(33): n is a, c, g, or t
  misc_feature (41)..(41): n is a, c, g, or t
  misc_feature (47)..(47): n is a, c, g, or t
aggccctttccctgagcaccctaggttattgtntgggggtnaagggnaggtggtggttaattttggatggtgactggaggcaagacctgagactgagccttgcctaaggtggctgcacagagaggaagacaagaagacagcagtggtgtcatgagaaggtctggtctcttggatcttagcaaactcagaagtgttttgtagcaaggctgcttggtataagtccaagaatggtggctacctggaggaatgggatagggtgtgttcttttcaaaggtattcagaagtcaaaattattttagatctgtgcttggtctcacaagacatggtgaattaggcccaactacttccatttagagccctgccttagactccctaaaggccctgcagctctgatctttcatgatttggtagtaatttaaaactcaaaccaaaagctaaaatcata

SEQ ID NO: 268419 - DNA, 426 bp, Homo Sapiens
tggccccacacaagcttgtggcaggggaagctggaattctctagagatactttctccaagcccttcaaagggctttcttgaagtcattttctatttagtttgttcctaaagacactgccccaggcctcttcattttcagtgagaccaaaagaggcagtatcagttcccctgcttctcctgcgcaggcccagggaagacccccttcctgcctgagcgtggaggagggagcgttgaccacggggccagcctcctgccagttaggcctggactggagctgctggggcccaggggctgcttcactccctgccttcccgctcctggcctggcttccatctgtccatttgtgtttcacatcattttgccaaatgtaaatctgtctgtctggtttgtttattttctaaactcatgtatgttctctagaaaaaa

SEQ ID NO: 268420 - DNA, 461 bp, Homo Sapiens
  misc_feature (20)..(20): n is a, c, g, or t
  misc_feature (33)..(33): n is a, c, g, or t
  misc_feature (49)..(49): n is a, c, g, or t
  misc_feature (84)..(84): n is a, c, g, or t
  misc_feature (96)..(110): n is a, c, g, or t
tagcccctggctactcgggnggccgaggtgggnggacccccgagccacnggggggtcctaccccgggcaacagagtgagacccngtcctcaaggcnnnnnnnnnnnnnnngaaagaaagtccccatggggcaatacctagaaaataccccttaggttatattcctagaactttttcctaatgaaccctaattggattaatccatgatctctgccttcatgaaacatcatcattggtttatgctgacactcttttatttgatttgatcatttctaaagaagttgcaatgagcaatcataaatccaatctgttactccactaatagaacactgacgtcatctttcatctctttgtgtgctccttggtcagagtaaatagcccagatttctatttatgggcaaacgtgtaaataaactatgttcatgtacaaaatgaaatacaaaacagctggtaaaggaagtg

SEQ ID NO: 268421 - DNA, 120 bp, Homo Sapiens
gtcattgttgtccccattgaaacaaacagggctaaaaagtcatctgttcattaggagaactcaagttgctgtgacttttctcatccaaaagactcatttgtgtggatgcgtgaccatggg

SEQ ID NO: 268422 - DNA, 448 bp, Homo Sapiens
  misc_feature (38)..(38): n is a, c, g, or t
  misc_feature (54)..(54): n is a, c, g, or t
  misc_feature (65)..(65): n is a, c, g, or t
  misc_feature (129)..(181): n is a, c, g, or t
  misc_feature (198)..(198): n is a, c, g, or t
tgctctgtcaccccgggctggccatgcagtggccacgnatcctcggcctcaccngcaaccctccnaccctcccccggttccgagtgccttctccctgccctcagccctccccgagtagcctgggattannnnnnnnnnnnnnnnnnnnnnnnnnnnnnnnnnnnnnnnnnnnnnnnnnnnncgaggacccagcatatntcttatgattaatttggacatctgtattaactcaaagtaatatttaaaacatagatcctaatttttaagacttgaaatgtttgtaaaactttaaccaaggagaattttctgcatttagcagtagacattgattttggagtatttatattattcaaaactgctgaccttatgtcttttgtaaaacttgagcaatgaaagtcttaagagagaaggtttaaaggaaactctttgataaattaaaagttgggga

SEQ ID NO: 268423 - DNA, 403 bp, Homo Sapiens
  misc_feature (29)..(29): n is a, c, g, or t
  misc_feature (115)..(115): n is a, c, g, or t
cctgccctgccctccctcccctatgcagnagccacgtcacatgatccccgttcccttggatggcctataaggtggtcttcctctagtagctgggccctgtcccttcccatctganaaactcttgctcagcccacgtggcccagtttaaatgtgctctgtgcattccatcatctagtgcttaccacatgatcataaatcccactggtgtatgtgtgtgtctttcccaagttggagtgggagtgcctttgacatgggactgtgtctttccctttcggcatcttgtatcttccccagcatctctggctctccaaagcccccagtaaatgtttgagtaagtgaaacatgcagaagacatgaagattgttaagtaacaaatactcagcagaaagggctgttaatttta

SEQ ID NO: 268424 - DNA, 527 bp, Homo Sapiens
gacattcatgcttccataacacactttatcaacctacttaataattctgtgtgtcatgtgtcatggtaagtcacagagatagaatctgtatccatgggatatgtatagacttattggtagcaaagtatgtaataaagggttggttcaattatttgagtctttttcttacccatgtctcttctctgagacaggaaagaaatagtcaatacaacctaagtgttccctcactctcctgtgagtgtgactgatatatccatgtgtcttttgtacgttcaatgaattccctgcaggttgtctgggatatctttgtttaattctggagcacatgaagggaacatcaaagtgccatggaagtaaatctaggcccaatctgggtggatgatttcctgtgagttcctctaccagtggaggctgatccaggatattgtgacaacacagtaccctttctagaagaaatttctaccttatcattgataatgaagcctgtatcactctcattttcaaatataaccataaaaaaagttaaa

SEQ ID NO: 268425 - DNA, 315 bp, Homo Sapiens
tgagccacaacaatgttttaaactgtgcgccattctgagtagcctgatgaaatctcacctgaccgggtagtgaatctcccctccgtctaatgtattcacctgtataaactaccagccatttgtcacttagtagccatctcagttatcagattgtcagactgactatggggcagggcaatgcttgagttttaagtaacccttattttacttaatgacagtccctaagtccaaaagtagcaatgacagctatttggatatgccaaagagaagctgtaaattgcttgaaggtgaaagttcttgacttaataagggatg

SEQ ID NO: 268426 - DNA, 312 bp, Homo Sapiens
caaataaggaaagtgagttctagagtgatgaatttagtttacaaataaggaaggtgagtcctagagtgattaatttgctcaaaaatgcacagagaaaacattaggattagaacccagatcaattgaacctagtccagtcctctttctaccttggcatgttgctgtgggaagaacacatggacagtagtccaggttcatacctctgtaaatggggagacagcctagcctagcgttttaagatcacacactctgaaatcacctgggctgcacctccagggatatgtgacttgcaacaaattattaagtcctcga

SEQ ID NO: 268427 - DNA, 500 bp, Homo Sapiens
  misc_feature (16)..(16): n is a, c, g, or t
  misc_feature (30)..(30): n is a, c, g, or t
  misc_feature (38)..(38): n is a, c, g, or t
  misc_feature (46)..(46): n is a, c, g, or t
ttcccactgaccccanaggctcagcccccnggaccctnactagaanaggtctcccactatgcatgggaactcacaaaaaccttctccttcaacttggcttctgctgatatcccagcccactccccccacttctcatcttaaacacagatggcagctccttccccatcgttcccaaaacagggggattgtcccagcccaaattctctgcagacacccaaagcttcacccgtcctcttcagggaggtgatgcaagggcatctgatttctttggaagcccaattctggcctctctttggggtgggctgagagtgggaaccagactctcttttccaaatgtcatgtttatcttgttcatcattatattatctccaatgcctggcccatagtaggcactacagactgacacatagtaggtgctattagtgtctgtataatgggactcttgaggttgaagctattagcagaaacctgccaagcaaaaggatggaaaaccaaccacc

SEQ ID NO: 268428 - DNA, 392 bp, Homo Sapiens
  misc_feature (283)..(283): n is a, c, g, or t
  misc_feature (381)..(381): n is a, c, g, or t
acgccccggagagagtgtttaggaaagcaacaggagggagaccccgcgacggaagagttgctcagagctctgcagacacaaagatgaaaagcttggccacaaaggagctgacggtgccgtggcgagagagatccatcttgacggtcaggagcaagtccctgggctcggggacaggcttggtgagggccaccaccccactttgggggctcaccttccgggtggtgaaaaagccctcctcattgccgccggtgatggccagcttgcatgctgtccccggggacanaactgggaggggcccatgcggaaaaccacccgcgggcgcttgggatgtttggtgggggaaagaaaagtggtagtaggttatttttcagaggcagtttnggagcattccc

SEQ ID NO: 268429 - DNA, 528 bp, Homo Sapiens
ttttttacaaaataatattttaataacataggaacatgaacatgaaaacaatgtaaacaggttagaatttttgatatgatactacaaacgtgattttgatcgtacgcaactggtaaaattctatgcaaaaggattaacaagacatatcataggaaatcactttgcccaatataagcagttctcagcacatactcaaatgcacacaaacatgaaaatcggaaataaaggaatgttaaaaaaataacttaggcagacacaaataaaaccaccccactagtgtatgaatgatgcatgtttttatgatcttaattacatttaaggatttaaaaaatgccactgatctcacagtttacaatatccaaatcttcaaacctgctggaagaagtccacagcacagcctggaaattgcatccgttgcattctctcgtgcagttaccttctgccttgatatgtagtcagttcttcctgaaggatggaagctctcttttgcagaaaattaacctgtgattttagggaggaaatggtgtc

SEQ ID NO: 268430 - DNA, 382 bp, Homo Sapiens
  misc_feature (21)..(21): n is a, c, g, or t
  misc_feature (37)..(37): n is a, c, g, or t
  misc_feature (42)..(42): n is a, c, g, or t
  misc_feature (57)..(57): n is a, c, g, or t
  misc_feature (88)..(88): n is a, c, g, or t
gaaagccaaacgggaaaaggntgccgggtattccaanttccncaaccattttgccanaaatgtattaaaattttgaagtagtaatagntcctaaacctgcaggaaggcatcattgtatacctgtggtatgtagagaatactactcttacactgctctttatcttaaaatgttttggtatactgtgaatattttcctctaagtatttggtgtattttgacagttattaaaggagaatataaaattaaagattctggtctaaactaagaataatggaaagttgcttcgtcctgccttagaggagttttcagttcatcctcttcttgagaaactatgtgttgctgttactaaataaacatttactcaataaacgttttattacct

SEQ ID NO: 268431 - DNA, 554 bp, Homo Sapiens
  misc_feature (266)..(266): n is a, c, g, or t
cagtacgatagaggggagggcactgggaatttatacctcccaggaaaaataaatcatggtaaacaggcagagatctttccagattccagttcttgggggtaaaaggtccccaagatgcccagtttgtgacaacctgttttgaactattcagctcaaggtttccattttttctcccaggggagttgcctcgattctgatgtgtttgcttcggtgctctgtgtattgtattcatcccactcttcaattcccaaaatttttaaaaaaanaccttctgggagattcttcaattcactgggcaaaccatatgcctaagtctatcctctgatggaggctcgtacatgcaaaatccaatagcaacctgggaagatttcagtcaagacccaagaggaggctggcatcaggctctcggtcaccgatcttcacattcaggtttcctgatgcactttgcgactctttgggcaacctctggactccttgttcccagggtccacatttagttttatctttactgcattgcttttatgaaaaagaataaaattggatgaaacagatac

SEQ ID NO: 268432 - DNA, 417 bp, Homo Sapiens
  misc_feature (282)..(292): n is a, c, g, or t
accttactttcagagggaaagcttaagctgtttaaggactaaatatacatatcagagaaagtaagagataaggatactttaagtgttccccaagtgtttccagcactgttcattaaggcaaaatagaacatacgaacatacacacaccactgaaaaatctaatcctacaaatagatgacacagatatctatcaagggtcagcaaactatggccccacacttcagctatttattaatagctagaaagctaagaatgatttttacatttgtaaaagattgtttnnnnnnnnnnnagaacatatgacaagaacatatgactgcactcaaagcctaaacaatttaataacttgctctttccagaaaagtctgtcaacccttgattatgagttcattttgaaaagtgtctaggccaagcatg

SEQ ID NO: 268433 - DNA, 424 bp, Homo Sapiens
gctttagacctttatcctattgtttattgaggaaaaggaatgggagcaaatgcctgctatgtgaaaaaaacatacaccttagcctatgttttggcaaccctttttggggctagcaataatgatatttaaagcaataattttttgtatgtcatactcccacaatttacatgtatattacagctatcaaacacataaacatcaagatatttgaaggaccctaattgtctttccttgacaagttgattttgcaattgtggtaaatagcaaataacaatcttgtattctaacataatctgcagttgtctgtatgtgttttaactattacagtgcatgttagggagaaattccctgaatttctttagttttgtattcaaacaattatgccactcgatgcaacaaacataataaatacataaaagattta

SEQ ID NO: 268434 - DNA, 404 bp, Homo Sapiens
  misc_feature (42)..(42): n is a, c, g, or t
  misc_feature (48)..(48): n is a, c, g, or t
  misc_feature (64)..(64): n is a, c, g, or t
  misc_feature (84)..(84): n is a, c, g, or t
  misc_feature (174)..(174): n is a, c, g, or t
  misc_feature (197)..(197): n is a, c, g, or t
gagagaccaggggccacatgagccgggactgaaagtatttgncctggncccacctctgtccccnggcagaaatgttagaacctnccaaaggcccggcatgactgaagccctacgaaactaactgtgtgctgttgaggggcaggaaggaattaacaatgggaagagattttattncccttctgaaattttttgttttnccttgaaccttgacatttctgaatgtttcaaatatgataatttcatgagtacatcaagctgctcataatacattttcaacttttatattctgaaaataacctattacttttataagagcacttaagatgtaaatagtaaatttttttgctgttttctcctcttgctcagctttttatcccatcctttcttccttctcctcctcaaaa

SEQ ID NO: 268435 - DNA, 448 bp, Homo Sapiens
actcctcctgccccaaacctcgccagagaagctcttcaaccagagggtataggtcagagggatataagagccagcatccatccctgggttctcagtaggaatgctggtgctgtctaaagacctggcattaatggaggcggaggagcagccttacgggagggatggagggaggcaggctggggagaagagaacattagactcagggaatatttaattctggttttagcattattagaataagactttatacattaactaaagtggagctttaatcactataaaaagcaaaagtatctatagacacagacacttgcctatacagagacataaccacacacactcagaggatagtgaacaaatctgtctttgacttacgacccattttgcaagacttaaagccggaagaacacattttcagattgttaaataaagtctgattctgactaaa

SEQ ID NO: 268436 - DNA, 444 bp, Homo Sapiens
gatgcaagccaataatgggaatctagaaaactgccactaaggagttaagtaaaacagggaataatttactttatcaatgatccaaaccagcccctgaatcatcagatgatatagaccaagttgattcttagatttctatcgattcagttaacaacatacacatattacgttgctccataacaaagtatgacacaaaaacagtaaggaattagctcaactaatacttaactacagaaggcttccaaaacgtacaaaataacacaaacaagtgtgaatgtcagcataatagatactgttgaaagacttatttgagtatctcttcctgtggctagaaaacacatctggaaaaacacacaattacaatacaaacacaatccaataaaagtccaacccctctctactgtgcagggaaaggaggggctcaaggtcatagaaggagctatg

SEQ ID NO: 268437 - DNA, 388 bp, Homo Sapiens
  misc_feature (20)..(20): n is a, c, g, or t
  misc_feature (131)..(131): n is a, c, g, or t
ttaccgtaacccaggggccnatcctgaagttaaaacactcatcctcttctccctaggtggagtttaccgtaagatagctcttatcctgaagatttggaaactaaactgcttgaggctggtatttcggtatnttatatatcagctacaaaagtgcttaataatttgaaaaaatagaagatgtttggaacataaggtaataagaaagtaggttgaaaactatcttttggtggcaacatcttccagttgaagtgatcctttttctactctggttcccttacaccacatatccaactgtcaggatactctgttggctttacctactactttttcctgtgttcacctctcatcctaatccaagccaccatccttcatctagatttctgcagta

SEQ ID NO: 268438 - DNA, 470 bp, Homo Sapiens
  misc_feature (349)..(349): n is a, c, g, or t
  misc_feature (358)..(358): n is a, c, g, or t
  misc_feature (373)..(373): n is a, c, g, or t
  misc_feature (401)..(401): n is a, c, g, or t
  misc_feature (422)..(422): n is a, c, g, or t
  misc_feature (431)..(431): n is a, c, g, or t
  misc_feature (443)..(443): n is a, c, g, or t
gcaagaaccttaaaatagtacaattctattttcccctcctgacctttgtactattttgccttacattttacttctatatattttataaaccacatagtacagtggtccccaacctttttggcatcaaggaccagttttgtggaaggcagtttttccacagaccattgtggggtggacggttttgagatgaaactgttccatctcagatcgtcaagcattagattctcataaggagtgcacaacctggatcccttgcatgtgcagttcacaataccatttgtgctcctatgagaatctggatgcctgctgctcctgatctgacaggaggcagagttcaggcagtaattgnttcgattgnccaccatttcacctncagtactgatctgcagcctggggttttnggggacccttggccatagtancattatccnttatatttgttngttttcttttcaaggagtcagtttttt

SEQ ID NO: 268439 - DNA, 504 bp, Homo Sapiens
  misc_feature (103)..(132): n is a, c, g, or t
  misc_feature (190)..(190): n is a, c, g, or t
  misc_feature (222)..(222): n is a, c, g, or t
  misc_feature (274)..(274): n is a, c, g, or t
  misc_feature (401)..(401): n is a, c, g, or t
  misc_feature (430)..(430): n is a, c, g, or t
  misc_feature (443)..(443): n is a, c, g, or t
  misc_feature (457)..(457): n is a, c, g, or t
  misc_feature (470)..(470): n is a, c, g, or t
gggaggctgtcttgaaagagcagttataaacagctggcattcgctccaacatcccaaagctgctttcactgcaatgctatccagttcataaatgtttctcttnnnnnnnnnnnnnnnnnnnnnnnnnnnnnnctacacctctaaattaacaaaaatcaaagaaattataacttaaaaatggggtttgccnatcccatctcaatggaagcaggacacatccgnccaatgacaccgtacctgcctaccataaggcctcagacaggacacaagggtncctagttccctcccctggccatgtgcaaacagttttacagaagaaccccatccactggggaaggagcagatgaggtgtcttggtattaattggctaacatttcatacttccaggatagggcacttcncgggtgagaccagaaggacatgggaagcnagggtcacaagcnaggtcttcccgtcntcaatgtgtggcnacaccctgtccggcatatttggtttttcagaaac

SEQ ID NO: 268440 - DNA, 670 bp, Homo Sapiens
  misc_feature (21)..(21): n is a, c, g, or t
  misc_feature (73)..(73): n is a, c, g, or t
  misc_feature (653)..(653): n is a, c, g, or t
accctaacatgtctgaacaanaaaaacctgctgggctctggggtcccacatgtcaaactcctaacattggagnaggcaaaaacacaatctaacaggcactgtctgaaactttcccctggccccagggagatttctccactgcacacagcacaatgtcctatacatgtgtccctggtgaaccaaagggaacgggagaaggaccacgggtcaggatcctgtcaccaccagcctgagcagacagtccccatctttgtgatcccaggtgaccaaataatcagtccctggtccccacaatgacctcaccagatggctttggggagctcttcaccctaaagattcggtctggtttgctaatgacttatctattatctgaagtctgtggaggaaggaccaagaaggggtgcagttagagggatgagcaaccaaagaccaatgggagggaaggcaggcaagaacctcagacccggccccacgccctctaggaaccaaagtctagtggagaggaggcgagtggggaggaaggaagtgtccctcaaggcctgagagagacccacagcaccagatgctgcattttacaaaaccacttaggtgctgcccaaatggtgagaaataaaaggaagcattctggcctttcaggtttttcaaactcacangatgttgaaatacaagt

SEQ ID NO: 268441 - DNA, 439 bp, Homo Sapiens
  misc_feature (77)..(77): n is a, c, g, or t
  misc_feature (328)..(328): n is a, c, g, or t
gaaggagagatagcaggtgtggaccagctgtcttcagggcaggcatttgaacaccttggagttcacagagactctgncagtggtgtgtgggcagtttccagatcctcaactccccatgtgtcattctctggattttagttggccgaaaacatacctgtgagatcatctttcccctccctttttatgggttgcactttgcccactctaactcctgttcatccttcagctctcaggtgttccttagggaaactttacaagatcccaagactacgtcagggatctcctaattactctcttacagtattgtggatattttctttatgacacnttttacatatgaattatacagttacttaaaaagtattttcattcatttgacaaatatttgagtactatcattgtactgtgtattgttctgggtgctgatatacatcagaga

SEQ ID NO: 268442 - DNA, 495 bp, Homo Sapiens
cttccaaacttgggtgatctgcctgccttggctctcaaaatacaggtgtgagccaccgcacccagccaggtttattcttttttgaaagtacagtactctgttaaaattcctgtgtaaactgggacttttcttttcactttcctgtgtttcaagaacagtaggtgttccagggcttttgtcctgctgggtacaagcaagtaggattttgaagaaggtgtgaggaggaggtccagaaaaattggtggaaataggaaagagaaagaaatatggcccccgattttggggagagaaagtcctggggaaagagcaaaggcaattaaagaggattttgaggaagagacttctgtaaaatatgtcttagcaacactttttgggagttgaaaatatttctttttagtgtgttattttttctaagaggtgcctcaagatggataatggaagatttggagtacgattgggttgacaatcccaaggagattcggtgacatccagatt

SEQ ID NO: 268443 - DNA, 106 bp, Homo Sapiens
aaaatagggtcttgctatgttgcccaggctggtcttaactgactgctttttattattaccatgcactggcaattccaaacaatgtcagtgttaaaatgcttctccc

SEQ ID NO: 268444 - DNA, 389 bp, Homo Sapiens
  misc_feature (161)..(161): n is a, c, g, or t
  misc_feature (273)..(273): n is a, c, g, or t
  misc_feature (327)..(327): n is a, c, g, or t
  misc_feature (339)..(339): n is a, c, g, or t
atctaagaaatcatgtgaatcatgtataatatttcctcacaagaaaaattttaagctggcttttgaacgtttcacataattgtaaaactttttaatttttaaaaggaagaaaaacacaatgaaacgaccaccgtattatatgcttcctgttttcccttgtncctagggaaaaggctgagaaatactagtaaatttcctaattatgattcgtgaggctaagtactatactctttaataaatctgctaaaaagatacagggaaatggggtgggancaatgttttctttgttaaaaatatttaaaaaaaggctaaaatctaggtggatanccatggttaaantaatacacattttttgtagggtgtcaccctttctaacggtttctctacac

SEQ ID NO: 268445 - DNA, 540 bp, Homo Sapiens
  misc_feature (19)..(19): n is a, c, g, or t
  misc_feature (27)..(27): n is a, c, g, or t
  misc_feature (35)..(35): n is a, c, g, or t
  misc_feature (52)..(52): n is a, c, g, or t
  misc_feature (87)..(87): n is a, c, g, or t
  misc_feature (103)..(103): n is a, c, g, or t
  misc_feature (110)..(110): n is a, c, g, or t
  misc_feature (173)..(173): n is a, c, g, or t
  misc_feature (203)..(203): n is a, c, g, or t
ggaggtggaaggcctgggncccccccngccggggncccaggggagggaccgnccagacccccaaaggaacccctggagccagcaacnggaatcccccagtgcnccggccngagaccatcaaattaagccattttggagccataaggggcaatttggaaataaaaaattcctgnggattggtttggaagaattcctcctagggnggaattagggaaagtatgggtagaattatccttaccctgtgtggaaggaaaatgtcttttaaataatgggcagaggccttagggtgagcattctgattgtgttgtctcatctggcacctgcaatacctgccagagttttagcttcctaaattactctggggcattagagaagatccttctgtccagagatattgtacttctttgaagaatactttgaatgagatttgagtttctatatagctttgacatttgccaaaaaggttacagtatccacagacacccaaatgttgtccctatatatgagtgtgcgtgttttcacggcagcgtagatcaaatt

SEQ ID NO: 268446 - DNA, 530 bp, Homo Sapiens
atggtgaagagcgctcgcccggtagcagaaccgaacccgggcttctggtctcagctccagaagtatgaggaggccctccaggcccagtcctgcctgcagggagagcccccagccttagggttgggccctgaggcttgaagcttgaaggcttgctgcctggaggaaggatgtccctgcactgatacagaagctgtttctggcaaagcctgccgtgtcttacatttgtctctctatccggattagatgttgctatatgaacacatcgggactgtgtctgcaggaaggagctccccattcgaggccttcacagtgtcacccacattcacctctttccacttaaacgtgtcccatgaatcttgtcataacagttttgtgttccttaactattttgtctgccatgtcatttatgatgtatataacctctttaatgcctgaaatcataagaataatcatcaaaggcaagagggttgtatattttcccgttggagacacatctggaatttgctgcaataaaataataataagaaagc

SEQ ID NO: 268447 - DNA, 360 bp, Homo Sapiens
  misc_feature (292)..(292): n is a, c, g, or t
  misc_feature (344)..(344): n is a, c, g, or t
aaaaacattctagttaagacgagataattcaatgttcaagctaataattctataccattttaagagtctgaatttacttttaagtaaaaaaaggcagagaaaaagagtgaaggatacaggaattatcttggattatggcactgctggttactattcccatggctaaagaccccttttgtttcaataaaactatccaatatttactgagaatgacagctctgaatcaaaggcaagagaaagagacctgtaaatagtgctgttcatactagttgcccccagtaggttcccgggnctcacttccaggctgccttaggtaatttttactttctgaatataaggccacngtggggggggtcaggc

SEQ ID NO: 268448 - DNA, 370 bp, Homo Sapiens
  misc_feature (280)..(308): n is a, c, g, or t
  misc_feature (333)..(333): n is a, c, g, or t
  misc_feature (349)..(349): n is a, c, g, or t
tttttcatttaagaaatttaattgatcacagtaagacattcaggctacaaaaaccttctatacagtggtttaaaaagtgacacccatctcccagaagccactcatacatacaacggggacatcattctcccaaaaagcgttgcacacagtccagttcgtgcaaataatctttgtacataaagaagaggcatttcagaggcaataaccccctacacagggccccgagaatagtcactgaacaaatacagcaaccagggtttgcaaaaataaataggatttnnnnnnnnnnnnnnnnnnnnnnnnnnnnngtggataacaggtttccaaccattntacaaggtggcaaacnttaaccaaaaattccccactt

SEQ ID NO: 268449 - DNA, 411 bp, Homo Sapiens
  misc_feature (388)..(388): n is a, c, g, or t
aataaatgtttaatattaatcattcccaaactgacaagaacacaaaaataaaatgcaaatacagagccagctttgtcacccaaatctgtgtctatttctgatagtccatggaatgtggttttcttggaagccagggttggtctccccacagaccccagggctaaggtcaccagttaggaacccagggacttggaaggcagagctgttggagctcttccatcagggatctgactccgcaaaacgacttgatgaatgcaattgggcaaactcccatgttcggacttcatatgcatgagccgttgggacagaggggtttcttaggtatatactttaatgcatgtttatgtggcaatcttgttagtggggggatacaaggttttggagggancttccccatttcaaaggggcggt

SEQ ID NO: 268450 - DNA, 456 bp, Homo Sapiens
gagaaataagggtcaggactcaaagcagtggacataatcaggacagaacaggcccgaagtgcagacacaaaaacagatcaataaaaccccaacagctcagcaaaggtgaggcagctgtgtctcccctctggctgcccttttctccccctccctctctcacccagaagccaaacgcgtacacgcctgagtggagaggccgcgaggacaagacagtgggacatgcgtgtgctggggaagtcgagaagcaggacaggaggcaggtctgagagatctggtttgtgtcttgtgccctggttctctctgcattccttctctgtctctttttcccttcctcatgccttttccttagctgatttccctaggacagaattattttctttttcggactgaatggtaaagaagtatttgtttcctaagtcttcatttcaaaagcaacaggatagaactctctaagac

SEQ ID NO: 268451 - DNA, 430 bp, Homo Sapiens
  misc_feature (72)..(72): n is a, c, g, or t
  misc_feature (112)..(112): n is a, c, g, or t
  misc_feature (147)..(147): n is a, c, g, or t
aaaatatgtcaaatgcacaattcaactgctatgacaaaggcccatgaccttgtgcctttaaaccatactttntagagtgtaaagcatcacaccgggcatttttggaatgaanattacaaagcctgaagaggcctactgtataaatanttcacgttataacgtggtaacaaaaatagctccatagcatatttgggaggcaatggggcagagaaggaagtggaggttagtgctaatttaagaaggcctatagaatgtatgtgaaggtagctaaggaactagttagtgtattttaaaatccctattgcaagcctaacactgacctcgctagtaactcttaaggcaatcaagacggaacatgtgtttggcccccagatgcacgaatcctgccctcccctcaacctttgttcatcctaacagaccaacctggctc

SEQ ID NO: 268452 - DNA, 627 bp, Homo Sapiens
caacatttgaatcccctttacaacatccccatctggcaggtgtccagcatcagcatctctagggattagcagagttcttgacaatagaaaccagcttctcattgacaccaggatattgcagattgctatctctataccagtagttctcaaacttttgttcccaggagccctttattctcttaaaaattgttgaggaccccaaagagcttttgtttatgcaggatatgtcaatatttatttgttgtccttaaaaatacaacagtaaacccattacatgtcaatatagatatcatttttgatgaaaaataactatttaaaaattaatttaatggagagagtagccttgcaaatctccttaatgtctggcataataaagagaagactgcctggattctccatttctcattcaatctgttgtgacagaacaggtgatggagcctgtggaaagctcaagtgcacagacatgggaggtaaataacttctctgaattcagaagttttgatctcacagacctcccagaagggtctcaggactcccaggagtccccagactacattttgagaactgttgctctcttatacaccaagggatgggattggtgatgtaaattggcagggactgaaaata

SEQ ID NO: 268453 - DNA, 744 bp, Homo Sapiens
ttcaaatattcatgtttctaagaattgtgtccctctcaaggttccctctgggtgcctaacctggattagtaatgtgcaatcaggtgaattttcagctgaggctctgagaactggtactctcagtgtgttctggtcatcttgtggcttagttgtagaagcaggtgtgtctcttgcctctgcttgcctcctactgcacactcagcacccaggactggaatcaccgactactgaatctcctacatgtattgctgctacttcaagctcctccgacttgaaaccttatgattttcccaaggggagatgggacagtgtcatctaaatattccgaatgtttggccttctgagaaaagagcttctagtaattgaaccatgggaaacccagcttctggagggttgaccgtggggctgtgtacatgtgtgtgcccaggggtgagtgtttctcaggattcctaacgattcaaattaccgttgagtatatataaagaatgagtctctgtatggaagaacaaatgtgtgcattcacccccagtcacaatggtctccattgcatttcaaaggagaggatcagactatctgaatataaacacaatctgatgttaatttattctaagaacaccatcattttgattgtcctaaagaattctgcctttgtgaataccgtgttaaatttttttaaatttgtgacaggattgtagcaaattattatttaaggaaaataaattgtgtaaacatttaatgtggaaa

SEQ ID NO: 268454 - DNA, 298 bp, Homo Sapiens
  misc_feature (23)..(23): n is a, c, g, or t
  misc_feature (60)..(60): n is a, c, g, or t
actgtacaaaccacagaagtctngccaacaacacaaaaaagaatgaagactccacaccantcatctgacttttggaaaacattatgaaaacaatcacttgggcattcgtctctctctctacccagactcaagatccagcctagccctgctagaaagcaaacatctttctagtttaatgtcttctctaattgtgatatgcaggttaatacctaaaactatggctatgttcctcagacattctgcttgctattataaacaaaacatttatgccatgccacgtggcttcattttgactttt

SEQ ID NO: 268455 - DNA, 282 bp, Homo Sapiens
cccaaaattttaatacctgcctggatattgggtaaaaagactgcaaaaatgaaagtgatatataccttacacttggtccttgggtttcctgcagccatttaagaatgtgggtcaaagagaaagttttaaaataattaaataattttgtttgtctgagagtacattaaatagttaaattttacacaatttaatactgaaataactccattctaattatcttaagtaggctgtttagaagttcttaagttttcaacttaattattttccttttttttaaaaaaa

SEQ ID NO: 268456 - DNA, 540 bp, Homo Sapiens
  misc_feature (22)..(22): n is a, c, g, or t
  misc_feature (27)..(27): n is a, c, g, or t
  misc_feature (34)..(34): n is a, c, g, or t
  misc_feature (48)..(48): n is a, c, g, or t
  misc_feature (119)..(119): n is a, c, g, or t
gtccttgtgatgtctccttccnaaatngggttgnctgtgtgacccaanggaataaggcagaaatgatgcctacgtcacttcccaaggctggccttataaaagacactgtcaccctctgnccttgttctttcccaccttgggtcactctggggaaagcccagctgctatgccgcgaggacactcaagcgtcctatgaggagggccatgtggcagggaactgaggccgcctgcccacatccatgtgagtgaccgtctggaagcagacctccagccccagtcccgcctctggaggactgcagcctgcacctggaccaaagccttgtgagagaccctgatcctaaactacccatctcagccgcttctggattcctgacccacagaaactgtgtgaaatagtacatacttgctgttttaaacaaaatgtgggggtgactttttacaagcagacagataactgcaacatagtctcaaccttgaatttcattgcaaatgaccccatcctgaccataacctcaatattcgctaagtgggcagaataat

SEQ ID NO: 268457 - DNA, 975 bp, Homo Sapiens
  misc_feature (24)..(24): n is a, c, g, or t
  misc_feature (52)..(52): n is a, c, g, or t
  misc_feature (98)..(98): n is a, c, g, or t
  misc_feature (100)..(100): n is a, c, g, or t
  misc_feature (134)..(134): n is a, c, g, or t
  misc_feature (137)..(137): n is a, c, g, or t
  misc_feature (156)..(156): n is a, c, g, or t
  misc_feature (733)..(733): n is a, c, g, or t
gaaactctccctccctcgctgtgntccttcaacttggctcccacagtttgtncccaggcctgttctccagaagtgtgggagaactgcttaattctacntncctcttcagctgtctcatttaagggctgagaagnagncggtgtgggagtattagantggatgacactttcagtggaagagacgggggctttggttagagtagtatccgctacagtctcattctgaggcaaagataactttttccacaagtttccactgaatgatgctcatgtcttttccaccagttgatatcaggtgactgtcattgtgagtaaaactgacattggtgacatggctgctgtgggcactgtacttgtgactgggagcctttgctttggagcagggatactgaaacagatggactttaacaaaagtcatcggcaacagctatcacctttctattgtgggatcgcaccagtgcattgatatctgtcccatcagatccttctggccagacacctttgatatggaaacacagggatgcagaaaaattagctgaagaaatataactgtgatgctatatatgtttattttattttagaatctgtttagcttttatctatgttcaaactcttagctgttaacatttcctttacaaatttctcagtggctcacactgttcttcattcaaatcaagtcctgtccaaaatctaactaataaaaaaccaaaatagccccaaaatggaaaacttanagactcaatggtactcaatggtaaccagcaggtggtgctaataatttattttactttcagcttgacttacacctcagcaataagctcttcctttttaaagtttctggatggagggaatcagttacttgtatagacaaggttcaaaaacaaagccgtaacaccaagtcttcgaagtggagtctaggttttctttcaggcaagcacctccaagaaaacctcagagagattatttcttttagaaa

SEQ ID NO: 268458 - DNA, 287 bp, Homo Sapiens
  misc_feature (27)..(27): n is a, c, g, or t
  misc_feature (45)..(45): n is a, c, g, or t
aaaattataagggggaacccaagttgncccctggaaaagtgtggnaaaaatttaaaataacaagcaaatgaagactgaaactgtgtgtagtgtccctaaggccctaccctaaggaccctgaaatcgaatttaaatacaactctcagaaattactaatgtatagggaaataaaattcatgcttaatcaggcacaatttacctattaccttggaattacatacctagaaattttctacctacataggctgtttgaacaaataagtcaggccgggcgcagtggttcacac

SEQ ID NO: 268459 - DNA, 604 bp, Homo Sapiens
  misc_feature (29)..(29): n is a, c, g, or t
gccctgtccatcccccagctgaggccccnccccagatccagcccaacctgtccagcctgcctgtgtgtccagtgaaccccccagcccaagaccccagaagaccctgcccccagctgagcctcagcccaagatccagccaaaaccccctcagccttataacccttataaaccttacccaatttaggtgtggttgtgaccacagaattattgtattattgtatgcatggtgagtattgtatattacacatgggaatcatagaaacagtgaaaagccagtaatttctgagtatatattaaagttagggcaaattgtgtgaggtggagaagccacatactccaaatttctggcctgagacattggaagaatgaatatggatgatggaggtggatattgaatctgaaatgaatttttcattttgtgaaattttgtgaagtttcattttgtgttgaatatcttgtgactcaccggaaatgaaaatcataaaataaaatttgtcccttaatccctaaaattttataatgttgttctattctttaggaaaaaaaattctggctgggcgtggtggctcacgtctgtaatcccaacagtttgggaggccattga

SEQ ID NO: 268460 - DNA, 398 bp, Homo Sapiens
  misc_feature (24)..(24): n is a, c, g, or t
  misc_feature (83)..(96): n is a, c, g, or t
cctccactgggggcagccctcccncccccgggaccctagacccccagaggagggaagaaaaattgcagtgactgaaaacagtnnnnnnnnnnnnnnttatgtatataaaagttgcattacacagtacaaaatagatggataatgtttatcctttatttttctatgtagaagtttttgaatttgtgtgtgtgcttgtgcgtgtctacacctagtattacggctgggactctccagctgtttttgttgttgttatgtttttaagagggttgaattcttccatcaggtgaacgaaaaaggcaacaaagtaataaatcagtgaatgtggccggcagctgtgtttagcccctccagatggaagtttcacttgaatgtaaaataataaagtttatattttgaaa

SEQ ID NO: 268461 - DNA, 248 bp, Homo Sapiens
gaagggcagaattaaacaacttatattttattttgcaaattcacaaatataggataaaaaaatggctggatgcaaatagaaaagaaatactgtcttttcaaaaaaggaacaaaggattaaaagtagatcttatggaagaaagataaaagagtcaacattaaatctagagaaaagcctttgtacaagaggaatttttttgtgcaagtatgaggaggttccaaaacagtttttaaaaatctgttttcaaa

SEQ ID NO: 268462 - DNA, 437 bp, Homo Sapiens
  misc_feature (28)..(28): n is a, c, g, or t
  misc_feature (52)..(52): n is a, c, g, or t
  misc_feature (59)..(59): n is a, c, g, or t
  misc_feature (422)..(422): n is a, c, g, or t
ccagctctggaccctaaaatagcccccngggaaaggtccctgccctcattangaatagntcccaatacccggggggatggtattccatccctgttgtatcctctggacccagcctcatcccttggagggcatcctgtgctgtccttttcccattcctgtcacagaacaatacacccacttcatttatcaaaaatttacgaaagtgcctactatgtcccagcactgagctagatgctcatcaaaacagcagagaataaaacaaagaagattattttcccccacagaatttagtctgctggaaattacaagcaagaacaagtaattaacaacacagcatggtaaggggttgtgatgcagattatagagcatggtgtgagcctagaggagggcaactagcctagcctaagagtttaaagaagtcntgtggtgacagctag

SEQ ID NO: 268463 - DNA, 394 bp, Homo Sapiens
  misc_feature (27)..(27): n is a, c, g, or t
  misc_feature (266)..(266): n is a, c, g, or t
ttccaccttttgattgtctggactccntgtgccatgtacaattatcctgtattgttaattgtctttctatgtctgtaacttgcttctgtgttatagacatcatcatggcacagtgccgtgctttttcacagaataggtacttaatattctattatttaatttactagaactttgcaatttcataaagataactttgtcattaaaaatgtttccagtggggatttagggcccttgagatggtgcaagaaaaggagataaagggtttnttttaagctatttgttctttctgtgcaaattacataacttccaattatttccaacgttaaagaaatagtccctctgaatcctttatgatttaaacattaaaatgattcactagtttttagaaaaaaaa

SEQ ID NO: 268464 - DNA, 411 bp, Homo Sapiens
tggtaatatgggttatatcattaaactatacatgcatacctgcacttcaccatcatgctgattagaagcatctgcagaaacttgtggggggcatagtgagggtaattgtgacagcaatccttttcagaaaatgaaggaaaccagccagtgtggtggctcatacctgtaatcccaaactcctgggctcaagcaatttgcccaactcagcttcccaaaatgctggtactacaggggtgagccactgtgcccagcctaaaggatcttttcatatgcttgctgtttattttgatttgctgttctgtgaattgcttagtcatatcttttggcttattttctggttaggcttcctttttctagctcagggtgtaaaaagtctgattaatatcatgaaatttaaccctttggtcactt

SEQ ID NO: 268465 - DNA, 355 bp, Homo Sapiens
  misc_feature (38)..(38): n is a, c, g, or t
tcctaccctcatttcctgtaaataaagttttggtgaanctgttttgtattgtgacaaattcataagataacattgatattttgatttgtaatatttctaattggtagatttaattgaaaagtaaaattaatttatttttatatgttcaggggaattttaaagtcaaatcttttgtagataatttaaaaaatcagtgtggtttattttacttatttaacccactggttgttattctgtaacagtttgtataaatggtaaattttgaatgtgttgttattttacctagatgtaaaattccacatgtattaaaatgtacaaaatgttttgttaataaaatttaataatgtttataaaa

SEQ ID NO: 268466 - DNA, 497 bp, Homo Sapiens
  misc_feature (51)..(51): n is a, c, g, or t
  misc_feature (73)..(73): n is a, c, g, or t
  misc_feature (88)..(88): n is a, c, g, or t
  misc_feature (101)..(101): n is a, c, g, or t
  misc_feature (124)..(124): n is a, c, g, or t
  misc_feature (185)..(185): n is a, c, g, or t
  misc_feature (192)..(192): n is a, c, g, or t
atgggaaaaactgaaaatggctgaaaaaacctatgctgccctccaagcttnaaagctccctttccccccaatnaagctggccccctgnagggaagcgtccnataatatgggagcatccctaccnggtccccaataagacctggtgcttcccccaatccccgccctgtgggggactcctatggccnacggccnagtggggataatgggcatggtacccaccctgtccctaagggaagacccaggatcaaatagactcccatgatgggatgcttgtttcaaaagggtttccctctcccctctcccacgaaggcagtacccagccagtactcctgctctgctaaccctgcgtgcaccaccctaagcggctaggctgacagggccacacgacatagctgaaatttgttctgtaggcggaggcaccaagccctgttttcttggtgtaatcttccagatgcccccttttcctttcacaaagattggctctgatggtttttatg

SEQ ID NO: 268467 - DNA, 430 bp, Homo Sapiens
  misc_feature (17)..(17): n is a, c, g, or t
  misc_feature (33)..(33): n is a, c, g, or t
  misc_feature (52)..(52): n is a, c, g, or t
cccaaaatttgtagttnccctgagcccacaggnccttccaccttggaatggntccatataaagtccaccccatgcctacatacccaaccccacagaaatggggaacctctttccctcccagtgtatgcctgagaccctacaattctgagcactgccttcaagaggatgcccttgagtcatttttcccagagttaaatttgcttatgcttctaacctccacctacagtccccgttacactgggaatgataaaaactatgccttttgaaaatataagctgtcatgttattaaagatgacaaaccagtagtagttaaagtgctgcatctaaattgttgaagcttgttacgtgggagttcattagactgtttttcctacttttgtgtatttttgaagttttccataataaaacatttaaaaagacaaactaatt

SEQ ID NO: 268468 - DNA, 476 bp, Homo Sapiens
ggatgaccttgggatgccagattcacacataattccttgttgtccccttcctgagttaatagtttagcatacaatttaccaaaatttgtagtttcctgagccacagacttcacttggaatgatcatataaagtcatccatgctacataccaacccacagaaatgaggacctctttcctccagtgtatgctgagtcctacaatctgagcactgcttcaagaggatgccttgagtcatttttccagagttaaatttgcttatgcttctaacctccacctacagtccccgttacactgggaatgataaaaactatgccttttgaaaatataagctgtcatgttattaaagatgacaaaccagtagtagttaaagtgctgcatctaaattgttgaagcttgttacgtgggagttcattagactgtttttcctacttttgtgtatttttgaagttttccataataaaacatttaaaaagac

SEQ ID NO: 268469 - DNA, 373 bp, Homo Sapiens
ccagtaaattggaattggtcccctaaattgggtaattaataccttattggataattaaaatcagccctaatgttgccttaagtaggaggaaattggatcagcaatgggattgggtatcctattttcctttccctataaaagtgctgccctcttctcaaattgctttatttctctcccactgcattagtatatctagaacagcaccttcaactgcaacaaaatataattctcctagatgactaggatatcctccaatctggtatcatgccaaacaacactatgtttggggaacagcacccgaaatgctgctaaaaagccacctcatgtcaagaaaatatggatttcaaaaaatatctggcacagtggcccatgc

SEQ ID NO: 268470 - DNA, 614 bp, Homo Sapiens
  misc_feature (217)..(217): n is a, c, g, or t
tgaaaaccttggtgccattcaggttctcccaaagatgacatcacatgtggtaaatgagattgataacatactgcgcaacaagccctacagcaagaaggactatagatcataaggcaatgcatgaaccacagaagctgcatggttaaaatagcggcctgtgcccagtacagaaaggtgttactaaccagtcttttgaatcacttagcagcttgctccnaaacctctagtgtccctccctggattctttgaggtgtctgctgtcgctacccactgtgcacatctgaaaactcacaaccaagaaaatccattctattttcttatcttggactgggagtcacctattcttgcattgctgtatacacctcatgcttatggcaatggggaagaatatggggggccagggggtgtgggtactaccttcaggcatttggtaactcaaagaaggctgtacagatatattttttcaaaagaacaaaatccacagatgcaatgtgagttgcgtaagaaacagagtagatagactaaattcagtgaaggaaaggaattgagagatttttcttagtaaatagattattgttaagtaaatagttattaaaaatatatctcactgatat

SEQ ID NO: 268471 - DNA, 498 bp, Homo Sapiens
  misc_feature (43)..(43): n is a, c, g, or t
gaactattccgcctagattcagaccctcagaaacattgtatcnggaaatacagaaatgttcctttcaaaatgagtgtatgggaatatgggaatgccctaataaaatctgtcttcattgattcgttagcaaaaaaccatataaatccatagcttgtgattgcaagcagatatatttcagatcctttctgtgtttgttttttgctttcttgatctatcacaattggagaaaacttaaaatttctcaatggtattgtatttttgccaatttcttattctgctttatgtttctcgttgctatattattgggctaaaatggtccataattacttaagaatcattgtgaaatatattgcttaatgacacaagtaaatctttttcactgtttgtaatgtctttgctcttaattctactttgcctaagattaatatggttattcctgtttggttttatatgtatttattgatttattttgaagacagagcgcaactccatctcaaa

SEQ ID NO: 268472 - DNA, 333 bp, Homo Sapiens
gtagcaaataaggaaaaatgaaaattactttccctgtgcacacagtcccagccctaattggtatgtgaatgttgcaccttagcagcccatgtggtggggccatgtgtgacctactctggttttccactttaagtttcctaaactttttatcccctctcaagtcccagcatggatggggaaatgtctctggatcccccacagctgtgtacttgtttgcatttgtttccctttgagatttgtgtttgtgtcctgctttgagctgtaccttgtccagtccattgtgaaattatcccagcagctgtaatgtacagttccttctgaagcaagcaacat

SEQ ID NO: 268473 - DNA, 431 bp, Homo Sapiens
cccatgatgggcaccttggaggctgtggctacatgatgccataacctttctggcggcggatcacctctcggactacttgtccccaggcacggattctctgcaagagggcatagaagtcagggcattggtggtctaggtggccagcaggaccatgagcagttcccaggtaggctgctttgaaatacttgtgctctgaagactgtaagaatttattcactcatccatctgcctaccctcccctccatccacccatctattttacaaacaggtgcctttcctgtacccaggctctctgacaggcttacacctaagccgtgaggatataatgatgacaaaagcaggcttggtcccttccttcaagaaacctaaagtcaaaactaaaactagatgacgcaaactgatagactgtgggccaaatcctgaccccagac

SEQ ID NO: 268474 - DNA, 581 bp, Homo Sapiens
agctcaataatattccatcatgtgggtatgccattggtgccatggtttactcaggctttctcgtgtatatgaacatgactttgcttccaatatttgcagtctcagtgctgcaatgagtaatcttgtgcatctgtatgtttgtactgttggaggtgcatcttcaagggaaattcccacagtggaaatggttgtgtcaaagggtaaatgcttctgcaatttgttaagtactgacaaattcccctccagaagtcatactagtttgcattcctaccaacagtgatgacagtgtgtttccctatagccttgcctaacagaaatgtgttgttctttctttcaccttcttagagatgataaatggtatctcagtattatctcaatttacatttctctaatgagttagtttgaatatttcattttaaagagccatttttatatcattacgtgagtatgttcatgtctcttcacagttgttctatcaagtctttggtcctttgtcactcaattattagttcgttatatagtaagaacactaactgtttgtctagtatataggctggatagattattctccaggcagttga

SEQ ID NO: 268475 - DNA, 409 bp, Homo Sapiens
  misc_feature (47)..(61): n is a, c, g, or t
  misc_feature (149)..(194): n is a, c, g, or t
tgagaccccaccccgggcaaacatagccaacatgcccatctcctacnnnnnnnnnnnnnnntttgcctgggccatggtggcataacaacagtccccagcctacctcaggagactgaggcaggagaatcacttgagccccagtagttcannnnnnnnnnnnnnnnnnnnnnnnnnnnnnnnnnnnnnnnnnnnnnaaagagcatgaccttatctcaaaaataataataataaacgtcttgtacatgctaatatttgtgctgtatttcagggagcagttttgtagaactgagagggaatttgtagatcatgtagtctaggtttcttctcactttctatctctcacccccaatggccagtggctgcctcaagtgaaaaaataagtgtcctgaaatcaagcacaagcccagca

SEQ ID NO: 268476 - DNA, 641 bp, Homo Sapiens
  misc_feature (14)..(14): n is a, c, g, or t
  misc_feature (66)..(66): n is a, c, g, or t
  misc_feature (77)..(77): n is a, c, g, or t
ggttccatcctgantgatgaacctgcccttgaatcctggccttgccaattgtgccaggaaggatgnaaattacttgncatttcctccccgcgagcatccgacctttgatgtaacccatgcagattgtcacagtattatcactcgccttcaatcatggaagcatcagtagggtgagcatagcggcaatcattctccccacgggtacaatttccacgctgaaattctcggcaaacctccagtttatctgaacgcatcagttttgggccaacagctccctggcattgcaagaggtgggtttcccaggaatcagaacaggtgtatttggtacaagttctgcaggaacgaggcccatcccaggatgtggtatgtaaggattgaaagccatgggaggattagctggaattgatggagtcataggaaaagaaccaagtgatgacatttgagcgttttggagcataagctgcatctgctgggcgaacatggctgcggcagtcttctgttgaatcagattgttccgcccattaatctccagctgcgtttttaagtgtggaggagggtgaaggtacttgcagttctcgtcgggtacaccgacccttaagattcttagaagccctctccatggaatccacccaggctctccc

SEQ ID NO: 268477 - DNA, 443 bp, Homo Sapiens
tgggggcttgctcccaacccaccccttaacttcccttctaagggaaattgaacatttccccaaactccccttgccagcccaaggttctggatctgacttaaagttcccccaaacagaatctcttgtaaaaatttagatttgggaactgaagtgaagtgggagaggggcaggcctcaggacatctattggctggcacggaccgtggcagagggagcctagttctgcagtcagcagctttctggcatagtggcttcctgcagatgggggcagctttcctggtcacaacagacatgatgaatctggcgctgggagttcctggaaattcagcagagtctgcttctccagctcttccaacaattttgcaagccaccaggggccaggtagtaaatccttgtctaattaaaccagctacaagtggctcttgttttctgcctgtgccgaat

SEQ ID NO: 268478 - DNA, 456 bp, Homo Sapiens
  misc_feature (334)..(367): n is a, c, g, or t
  misc_feature (378)..(378): n is a, c, g, or t
  misc_feature (385)..(385): n is a, c, g, or t
  misc_feature (430)..(430): n is a, c, g, or t
  misc_feature (435)..(435): n is a, c, g, or t
gagaatgttaaagcaggccgtgataagtacaagactctgcgacagattcgacaaggcaatacaaagcagcgaatcgatgagtttgaagcaatgtgagagctgttattttgcatatatgttcttcataagctgaaccaccaacagagaaaagcaggcctttgcagatatgatggaatgcatcccaccttgccaaagcacttacaccagtttgactgtgctagctaaaagacaaatttaaggggagctcttcaacattaagggcagtatgatatcatgcttggttttcttttttcttttggtccaggggaatggagaatggtgttccattgcctcnnnnnnnnnnnnnnnnnnnnnnnnnnnnnnnnnnctgttgaaggnttaacantaattatccacgtctggacaaatgtgtaagtgtgggttcagttcngtgtnacattttaaagggtaatgggg

SEQ ID NO: 268479 - DNA, 303 bp, Homo Sapiens
  misc_feature (42)..(42): n is a, c, g, or t
caggccaattgtgccataactgcctactcctaaggggtgggnacattcctgaaaaggcactgtgcaaaacacaaaaactagatatttttgtgtcacttagaagaatggaaaacatgaaatacctatatatccatgataggaatattccagaagtaggatgaagattagtggacttgagtcaaaccccagattccctgcatcctgatctctactagtatggggttatataggtttttaatagtgtttattcaagccctgttttttcccctaaggtaaatattttggcagcacatggtggatcat

SEQ ID NO: 268480 - DNA, 443 bp, Homo Sapiens
  misc_feature (375)..(375): n is a, c, g, or t
  misc_feature (393)..(393): n is a, c, g, or t
  misc_feature (420)..(420): n is a, c, g, or t
aaaagccccttgcaagcaacagtgaaatgggcatgcttaagagctcttattaagcacaattcttgagagccccactgaatttctctgctccttgtaagacaggacactggctacctgcttagctactgttgtggggatttaatattaaaaatatttgacatggtaccttgtttatagcaggccctcaatacatttaatcatttaattcccttcccttcccttccctcttttgaatttcaagagggaattaactagatctagagtttatttgatacttgtgggaaaatcaagggttacaactggtttggagttctaaggtactcaaagcctttaaacattatcccacagttccccgctaatatgggcacaaatagnaactttcactgtttaccnttccattcattcaacaaatgcttgagnccctaactaaaaaggtatggctt

SEQ ID NO: 268481 - DNA, 471 bp, Homo Sapiens
  misc_feature (389)..(389): n is a, c, g, or t
  misc_feature (400)..(400): n is a, c, g, or t
  misc_feature (407)..(407): n is a, c, g, or t
  misc_feature (427)..(427): n is a, c, g, or t
  misc_feature (439)..(439): n is a, c, g, or t
ttgtacattaattagaggtaaagcagagtttcaaacctacgcctgtctgacacatcttttctattacaccacactgcctccccagccatataaacttcctaggagatttgaggattcagtttaagagaatattaaaatgttctatcacatttcaagtgatagaatagtaggacttggtgattaaaaatgggagctagaagagatggaggaatgcaaggcttccactttggtcaactgagtaatatcagaactcttatgtaaaatgtataaggtaagagcagggattgagggggaagatcccggaattcaattggggaacgtgctggaaattgaatttcctggggaggtcatccagggagagctatctagtgaccattaggatacatgtnaacaaggagcntcaaganaaggaagagacatgaaattncaggttttcagntttaaacagcacgttgggtccttatttgaagt

SEQ ID NO: 268482 - DNA, 131 bp, Homo Sapiens
  misc_feature (14)..(14): n is a, c, g, or t
  misc_feature (37)..(37): n is a, c, g, or t
taaaaaaattaagnaaagtgaggtaatgtccatgaanatataaaatatatgttggtagtctaattttatcatttactacccataaaatgaacacagatctattacagaaagttaaaatttgcccaggcgtg

SEQ ID NO: 268483 - DNA, 444 bp, Homo Sapiens
  misc_feature (42)..(42): n is a, c, g, or t
  misc_feature (352)..(364): n is a, c, g, or t
ggtccactttggccctatttttccccggattaactgccaccngagtgcaatggggggttgacttcctaaaatagtttactgtcttactgtcttcaaatatgattttaagataaaacttatttttaagccttaacctttgagtaaatattatgaagaaaaaatgaattactaaaagacttgattcctacacactacgtatatgaggaaattctctgaaattaaaacatagcaagctccatttgctcagcgatgaggtacttgcacaaagttccccatggccttttggtgtacaaatttataataatgaagactacttctaagaaaaaaaatttgacataaaagtttgtttttnnnnnnnnnnnnnctactgcattcaaaaagttgtttgagttgtaaacactcaaggataagccagttttaggatcacattattgtgtcacagta

SEQ ID NO: 268484 - DNA, 354 bp, Homo Sapiens
  misc_feature (22)..(22): n is a, c, g, or t
  misc_feature (43)..(43): n is a, c, g, or t
aaggacttgccgtgggctgaancctccctttcccatgggccanccaaaggaaaggagtagcagcatttccttgtcctgcccacatgtggggcatagggggaagagggaagggtgagactgtcaggagtcaaacagcaaaaaaatgcagtcaaaagttccgcagtgcaatgagaaagtgccacacacccatgagaaaggctgagatgaaggcctgagcacgctggagatgacgtggaacaactggaactctaaagtcctgcctggaggagggtcacacggccacttagaaaacttttcacagtttctttaacacacacttaattcataatagagcaattccactttaggtaattc

SEQ ID NO: 268485 - DNA, 795 bp, Homo Sapiens
  misc_feature (137)..(137): n is a, c, g, or t
ggggcctgagcttcagctcaattggaagcctgctgtgtgccacaagacggaaaagtggaagaagctgcagtgggagacaaagcctcggtcccccacccatccacacacacctacactcacacacgcgcacatgggcncaatcgaactaccattcaggcagtcagtgggcaagaggaaagataagtaagtaccatacacacctaaaagatgagagaattcatccagacatattacagccagtttggggcccctgactgcaatgtgaaacctctcgctgctgctaggtttacaaacaagcccattgtcctgtgcctcctaatatcatttgtactggaagaccccatctggggacttgagactttggtcccagcccagactcctcagacttttctctcagttgggatgcttcactcgctgggggtgtttgtttgccctctcatttttcagtacttcttacagaattttctctagagtcagtcattatgaaatgtacttccctccatcttaacctatcaactttctgcccctccttcaaggcccagtataaatgccacctcctccatgaagccttccctaattccaccccaaacccccaccttcaacaatatttcaacgcttctgcaatgatgaaaaagaaacatagttgtagtacttagcctacctagaccagcaagcattcatttttagctcgctcattttttaccatgttttccagtctgtttaacttctgcagtgccttcactacactgccttacataaaccaaatcacaataaagttcatattcagtacattga

SEQ ID NO: 268486 - DNA, 457 bp, Homo Sapiens
  misc_feature (442)..(442): n is a, c, g, or t
gatagcagagctgagaaattgaggttaaaaagagaatttaaaaaataaatgcgttttcctagaacagtataaattttcagttataaagggattttgataacttgagtaattcattttccctgccccagattttcttaatgatccagaccacctgactttagattaaattaagcttgctgaggatccttttgtggatcataagcctgatgattgggttttcacactgtgtgagacaggcctctctcaaaccttgttgcattgtgcacacattacctgtctgacatgggggaagaaattcagcttgatgagataccaaaatgtgaggtgtattctcttgacagagagaaacttatggctaaaaacatttctggcatttttgggtgacttacttaaatatggggaccgttatccaccctttacagctgggcttagggtaggaggnctcagtaggctgcgt

SEQ ID NO: 268487 - DNA, 152 bp, Homo Sapiens
cagtgattttaactgcatatttgaacctacaaactggtaaatcttattaacaaaaagaatgtacttaaggccctctttatttatagtgtcgagttatttttgaattttgcttaaaatctatttttcatatgaaaataaaagataacaatcaa

SEQ ID NO: 268488 - DNA, 667 bp, Homo Sapiens
cataataaactccatatccgattccccatatctaggttagaacgtctcttttctccctgtcaatcatgaggactaatgcagcacacaatgtatacagtactaataaaggctttggacttaccacttccttctttgaaatcccaactggtcgcatcttaggttggtttggggcagtcccttgtgggaactctcctgctattctgtctggttttgggccttactgcagttgtggttttgggtggttggaacaagcatatatttcaataaatacgttttttaaatgtccaaaaaacaacatgacacaactgcgggtcgagagccagttttagtttgtcccataagctttctgtctttgttccagtttagttacaatggagaaaacctctttaatgttgacaggatttctttagaaaaaaaccattgctatatctgaaagtccagtttcaactggcaaaattggacaaaagcagcaatttgaaaaaccaagctacttataacttgataaagtcctctataaactaagtcattatatttctccttttaaataaaccattgtaaatttaatgttcatatcagttgagtattagtttccagctggattcatgctgaataaagtccagaaactttctttgtgattcaaatagatgcacaggaagctgggaaggaa

SEQ ID NO: 268489 - DNA, 475 bp, Homo Sapiens
  misc_feature (59)..(59): n is a, c, g, or t
  misc_feature (455)..(455): n is a, c, g, or t
aaccctttgtgcctcaacagagagaacacccccacggaccccagccaactggtcaatgncctaatacccagttcaacatccaaagcaggcgccactttgtccaggtttcccactcgaatatcccatttccgccatctgaagtacagtatcgaaagtgacctagatcatttgagcttttttccttccagctgcctgcccttcctcccccacggtgtttcctctcacgcctaacataatttggcatcgtcgacgtgacacaatggtggtttttctaaaaaattataatacatacatcgtcaatgttttgtgatagcgaccctccagaagatttaatttgtaaattgaagaaaggtggtctttttcctctactgaatcataaccaaggtagagtgcccctcaaaatccaagtaatgcgcatacagtaataggtcattcaatgtcaaaaggcataaacnagatgagcaaaatcttcaca

SEQ ID NO: 268490 - DNA, 465 bp, Homo Sapiens
aattatgaacctcttcaatccttcatcaattattttgagtattctggtcttaaaaacatctctttcttctacaaacttctgaaagagatgaacacctccacctacaccaaaataatgtgctttgctggccaaaagtacacgtccatttttacttaacagtctaaggaaagtctggtgcaaattactataataatctgggttgtaaatggtttctgaggtgagaatgagatcatattttacaaaaagtttttcactacttagtacaagcttacaaaactcagaccactcaccagaaaaaaatcggcatttatatagttgtgttacttttgggtttcctggcatcttttccacatctgggctcatttacatccattttctttcatcttccaaagtgggagttaggctactacattaggtaagggtacttcatcaatcaccatactgttataatcctggaaagtgaat

SEQ ID NO: 268491 - DNA, 602 bp, Homo Sapiens
atattggtaaaatgtgacttctggctttaaaggacattattgacctccctggggctaaaagattgcacccatgtgagtaatacactgctaaagaataattcattttttaagatctatagaggttctccactaggcacaaattcattgctgaagttggatcatgcaacagttttacaagagaagtaggaaaacatacgtatactgaatatagtgcatatcaccatgaagactttcagcatgtaagattaagacaggacagtgctttaaaacacttgcatggatttgggtttgcctagtcaaatgaaagggaattcattgagatttatatggaaaaattcccatgttggggttaatggcccaccactctgaactgagtccagtaagagcttgaggaatttggctttgttagtacagaccttctccttgcactcctcttctcagtattcaacaagctgtctttgtttaaaaatatgcaaaatgcactgaattttggagtggttcatgtgacttttactgctcattttgttaaaaattctgtcttaagttagaaggtattttttgctttcttttcaacatctgaagaacaatgcatcacacttggg

SEQ ID NO: 268492 - DNA, 395 bp, Homo Sapiens
  misc_feature (325)..(325): n is a, c, g, or t
  misc_feature (345)..(345): n is a, c, g, or t
  misc_feature (355)..(355): n is a, c, g, or t
aaggtctcggggagtctaacgtttccaggctggttttgaactcctaggttcaagcagtcctcccatctcagcctcccaagtagctgggagtacacgtgcacaccatgcctggcttattttggtggggaactctcagtagaagaattttgtaactgatatatatgaataattacttttgaaagcaaatatctttagaaaataacaaactaaaattaagcttttaataaattaagataatagaaaggtttttaatgagaaggattattactgaatttcttgggttgacaaaacaaattctttgataggaaaataaattgcttagganaattcagatacaagtataanacttaaaacnaaatgtaatttgattgggtaaggacctactcccacaaaat

SEQ ID NO: 268493 - DNA, 395 bp, Homo Sapiens
  misc_feature (45)..(45): n is a, c, g, or t
  misc_feature (384)..(384): n is a, c, g, or t
ttacaggtgtgaagcccaccgtgcccggcccccacctatcttttnatgatagttttactgttaattttattcacattaaaaataaactgctaggcatgaatattaaatccgtcattttaaaatttagttacattaatttaaatcaaaaaacgatgtgaaagaagtgaagatgtgtaccctttacataacctaacaatggacatattctttctttaatttccattaatatgacttatttttatcattttcaaattttagaacaagggacttttccatcttactcctaagtggaatgtcagagtctttaaaaaggtacaggatctatcacaataatccgtgttgttatgttattttcatttttaagtcgcatatctgcttcttccncgtgccgaatt

SEQ ID NO: 268494 - DNA, 608 bp, Homo Sapiens
  misc_feature (13)..(13): n is a, c, g, or t
  misc_feature (190)..(190): n is a, c, g, or t
  misc_feature (284)..(348): n is a, c, g, or t
  misc_feature (355)..(368): n is a, c, g, or t
atatataccattngtaggtgaatttccagtgcacatcttttagttgcataactagggaatatgaaaatatctttagtctaggcgtagtgtctcgtgccctataatctcagaactgtgggagcccgaagccagatggatcacttgagcctaggagtttgagactgtcttgggccagtgccagaccctgttnctatttaaaaaaataaataaaatggcctggtatggtggcatgtgcctgtggtcccagctgcttgagaggctgaggtgggaagattgcttgagcnnnnnnnnnnnnnnnnnnnnnnnnnnnnnnnnnnnnnnnnnnnnnnnnnnnnnnnnnnnnnnnnnatacttnnnnnnnnnnnnnngtatcttcaaaaatgttctgacgtaatctgtgctgcctagcattttgttctccaagctgagtggaataatgcctttcatttacatgttaaatggaagcctatttttaggctaaatgtaagtcttaaagtactgagcagaaatatcttccacatcctattgttgcattaaatccctactgatattttaatggtaattgtgatagtacctgaataactattgtgtaagaataaagttaatgt

SEQ ID NO: 268495 - DNA, 425 bp, Homo Sapiens
actggtatagacaatgaccagtggctgggtccagtgggatgtcctctctgtgaagcacaaaggcttatccaaatgacactaaaaataagttcaacaaccatcacattggaagggagaaggcgaacatttcatgtttggcgggcatgtgagtgcacaagatggaaagagcgattggagcatcctggtataattacccccattgtgctcttaatggaaatttcaaaggacgggagtattctgttggttggtgtcccaggtttgtggcactgttccaagaggccttacacacacacacaaatatataattttctatacatatatatcctctagcttgaaacttttgctcaagtttatttatgtcactggctggctggatccaaagtcatgtgtccacacattcataaataaaaattttacctatgaaa

SEQ ID NO: 268496 - DNA, 561 bp, Homo Sapiens
  misc_feature (472)..(472): n is a, c, g, or t
  misc_feature (499)..(499): n is a, c, g, or t
ttacatgttctttacttttttattatatccagtgctttgaaacaagtatgttgtatatatacaatcagaaagtgttaaaaatgataagcaaggcatttgtatcaaacctgttgaacattctatctgcattatcaaatcttccattctgcaggcacagcatatactctggtgcaatcctaacaagataaaaaagtacataacccggggaagagtagtgactcccatacatgaactttggttcaggcatttcctggggagccgtgtcagtagtctctccagccgttccttatttagggcccctactggcttactgagatcccggaaggttcctggatttgacaaatctagttctgagctggaataatcatgtattatccatggaaacacagggtactgggagaggtcgttgcagctgcggtcggccaggttgttgaggtgaaggaggtactgatagttggaaaggtgtccaacntgccactgcagcatgtagctctcagcnagtgtgccgccacatggtgctctaggtatgtggcaatgtaaaaatagagatcatctcttatc

SEQ ID NO: 268497 - DNA, 364 bp, Homo Sapiens
tttttttgaagaggaggcagaatttcctgttcaataagtgacatgcatttcccatcagtggatagctggatccagttgtgtaacaggctatctttgaggaagtgagctctcaatcattggagccaatgataacagcatagcctataaatgggattcccttcccttgtgagagattaaatttaaattctgtgattctgtacattaactaaaaacagtgtgctgcaaaatattaccactctgaaaatgacggtgaggaagaatgtttttctaagtctgaggttcccaaacttccttggatcacgatgcccttagtgtcttagtaattttttcacagtatcggaagacaaaaaatttattatgttac

SEQ ID NO: 268498 - DNA, 234 bp, Homo Sapiens
cttatctcctatgctggagaagtaagtctgctttactttttcctctattcttttacaaagctttgtatatttcaaaataatgaaaaagtggattttaaatgttctcaccataaagaaaggataagtatttgaggtgatagatatgttaattggctttatttgattattcgacagtgtatatatgcattgaatcatcacattgtatctgaaaaatatatacaattattgtcaatt

SEQ ID NO: 268499 - DNA, 810 bp, Homo Sapiens
aaatatctcatgaatgagtttgaagtttgcttggattttgaaatgaatgggactttgtctttattactaattcaccaaatttgttgagcgcaaaagcaattaatgtagtttaagtatttagtatgtacagttctctgtgttaacagctgagaagtaagcaaccttttctgactgcatatgggtgtattcctcttttgagtccccataatattttataaattgtaatgccccatcttgtactacagttgtcttattcgtattgtttataaactttgagggttaggactgggtcttactcatctttatgtgccttccttatgcttcaaagaatttaccatctaatggaagagaacatttgcaagttggctccataccaagctccttccacatactctactcatctgaactttgaatgcagaatctttaaattgcaaccccacatactaaggtcaagaaagaacttaatgggaattaatctccacccattagctttaccctgacatcaggattgccaaatccaatggactcttgtctattcttacgtgacttctgctggaaaatgcgaatgttgaccatcctgccacttggaactctcttcccactcctcacattgcttttgctaccactggaagttccttctgtttcttgtggagtaccttttgctgtctgggacttgtagataatggtgtttcctagggctccctccagggccctctgcctcactaactggatatacttttcctgagcaaatcccaggaaacttgcgtcagaccgtgacttcaaatacaggttgataaatgctaaactgtc

SEQ ID NO: 268500 - DNA, 390 bp, Homo Sapiens
  misc_feature (106)..(106): n is a, c, g, or t
  misc_feature (335)..(335): n is a, c, g, or t
acctgcgtgtgtcttggcgtccacatcacacctgtgacggaagcacttctggaagtgaacactcgttttgaaagcttgattttgtagctttggaagctggaagcantggtgtttggtgccgagtcctgtgtcatcctcggggcctatgagctccgtaccagccactcaaaagtgtctgaacagaaccgctccgtgactggtagctgggtctgaggattcaggattgtggcgttattcaaagaggagactttgaaattccccgatggctggaatgtgggagcccagggtgcctctggttggagggtcatctgctttttccagacttgtgggttgtnaacccggcttccttcttccaagaaagggttgcaaagcttgaagaacattccagaa

SEQ ID NO: 268501 - DNA, 441 bp, Homo Sapiens
  misc_feature (53)..(53): n is a, c, g, or t
  misc_feature (77)..(77): n is a, c, g, or t
  misc_feature (99)..(99): n is a, c, g, or t
  misc_feature (127)..(127): n is a, c, g, or t
  misc_feature (287)..(287): n is a, c, g, or t
atcagacattgttagactaatctgggtaaaagcaagacaaactcccacaaatnataaagaagaatgcctggaaaatnaattggttataatatgtgtganaaaaaatgaaaatttgatatctccctcnactccatacgctaaattcccagggagtattaaggattcaaaatataaaaagcaaacacttttaaactttcagcagaatgtacagaataatatttatagacagtaagtttggtttctgaataccattctccactaaaaggaaatagagatacgtggaaaanatggctggctccagagctgggagagggaagaccactgactctgtaaaaggacacaggagtcaaaaggaactacagccagggctgggacaatctgagcagcaaaataaacaataaaaataatggattataactaactgagtaaaataggagtcta

SEQ ID NO: 268502 - DNA, 436 bp, Homo Sapiens
  misc_feature (23)..(23): n is a, c, g, or t
  misc_feature (28)..(28): n is a, c, g, or t
  misc_feature (41)..(41): n is a, c, g, or t
  misc_feature (54)..(54): n is a, c, g, or t
tcctacaagccggacacctaacnaaaancggccttggaaanaggtcagtttttncccccgggttccccccattctgtttccatttgtatgtgtttcccataacctacacctaataacagtgttaaattattaaaactgtataatatgttctgacatctgatagggcaatctttcatttaatccgtctctttcaggaattctttggctattcttaggccttttctcatccagataagatactgaatcagcttatcaagggccaacttattgaattgttattgaatttgagatgaatcaataaagagaaaggagagccatgaaattagaaaaactaccctaattaagtcttcccttctaaaagtcaggaaaactagcattacttgaaaatgagtaccaaaaaaactaaggtcaaataccaaaccaagtcattatgaag

SEQ ID NO: 268503 - DNA, 462 bp, Homo Sapiens
  misc_feature (196)..(196): n is a, c, g, or t
  misc_feature (381)..(381): n is a, c, g, or t
  misc_feature (397)..(397): n is a, c, g, or t
  misc_feature (418)..(418): n is a, c, g, or t
  misc_feature (433)..(433): n is a, c, g, or t
aaccgggcatgggcaccgaatgcttctcgataaatccccttatggtctctgagcattaaagaaagcaagggaggaaaacatgcgcccaagctcgttcgcaggaacatgttcgcgtgtctgcgcctgtgtgcaaccaggttttctggctgaggatcgctcgccaactacagacatcacccgtggggccgggtctcangggtggcccaaaagacccctgttcaagccactaccagcctaactttagggaactgtcgtccaactgggcttttattaaactggccttaaacatatttcactttttttgaggactctaggaaatttcacaaagttttgggggtagaaggcacactgggcttttgggtgtgttttctcatgaggggncactgacgctggaatnggttgcaattgagaaagggancggtaaggaaaccantgcctttggcttttaaccatttgaaggaa

SEQ ID NO: 268504 - DNA, 479 bp, Homo Sapiens
  misc_feature (37)..(37): n is a, c, g, or t
  misc_feature (51)..(51): n is a, c, g, or t
  misc_feature (95)..(95): n is a, c, g, or t
  misc_feature (294)..(294): n is a, c, g, or t
catcaccgggggcggtctcaggtgcccaaaggccctnttcacgccactacnagcctaactttgggactgcgtccacctggcttttatatactgcnttaaacatattcactttttgggactctagaatttcacaagttttgggtagagcacactgggcctttgggtgtgtttcctcatgagggccactgacgcctgaaatggtgccagtgagaaaggacggtagaaacccactgcctttgcttttacccattgaagaaactgaggtcctgtgactttcccgaggtcatcggaatnctgccttgcacaggagacttaaaatagttgccagcagataaaagaatgagcaaaaccacatctactccaatttgttaagtctgaaagaaagtaattgaggggggattcctctttggggaaatatttatttcctgcattgaaaatagtttaatgttagtaaacatataaaaagtattttaaattca

SEQ ID NO: 268505 - DNA, 388 bp, Homo Sapiens
  misc_feature (30)..(30): n is a, c, g, or t
  misc_feature (39)..(39): n is a, c, g, or t
ggcgtatgccctgtagtccccaactgctcnggaggctanggcactgagttgggagccctcagtatgctttcaaaaataaaactggggcagaaaaagaaggaaatagaagccttaaacaacactataaaacccatatcaccctaaacatacatagaaaatcccaccccaacaacccacagtatacatattattctcaagtgtacatggagccttcttcaacacagaccatatgctaagtcataaaacaagtctcaattaattttaaaacattgaaaccatacaaagtatgttccccataacaatgaaatgaaattagaaatcaatttaaaaaaagcaatttggggaattcacaaatatgcaagtcaggtgctgtggttcatgccaatat

SEQ ID NO: 268506 - DNA, 464 bp, Homo Sapiens
  misc_feature (29)..(29): n is a, c, g, or t
agccacaaggtcccccaaaagccccaggnccggggcccattggcccccactcccctgatcaccctcgcctaggggcccatggaacaccaagctggagatgaaacacaaaacaccacttccttaccacccgtaggctccccatccacagatctgctttactgaggcgactgatcactgggtgatggggctgctaatgggtgagatgctgaaaaggctggtttctaatggacagaaatggaaggagcgagggtcacagttgatttgtcatgagtggagaagttgctgtctttgggcttatctggaaagcgcagatgcagagagaggagaaaaggaaaccacgtgcctttgcatggggcctgggtttggggcctccttggcagccgtccagtcagtttaggggagggaggtatttgcattctactgtctatctctgggctaaactgatgggaacaaaatatctggtg

SEQ ID NO: 268507 - DNA, 421 bp, Homo Sapiens
atggggaacggtaggtgccacacagccacatgtcctgtaattagtatccaagccccataccctactatgccctattcctaagtagaaacaactgccttttagactcagattccatgaacaataacccataaagtggtcatgaaaattagttgcaaagtaattggttttagtttactacatttcaaaaataagaactaaatcctcaaatttcagacaatgccttctcataacaacatcagaaaacaagctataaattttcagggaaaaacaacagaattccaactcattttctatttttacatattggagatagtggaattacaaaagtaaatttcttcttggattttgtttttatgccaaaatatgcttttcttagccttatataagtgcattacacttagagtagaaaaaagtttataat

SEQ ID NO: 268508 - DNA, 325 bp, Homo Sapiens
aattcggcacgagagccatgctcacagctgtctcaagacctttgcccttgctttcgcttctaccctttggaatgtaattcgtttacctgagggtcctgtgttttctgttgctgtatccccagaacacgtgagcacccagtaaatatgtgaatgaatgaaagaatgaatgaatatttcactagattctaagtttcccaaggacaaggatcatttgctgctcaattattagaatctaaagcaatgcctgggcacacagtagggagagtgtgtaaatgtctgtgggaattaaaagaagggaataatggggctggggcgtgggtgggct

SEQ ID NO: 268509 - DNA, 399 bp, Homo Sapiens
  misc_feature (102)..(102): n is a, c, g, or t
  misc_feature (184)..(207): n is a, c, g, or t
ccttaacctaccctaaaaatttaccataggcctaaaaaaacccccggattaaagagaaatcaaactttaagacagggttgccccagtcttttggtttccccnggacccacactggaagaagaatagttgtcttagacccacacataaaatacagtaacactaatgatagctgattgataggctnnnnnnnnnnnnnnnnnnnnnnnntctcataatattttaagaaagtatgaatttgtgttgggctgcattcgaagccatcctgggttgcatgcagcccatggactgcaagttggacaagcttgctttagaacatctaggtttaaaaagagtgataagtataaaaatccatgggctaataaccctgtgcttaggagaaaatcacaaccttaaatatat

SEQ ID NO: 268510 - DNA, 597 bp, Homo Sapiens
  misc_feature (41)..(41): n is a, c, g, or t
  misc_feature (52)..(52): n is a, c, g, or t
  misc_feature (99)..(99): n is a, c, g, or t
aaaaagacatcctccactgacaaaaatcccacggctgctgncactgtccccngtgccgccacgtcctcagcgtcctcaaacaagccaatttcaggaaanagacagggcacacttccaaccggacagagagaagaacagtttattcttatattccttaaggcttactgtcctcatacttagaggttcaaggatgctggtttgtgtgttacccctgagataaatccttacaagaaataaagtttaggaaatcacccccatgtgtatttcaaggagactctaaatttcaaagagttaaacccaatatattaaagctgaatttctgatattagagacacaatattttagtctacttgatatagttgagaggcagttacctgttttacttaggaacatggggaaagtttgtagtgacaaacagtttgaggcaaaaccaagattatctttaagagcagagatcgatgatatgaagaaaaagaagtggcaactttgactatatgcaggaaacacatttatattgagttgtggggactggcctcagaggaaacttcaggtcatgtcctttaatggccctaaaactcattcccaaaagaatttcgt

SEQ ID NO: 268511 - DNA, 475 bp, Homo Sapiens
  misc_feature (378)..(378): n is a, c, g, or t
  misc_feature (453)..(453): n is a, c, g, or t
tcttcatatcatcgatctctgctcttaaagataatcttggttttgcctcaaactgtttgtcactacaaactttccccatgttcctaagtaaaacaggtaactgcctctcaactatatcaagtagactaaaatattgtgtctctaatatcagaaattcaggctttaatatattgggtttaactctttgaaatttagagtctccttgaaatacacatgggggtgatttcctaaactttatttcttgtaaggatttatctcaggggtaacacacaaaccagcatcctgaacctctaagtatgaggacagtaagccttaagaatataaaataaactgttcttctctctgccggtggaagttgtgccctggtccaattcctgnaaattggcttggtttgaagacgcatgagacgtgcagcacatgagacacggtgcagcagcctgtgggaatattgtncagttgaaggaatgtcttttgc

SEQ ID NO: 268512 - DNA, 427 bp, Homo Sapiens
gttcttctctctgccggtggaagtgtgccctgtctattcctgaaattgcttgtttgagacgcatgagacgtgcagcacatgagacacgtgcagcagccctgtggaatattgtcagtgaagaatgtctttgcctgattagatataaagacaagttaaacacagcattagactatagatcaagcctgtgccagacacaaatgacctaatgcccagcacgggccacggaatctcctatcctcttgcttgaacagagcagcacacttctcccccaacactattagatgttctggcataattttgtagatatgtaggatttgacatggactattgttcaatgattcagaggaaatctcctttgttcagataagtacactgactactaaatggattaaaaaacacagtaataaaacccagttttccccttaaa

SEQ ID NO: 268513 - DNA, 206 bp, Homo Sapiens
aaagtccttgtattttacagatatacaatgaccgctttaaggttgacaataacagaattgcttcaaaataatggaagggatacagaggaaataatattgactatgtgctaatattgctaaattgggcatgggtacatggggagttcaatttattatactattcactctaattctgtatgttttgggaagaaaagcaaatagcaatt

SEQ ID NO: 268514 - DNA, 427 bp, Homo Sapiens
  misc_feature (24)..(24): n is a, c, g, or t
  misc_feature (40)..(40): n is a, c, g, or t
  misc_feature (89)..(89): n is a, c, g, or t
  misc_feature (112)..(112): n is a, c, g, or t
  misc_feature (148)..(148): n is a, c, g, or t
ccaaagcccctccatttgtggggnccttccacctaattcnggggtagtgtccagaattgaattgaaattgtacgacacctcagagaatnaagtgtccagaagacaaaaaagnaaaatccatgaggaattcccaacatgttcttggttnatcccatggagaagtttctctagtatagatcaatttaaaaaaattaaacattgtaatactagaaatcatagattttacgagacagctgtatgtggcagaaagtacactgaaagcagctcttaataactgtgtaaccttggaagagtcatcttgaccttgaagattcacggtttccacatctttataaataaggataacaatacctgctcgtgattattagttttatgtgtcagcttggctgttccatgatacccagatactctgtcaacattctgaact

SEQ ID NO: 268515 - DNA, 494 bp, Homo Sapiens
  misc_feature (451)..(451): n is a, c, g, or t
  misc_feature (468)..(468): n is a, c, g, or t
ttcaaatagtagccatcctaatatttgtgaagtgggaaaatgaagtttcagccattaaacttatttatttattgtttcctagtggactctattaggaaggcttattatggaactatctaagggatccttacatagttccaaggaaggggctgtcacatcaaaaagcccaaacatgtgattagagattggaaatttcaaacccaccccattcccctaacttcctaggaggagagaagaactgggagattaagttcagtcatatgggccaattatttaatacaatcatgcctacataatgaaacctcattaaaaacccggggacaccatgctcagggggagcttcctgatactaggaggggcgggcacaccctgactctgtggggaggcagagggctcctgtgctcatggacccttccagtcctcctcccatggtacctctttcatctgggcntgaccatttgtataccntattaatggaatggggaattgaaatt

SEQ ID NO: 268516 - DNA, 671 bp, Homo Sapiens
  misc_feature (100)..(119): n is a, c, g, or t
  misc_feature (124)..(124): n is a, c, g, or t
aacagaacaaaagaagaggcagaaaatatttgcatataacaaatcctagcttataaatgtagttttttagcggtgatgtctctaatcatcattcagggannnnnnnnnnnnnnnnnnnnaattngctccactgggtctcgagcactgatattggagaaaagcacatccggcataaagtgtaaaccagtgtctcaaaccactggaagaaccgggagagcaaacatgatttttcttatttcctctaagtaatctttctttagtaaaacaacaagtgatctttggcatagattcatactttaaaggcattaatattgcatttatatcaggcaagcaactatacaaatatgctgagggccttgaaaataatcatcctcattataaaggaaatagtgaaagcctgagtgtaaaggaccaacttaagttgtacacattcgatgttgggaactaacacacagcgatgggtggggaaggaaggatgttcaggcaaggttcttactcctttactcatctggttctggctttgggaaaaaataaggtttcatgtgctgggaaatacttagcagtaataagtaccaaaaaggaaacactgccctctcattttgcctagtaggaacttactgtgggtgataaggaatatgaaacccattactctcttgaaccccatacttggg

SEQ ID NO: 268517 - DNA, 410 bp, Homo Sapiens
gagatccctcctcagccccagggaatacacctggctacccttcagaggctacactcccatacccacaggttgtccctatgggagaaaatgaccccaggaattaatattcattagacagtcttgcagacatagcccatgactgatatcttggtttattcacagacagtactggaacccaggaccaggaaaaaaactaaagggtggctgaggacacatcaccccacaaaaattccaagaaaaaccttgatgccaaaacattctcataaaatctctatgcctagggaagataaaaggaaaagagacaaagatttttttacaatacagtgtcagaagattattccttgctttcttcttatggaaaatatttataaacagaaaacaaatctttttaaatgtgccatccaatgctt

SEQ ID NO: 268518 - DNA, 632 bp, Homo Sapiens
ttttttccaaccaggtatgacaacagatgtattgtacatgtatctatcaaaagccatttgagaaatatccatttagttctttctttcaaatggttaacatttggggaaaaacaggtaaatcagtctgggacttacccttaaggccccctcctaaggtaggaaagatacatatacaaaatccacaactataagataatctgtggcaagccccagggattcagtaaaaagaacactatagacgtaagtgggtcaagaaaagctttaaaagtggactggtacctgagtcaggcaggatgccaacagagtactggagctagaaaacagagatgaaggggaattgacaggaatcaagataaaggaagtagggaacaaagtgtggtatggaaaaggtgaataaagcaactcagaggaatatgtgtctttatcaaaaaaaacaaagccaggaaggcaagctggagaccatttgtggagagcctcaaacaagaataatggaaaaacatagggttcttgacgagtagtggctcacatctgtaatcctagcaccttgggaagccagggtgggcgagctacttgagcccagaagtttgggaccagctgggcaatatggccaagaccctgtcgctatcaaaaaa

SEQ ID NO: 268519 - DNA, 384 bp, Homo Sapiens
  misc_feature (17)..(17): n is a, c, g, or t
cctaagcggggcaaccngccctaaaataatcccctaattacctcctcctccctttggacagaccttcaagttttccttccatagcccctttcaaagttttttgagcccatcccagagtaaaatcatttcctaaatgatagttctgtatatctccaactcgtcttaagtgtatttgcctgtgtgcaacgtattgctagactatgaactcctcagcatggctgctggataacttaattgtcctgagttaatagccttcaaaggacaaatcggtttctttgcagatagcttcgtaaaacttcacatggagtttattttatcatatttcccttttttatttctgctcctcctttaattgcccatcttgcttcagagactgacatttcc

SEQ ID NO: 268520 - DNA, 228 bp, Homo Sapiens; identical to SEQ ID NO: 6963

SEQ ID NO: 268521 - DNA, 440 bp, Homo Sapiens
  misc_feature (20)..(20): n is a, c, g, or t
  misc_feature (30)..(30): n is a, c, g, or t
  misc_feature (69)..(69): n is a, c, g, or t
  misc_feature (83)..(83): n is a, c, g, or t
  misc_feature (98)..(98): n is a, c, g, or t
  misc_feature (111)..(111): n is a, c, g, or t
  misc_feature (131)..(131): n is a, c, g, or t
  misc_feature (136)..(136): n is a, c, g, or t
aaggaaaaaattgtgacctnaaaagggaangggcctgggttgtccaaccccttccgaagttccaaaaanagggaactggtttncttggttctcagccnagcagcaccctanccctggctcttggtccctgncctgnagccaagtgctgttcctagcctgaggcttgagacaggtggggttggctccctcacccaacccccagttccgtccccatcctgagggcaagatccctgggctcataggcagtccctttcacttccttgtcttgctccctgcctatgttggagatgaatgtgactaaaagggccatcttgctggcttaatgtgtggctggagagaccagcctggagacaatgtggcaaaatggggcgcttcatccagtctgtctaagccctgtcgacttggggaggtgatttctttcctggttctatatgtgaagc

SEQ ID NO: 268522 - DNA, 374 bp, Homo Sapiens
  misc_feature (190)..(190): n is a, c, g, or t
  misc_feature (349)..(349): n is a, c, g, or t
gccaaaaaaattattgtttttaatcaaatataatcaaacataattgaaaataaatggagacattacattcagaaatgaaacacaggaaactcaaaacttcctgggaggaggaaggtgcttattctcaccttcctgaaagccctgggtgagaccagtcactgcagcagaggaagaagctcctatctagttnggactggacaaaagcatagtagctgtgaggctacaagataagggtcagtaacagcaggaacaaaggtgcttgccaaacaaatcgcatctcatactgactcaatatacaaagtaggggaatttgaacatcagaggaacaatctccacccatgacagtctngcattaagctctcctgggtaaaagg

SEQ ID NO: 268523 - DNA, 515 bp, Homo Sapiens
  misc_feature (400)..(400): n is a, c, g, or t
cagttaaaggacaggcccaagattgggggataagagtggaaaatcaggtaggtgagaatccagagacagaccaaaactgaagctcatccctagtgaggggacctttcccattttggagacagattgtgctgtactgatgaccatgtgcataaacaagcctcttctctcccaactcttcaaccttgtctttaaaaacaggcctgtccccagcatgtggggaaaacatacaaagcatgttgaactcagatatgaatctgaatgctgtgggaaaacagccaaaaaagtgggcatcttctccaccactgacgatcctttggcatccctctccaccttgcaggtaaatgagagctggaactcagccttggctcacagcagaaaacaattctaacccagggcgcantcacattcgtggggaaatgttcaagtgcttgatcatagatgcaggaaaaaaaagtctgatttgttggcgtcagacctagtctttagatgggaaaactaataaacatcaaccttga

SEQ ID NO: 268524 - DNA, 433 bp, Homo Sapiens
taggaatactgatttctcacactctcaacaactaagtattgtcattaaaaaccatggcccagagttagaaagagtaaacccgagattaataattagaagttaacaggaggtggatttgggcatatgccatgaaaaaacctttcctgatgattactgccttcctaaggaatggaagagatgttcgaagggtgttcagttctccatcactaagagcagcaactaacttgtgtgatttatagtttagggagttctttgacataaatgatctaatttatcttcatgaaaattcaagaataagtattaatatctttttttataaatgagaaaatggaggctcagtctcagtgtcactcaataagaggtgaaattaggacacaattccaggtttctggactctgaatcttttctctttccattgtgctatgcagagatt

SEQ ID NO: 268525 - DNA, 354 bp, Homo Sapiens
gtaaaattagtttctagtcatttgaactgtttttattttggtgtatagaagtgatcaatagtatatattcttgcttgtcagagaatacccaagttgtattgttaaatgttaaaacaatggggttacataacagtatagttggatagggaggaagattctagctcaaaagttgcaaaatacagaaatacaaagattagctttgaattggagattgtactataaatagtagatgttaatgtggtggtttctagatatatactttatttttaagttacaagaaattgtcttttatttttgcagttttgaactatatgattctttacatgttttaaataaagtttttatcaactaaaa

SEQ ID NO: 268526 - DNA, 498 bp, Homo Sapiens
  misc_feature (467)..(467): n is a, c, g, or t
  misc_feature (480)..(480): n is a, c, g, or t
tcctcggtggagtgaccaaaaccttcattcctgaagggtctgggccatttgtcttcctgcgtggattgggctgtggaactttcccactgaccttaatcacagggcatggtaatactaagagatgccctaatggatatcctgtattccacacatattcttcctcacctccactgtggcatagtagactgatttcatcttgacagtctgggtcaatctccccagccaacattgtaagtctcttcttagcctgttgacttaaaggtaggagaagcccagtgtccgggtgggcaatcttaacttccagtttaatgggaatcattgttgtgtctcctgggtggcagtgttcctccctctggaaactaaggacctcttaggcccagcaagaacataatgtccaaggggaacagttatggcaaaaaatttttgcggggaggatcattagggggcaatgggtgagtgggtgcacnttcacttccaagnggttttgaatcccggacc

SEQ ID NO: 268527 - DNA, 350 bp, Homo Sapiens
  misc_feature (129)..(288): n is a, c, g, or t
ggagacagggtcacccaggctggagtgactcactgcagcctcgatctatgggcttgggtgatcctcatacctcgcctcccgagtagctgggagggactacaggcacatcccaccacgcccagatttgannnnnnnnnnnnnnnnnnnnnnnnnnnnnnnnnnnnnnnnnnnnnnnnnnnnnnnnnnnnnnnnnnnnnnnnnnnnnnnnnnnnnnnnnnnnnnnnnnnnnnnnnnnnnnnnnnnnnnnnnnnnnnnnnnnnnnnnnnnnnnnnnnnnnnnnnnnnnnnngtgtgagccaccgcaccggccttacaattctttcttctacttagaaagttcacaataaaaga

SEQ ID NO: 268528 - DNA, 389 bp, Homo Sapiens
gtgggagtagatttgagaccctgcttaggacacctgtgaaaaatgcaggggaagatcagttttgtgtagggagtgaaaatagttaagtggtaggcaattcgactgaggtggctgtagtccctgaattcctacttttaaaagatctaactcaagccgggagccgtgcctggcagagatactagtcttttttcacaaattgtagagaatcaaggggtcagaaattatttgttttcaactcaataccagcatttgattggggtgaccagcaatgtgggcccaaagaaaggaaagtcgggctgggtgaacacagtcttaacatctgaaggggttagctttttcaaacggaaaagtacaccagggagatttcctttcagccccaggggattaca

SEQ ID NO: 268529 - DNA, 399 bp, Homo Sapiens
  misc_feature (163)..(163): n is a, c, g, or t
agctagcaccatgagcttcaataccctgaagggtcgacgaaagcaagcgtgtacatagcccaaatactacacggggtaaatgaccagtaacttgctgtgagaatgcctgcctacatactaaaactgtactgacttgagtattaacttacatagatgatggctnggaactcggagactctatttttaattatatcttggttactaatggaatttgatctgtattttcttctttgtcaatctaagattatgctttccttccttcccattgtgggttcaggctttgacaaagcagtctccctcaggagcttgaaccaagggagactgggaaaaacacaatatatttagaagtgatgtagaattagacacgtttgggaatgatgataaggggagatcacattt

SEQ ID NO: 268530 - DNA, 601 bp, Homo Sapiens
  misc_feature (347)..(405): n is a, c, g, or t
aagtgctcattgactttctaaaaacaatgcattctttccatcatactgacacatctatagaatatctcttaatctctttctaaaatgtaaataggatcctgtctaaatgtttaaagtgttgtgattccaaaagtactcaattatcatgccactgatgaaaaaaactgttatgttctttgaacaaagaaaatcctacttgatcacctttttggcaacaataatatataaaatcctcctaaattacttgattacatcatttttatattagtttgtttactattaggctggttctccaaacctataacagttccagacatatagtaggtcttaaaaaaaatacaggctgnnnnnnnnnnnnnnnnnnnnnnnnnnnnnnnnnnnnnnnnnnnnnnnnnnnnnnnnnnncttggcctcccaaagtgccagccaattcaagatttttaaagatttaaaatcactttatgcaataattgtagattataaattgagtttaagaagaagcttataaaactcactttctaacgtaactttaaaatgctcatggtttttcaactttcagatcaataaaaataagggtttttaaattttttagcttgaaagc

SEQ ID NO: 268531 - DNA, 711 bp, Homo Sapiens
  misc_feature (611)..(611): n is a, c, g, or t
  misc_feature (672)..(672): n is a, c, g, or t
  misc_feature (679)..(679): n is a, c, g, or t
gattccccacactacatatcagtattttctatctgtatctggacaatgcagtagaaattataacaaatacaaagttctttgtgcttttctgctgcatatgtcagtggctctggagattgttaccatctgctacatatataaatagacttgcagttattactaagctcctcttcagtaatagaaagacttatgaagtcttttactacctctgggttagccaaacaaccttcaaaaagcattgttatttaggttaaatatctgtggacaagaaacaagataatcagttactgagtgaagaaagacgggaatgatgtcccatacttcccagctctctaaagtgttatgctgtacaattaaaatacccctgacccatccatctgctaccattcgttgtgggataattcatgtaatctctaacctgtgggcaagtctttacccttcagtagtcaagattacgttagagacttcgtccacgaatccacaccacctttcccatcagttctcaccggaaatatgcttgccaaaaagaaaatcagcttttctaagatcaagccagagttgcttctcttacaaccttacggcgctaatgcattaagtttgaagtcgactgncaaagagggcccagcataggggcagcaccccatcattttgtttgaatttctccccttaggnaatttgnccttccttttgggccttctggtccacaggggc

SEQ ID NO: 268532 - DNA, 468 bp, Homo Sapiens
  misc_feature (31)..(31): n is a, c, g, or t
  misc_feature (38)..(38): n is a, c, g, or t
  misc_feature (49)..(49): n is a, c, g, or t
  misc_feature (54)..(54): n is a, c, g, or t
  misc_feature (78)..(78): n is a, c, g, or t
  misc_feature (97)..(97): n is a, c, g, or t
cccaaaccaggaatattttcaagcctgcctnctttaangcccggggaanaaaantggcctgaaaaagccatggcccgncgcaaaaccctaagaaatnagggagcctgcctgagagaaacaggtaagccccgtgggggtgaggtgcgcctagcaggtaaacaccagtggggaggggctgaggctggcaagttcccaagcacaaccctaaagggtcttccatgcccaggataaggccttattttttggaacccgtcccggaagctcccaggaagtcagatggaggctttaaagcaagacagtaacaaggtcaaaatgccattttagaaagatcactcaatgaaaataaacttttgcaaacaatttaacccaccaccccatctctaagaagctggggtaaaggaacagtcgaggatgtgtttacagatttagctgcaagaatgctcactgcagtgtcgttggtaacagcaa

SEQ ID NO: 268533 - DNA, 321 bp, Homo Sapiens
attaggaaaggttgactggatagaaataaagcagctcctttaaaaatattgtagattgaagagcaggatttgtgacactcatatctgattaggttaaaaattaaatcaaggattagttaaaataaaatgctaaagttaaatatcaagacaaataactatatatcatgttggtaatataaccacaggtggaacacattatccttgtaaccctctgcgatacatggtaaaaattaaaataactgcgaagaaatcccaaactttattacatttgttgtttgaactttattatatttgttgacagtggtattagtgtaattttga

SEQ ID NO: 268534 - DNA, 381 bp, Homo Sapiens
  misc_feature (199)..(199): n is a, c, g, or t
  misc_feature (264)..(264): n is a, c, g, or t
  misc_feature (267)..(267): n is a, c, g, or t
  misc_feature (301)..(301): n is a, c, g, or t
atcaactgctccacaccggccaactacttccacgtgctgcgccgccaaatcctgctgcccttccgcaagccgctgattatcttcacacctaaatctctgctgaggcacccagaggccaagtccagctttgaccaaatggtatccgggaccagcttccagcgggtgattcctgaagatggggccgcagcacgggccctgnaggcaggtgcagcggctcatcttctgcacgggaaaggtgtactatgacctggtgaaggagcgganagnccagggacctgggaggagaaagtggccatcacgncgcctgggagcagatctcttccatttcccctttcgacctgattcaaggcaggaggcagagcaagttacccaggttgcgga

SEQ ID NO: 268535 - DNA, 294 bp, Homo Sapiens
tggatacaccaatgctcgaaagaactgggttatcagtccagttagtgtagttggtttttaaagggagtataggggatttggcaaataagagaatgagaatatagcaaacctatacacactagaatatttgtcaatgtagaatttaatgttttttttgcatacaaaggttacattttagagtaaaaatagacctgtgactgaaggaaaattaaacacttcatttcctttttctgtttgagacagagtcttgctctgtcgcccaggctggtatacacgtgagccaagatcacacca

SEQ ID NO: 268536 - DNA, 323 bp, Homo Sapiens
actacactacatttttagtgtagatcccaaatatttagcgtaagtatggtttgtgtaatatttaggatgctcatattttaaaacggtgatactggaatgcttctcccaaccgtcatgaagctggcactttccttacccagctgggacttggggtccaacggggtcttttctgaccatgttgtgtaacgctcacaacctccctcagtggagtcatcgctggcttatcacctggtttcattttcatccagcacttatcgctatcccaaaaccatcttctttcttatgtacatatttgttatgtttctgtaaacttgcatagagaa

SEQ ID NO: 268537 - DNA, 502 bp, Homo Sapiens
  misc_feature (42)..(42): n is a, c, g, or t
  misc_feature (78)..(78): n is a, c, g, or t
  misc_feature (83)..(83): n is a, c, g, or t
ttaacccctttcaaggaactggtgaacttcaaataaaaaccntcacgaacaacccctggtgcccttggaacaggccantaatncctacccatggctttcctaaaaagaaggagattccagaggtgaaatactcagcacaggacctgacaaacttagcctaacactgtctcaaaggtcatggccatgggagcacgtgcatacctacaacatggaaccacaccactctcggcacttccagccatcaccttacatccggctggttggacagccagtcttatttatttttccacttgaaatgccataaggggtttcactatttttacttcaaaagcagcaccataaaaatccttgatgattagagctccagctgtcttaagttgtttgtcaagggatcggttactcaaatctcctatggagggaaacaatttcaggcaagaagccatgggagctgagaaacgcaaatgtctcatctctgaaaactttcagactccctcctgttcac

SEQ ID NO: 268538 - DNA, 591 bp, Homo Sapiens
  misc_feature (19)..(19): n is a, c, g, or t
  misc_feature (35)..(35): n is a, c, g, or t
  misc_feature (59)..(59): n is a, c, g, or t
  misc_feature (64)..(64): n is a, c, g, or t
  misc_feature (77)..(77): n is a, c, g, or t
  misc_feature (96)..(96): n is a, c, g, or t
  misc_feature (137)..(137): n is a, c, g, or t
atcagtagccacttccccnaaatgacaagtagaangagacaataaaactctacctaggnctccngtcctaaagtganggcttaaacagtgttcctncaccagtttagaatacccagttgtaaagcgtccttcccctncatgtataaactaccttctgggagggagcctcgctaccctgaagcacaggacatttggtgatcagggacacttaagcctcgcagctcagcaggtctgggctatgacactaaggaattcttaccgctctttggagtggggtctggcataagggtctagacaaggacccagggttatttctcagaaatgccctggaagcccctagtaattgagaccttacagcaatcctatgagccattacaaaatggaagtgcaattaaaaatggttttgttttttagggagaaaacctgaataaggaaaaatgttatttgacttatactctggactcctccattctgaatgtagactgcctagatttacaaaaccaaattatgagaaatcagaaatgctgcccatccttttaactctgctcttggttatctgaaagggtccgaagatggaatgactaaaatctg

SEQ ID NO: 268539 - DNA, 751 bp, Homo Sapiens
  misc_feature (106)..(106): n is a, c, g, or t
  misc_feature (308)..(308): n is a, c, g, or t
  misc_feature (310)..(310): n is a, c, g, or t
acgcgtccccaaggcctcctgtgactggcagcattgactctgtggctttgcatcgtttccatgacaacagacacaacacagttctcggggctcaggaggggaagtncagcctaccaggcacgtctgcagaaacagtgcaaggaagggcagcgacttcctggttgagcttctgctaaaacatggacatgcttcagtgctgctcctgagagagtagcaggttaccactctggcaggccccagccctgcagcaaggaggaagaggactcaaaagtctggcctttcactgagcccccacagcagtgggaagnanagcaagggttgggcccagtgtcccctttccccagtgacacctcagccttggcagcccctgatgactggtctctggctgcaacttaatgctctgatatggcttttagcatttattatatggaaaatagcagggttttagtttttaatttatcaggagaccctggccacccattccatctccatccaagcaaactgaatggcattgaaacaaactggagaagaaggtaggagaaagggcggtgaactctggctctttgctgtggacatgcgtgaccagcagtactcaggtttgagggtttgcagaaagccagggaacccacagagtcaccaacccttcatttaacaagtaagaatgttaaaaagtgaaaacaatgtaagagcctaactccatcccccgtggccattactgcataaaatagagtgcatttgaaatacccccccc

SEQ ID NO: 268540 - DNA, 365 bp, Homo Sapiens
atatatttaaaaatatctctggcctcttggatcttatgaaagtccaaagaattactggaaacttccatctaagaaacaagaaatacaccagatttatgatgtctctggggcagagaaagacatatttcaaggatttttatccaaaacagacaggtgaaaaaatgacagggggagtccagacgagaaaatgtatagtaaggaagcttccattgcaattactaaactgggagcagtgggattgaatgaatctaaatgtggggctaggaactgatgtgtttgggggaaggaaattccaaagagggcattttcattttcaacagggtcattcctaggaaagggagcttttaatagtgttcagagacatg

SEQ ID NO: 268541 - DNA, 445 bp, Homo Sapiens
  misc_feature (389)..(399): n is a, c, g, or t
  misc_feature (423)..(423): n is a, c, g, or t
gcaaaatcagtgatttagtcagatgagtttttcgttgtaggagcacttgatttctagtgtgttttgtacagtatataactacaagatagtacattttgtagcagttcaaagccaaagttgctagcatcattttgctgttgtgccagttaatcataggatcccattaaataagtgtgctaacatcgaatatagagaaaactggtaaagaacattccagtaggaaaagaaaagaacaatcttccatttctgggcttggccaccatcaccctgggtcggacctgtcctgggacttccaaccttgactgctgagctcctgggcttagcttcttggggttcctaattcctgggtgtttaattaattctcttccacgatccatgtttttctggannnnnnnnnnncaggaaataatgtttttttaaaangaccaaaaaccaaagggggaag

SEQ ID NO: 268542 - DNA, 459 bp, Homo Sapiens
  misc_feature (142)..(142): n is a, c, g, or t
  misc_feature (312)..(312): n is a, c, g, or t
  misc_feature (386)..(408): n is a, c, g, or t
  misc_feature (448)..(448): n is a, c, g, or t
agtctgacaggacaataaaatttagaaatggagttggaggatgtcataatacaattcaccagtgtcctatcttacatgcaatttcaaaggcagacaagaggaagtcatcagtcacattttagaggcaccaaacaggcgcacnatccatacaggctgactccctgctcccagcccattttttcctgaatctttggcttgccaattcaagaatgtcctcaaaatttgctcagaggtgtgggcctttgggtaaaggtgtcttcagaagctccacattaaagatccatcagtggttaagggcaaattgaaggaganataaagactaaggtatttttttaaaagactgaaagaataggaacaatggaaaaagccccatctgttattacagnnnnnnnnnnnnnnnnnnnnnnnggaggaccaaggtcttcttcttctgttcaccccgggggtnggaaagttagg

SEQ ID NO: 268543 - DNA, 429 bp, Homo Sapiens
  misc_feature (254)..(254): n is a, c, g, or t
  misc_feature (346)..(375): n is a, c, g, or t
gtttgtttgtaatagcacatcccagagacatcagaaaccagcaactgattcagtgtgatttccagactttttaggcatgaaattcggacacttcagtatttccaggaatagcatatgcacgctgttcttgccttcatggaatgcctacatgctttctgtttttctcattttggatttctccaaaactaactgaatttaagcttcaggtccctttgtatgcagtagaaaggaattattaaaaacaccaccaaagnaaataaatatatcctacttgaaatttactctatggacttacccactgctagaataaatgtatcaaatcttatttgtaaattctcaattttgnnnnnnnnnnnnnnnnnnnnnnnnnnnnnnccacacttgtctgcaagaatattgattaaaattgctaaatttgtacttgttcac

SEQ ID NO: 268544 - DNA, 463 bp, Homo Sapiens
  misc_feature (442)..(442): n is a, c, g, or t
ggaaaattcatggtgaaagaaatgtattcgaaggaatctttaacaatgccatcttctgcacaattgttttaggcacttttgtggtacagataataattgtgcagtttggtggaaaacctttcagttgttcagaactttcaatagaacagtggctatggtcaatattcctaggaatgggaacattactctggggccagcttatttcaacaattccaactagccgtttaaaattcctcaaagaagctggtcatgggaacacaaaaggaagaaatacctgaggagggaattagccagagggatgttgaaggagattgatcacgctggaaaggggagttgcgggcgtggcccaaatcttgtgggtttaggaggtcttgaaccagatcccaaaccaccaggtttccgagttggtgaattgccttttccgtagttcttttattatggnaggggttaggaaaaaaccccc

SEQ ID NO: 268545 - DNA, 419 bp, Homo Sapiens
acataatgtccaagggaaacagtatgcaaaaattttgcgggaggaaccattaaggggcaaatggtgagtggtgcccacttccaacttcccatgtgttttgaatccctggacctgtgaatccctggctatgggaaaaacagtaccacatattgcatgctgattcagagcatacatggccttctggagaactttgccccagccctgcaaactattgcctagttggcattgtaatcatgacttcaaaaggccattctactgttctatcaatccagctgcttcaggatgatggggaacatggtaagaccagtgaattctatgagcatgagtccactgcggccattgtttagcaataaagtgagtgccttggtcagaggcaatgctgtgtggaatagtatgatggtagataaggcattccatga

SEQ ID NO: 268546 - DNA, 641 bp, Homo Sapiens
  misc_feature (24)..(24): n is a, c, g, or t
tcctgtgcctgttcaagttttggnaacctcgccttcctttgtgttgttaattcactggagttgggaacctgaaaatggacgaacctgaaagtgctatcctgcgctgcttttccctagggcttgggttgtaattaaaaggagtcactctggcagcaacagtcccactaggtgaactgtgtttgcttgagctgctagaactgaatggggtacgttccactatagaactttcattagtctctgatacagggacaggattattttgtccctggttttatctcagttcctttttggtcaggggcatccacctgaataaaggagttcaggcgattttccaaacccacggtacgcatgggaacactgccattaccccacattttgttttgccctgattatcttttgaatctttaatgtttggatttgccttttctgaaacactgtcaatcaccgggggagtattacctgtgggagatcttccagatctaggattgttaatgggacagtcctcaattctcacccaaacatcctctgttttagaaacagcaggtgccatttgataaattagagtctttgattcagcaccatttgtagcacctgaggaaacggtctgagaagtactatttgtgggagaaaattcattttct

SEQ ID NO: 268547 - DNA, 519 bp, Homo Sapiens
  misc_feature (469)..(469): n is a, c, g, or t
ttgatacaaattaacatgtgaatcacatttccagagagaatttccataattgagcaattcttttctgaatggatttaagccttaattttcagttttcctctttctggttgaaattttactactataaaagataactttagcactgattttagtaccaatcttattattaacctgaagtgacacttaatttagaactaggaactcaaaccttccgactgttagcctcgttaatggggatattttttaaaaaatagatgtgtgtaatgttacattgattgtgttctagccttgtaagttgatatagttggcagcctagctgtatttctcagagtttgtcataatctatatttaaaataacatgaaacactttgaaatgtcacttatagctagttccaatgatatttttaaatgtattataagtaatatcaatttcatctttccacaggctcaaagtctaactccccagggnctataatctgaggtgggtcaggccttttgggtgacagtggggtgaagtcc

SEQ ID NO: 268548 - DNA, 469 bp, Homo Sapiens
  misc_feature (18)..(18): n is a, c, g, or t
  misc_feature (38)..(38): n is a, c, g, or t
  misc_feature (54)..(54): n is a, c, g, or t
gttggtcatattaacccnggtttatcccttaggtctanctgcaaggggttagancctggccccaggtcaccaatccattctgtccaatcccagcccaaggttcccctcccacatatgaaagatggacccatggccaggatacaactgattgtgtggcacccatgtattagcagtgggaatatgtatcacatatgatgcagcctttcatatttcagcagtttgccactgtgactgtctggcaagcccccagatggcgttatattaattggattagattattttgctcaccttatgtaatactgtaacttcctataacctaatattttcggtatcattaaccaaaatttcacactcatagttgctaaagagaatgttattcaatcattaaactctgaactgatttcttctatacatttaaattatccaccctcaataatacgggtgctcaaccctatgcattttttaagtg

SEQ ID NO: 268549 - DNA, 422 bp, Homo Sapiens
  misc_feature (18)..(18): n is a, c, g, or t
  misc_feature (44)..(44): n is a, c, g, or t
actttggggagcccccanggcaggcgggaacgtttgagggtcanggagtttgagacccaccccgggcaatgtagccaaagaccctgtccctgcaaaaacaaattaaaagataccctgagagctcccctttaatatcaaggtacttggcatcccattccccaccctgttagcctcttaagggaggagggaaatcaattccaaccatactttcctgtgatggaagatgtttcctcttgaaaaaatgccaatacagatttttaaaacctattgttttccaaatgcactttgtaagtttttgcttttaaaatagcttcttggaaccaattttattgtatttgtacttaatttttgttctcatctaaatgtgcattttctgactgtatagaagaagctttggtatgtaatttaataataaattagaa

SEQ ID NO: 268550 - DNA, 395 bp, Homo Sapiens
atttgtcactagattccagcctctcaaattactgacacgcatcctttttatgtaaagatgacattgttctttcctgatatattgcattcctcatgaatttcttatagtcatagaatttttataaaccatttcagaatcgctgaaataaacatcaatatttttaactttttcattctgtcaaaaatattgtatgcagagatattgctgtaagtgtgtatacctgtgcttaagagactagggctgaagagaagtaatcaaccgaaccactggtgtaaatgtgcgtcacatttttagtgactaggaaattgaaataattccaacaaatttatgtgctttggggcttgaggaattcagactgccttaggctaaaggataaaaatcttttcctgggtact

SEQ ID NO: 268551 - DNA, 636 bp, Homo Sapiens
aagcagctatgaatccattgtccttgtagtttcttccctcctgttctctggttatagctggtcccaggttagcgtgggaggcacctttgggttcccagtgcccagcactttgtagtctcatcccagattactaacccttcctgatcctggagaggcagggatagtaaataaattgctcttcctaccccatcccccatcccctgacaaaaagtgacggcagccgtactgagtctgtaaggcccaaagtgggtacagacagcctgggctggtaaaagtaggtccttatttacaaggctgcgttaaagttgtacttaggcaaacacactgatgtaggaagcacgaggaaaggaagacgttttgatatagtgttactgtgagcctgtcagtagtgggtaccaatcttttgtgacatattgtcatgctgaggtgtgacacctgctgcactcatctgatgtaaaaccatcccagagctggcgagaggatggagctgggtggaaactgctttgcactatcgtttgcttggtgtttgtttttaacgcacaacttgcttgtacagtaaactgtcttctgtactatttaactgtaaaatggaattttgactgatttgttacaataatataactctgagatgtgtgg

SEQ ID NO: 268552 - DNA, 414 bp, Homo Sapiens
tttcggcacaggaaatctgccctacaaaatgctcttcattggttgtctctgtgagagcactgtccccacccaacctgtcacaacggccagaaccatacaccagagacacactggcaggttaggcagtccttctggtgatcctattccattccctcctgctgcggtttctcttggcctgtcctcactggaaaaacagtctccatctcctcaaaatagttgctgactccctgcacccaaggggcctctccatgccttcttaggaagcagctatgaatccattgtccttgtagtttcttccctcctgttctctggttatagctggtcccagggtcagcgtggggagggcacctttggggttcccagtggcccagcattttgtagttttcattcccaggatttattaacccttcctgg

SEQ ID NO: 268553 - DNA, 523 bp, Homo Sapiens
  misc_feature (19)..(19): n is a, c, g, or t
  misc_feature (29)..(29): n is a, c, g, or t
acacgtatcctaatatttnatcatgtgtntgtattaaaatttacttaacttttcccgtactccttagacactcatttacacctgaaaattttgttgtcctaaataagcctgaactctcttattaataaataagtggaaggaaagagagggagttgctcccacccttccctgggccatccacccagccatcttctctaggtccccgcttccctccaccgcacacagccccaccttaggccacccacatgctttgtgggagggtcactacttgcaccctctgagccgtctggttatggtccctcaggaaagatgcccctgcatccttattgtccacccgccgaaggcggccagtggggacagaccccacctcccattctgcttccttcttttcagttccctggcaaacctactgctctaggctctatgagtgcatcaaacattcctgaaggcttgtgtctaacaaaagaatttttggtgtaagaaaatattttaaattgtgtacaaaatgtgtcctcttctatag

SEQ ID NO: 268554 - DNA, 456 bp, Homo Sapiens
  misc_feature (14)..(14): n is a, c, g, or t
  misc_feature (32)..(32): n is a, c, g, or t
  misc_feature (41)..(41): n is a, c, g, or t
  misc_feature (47)..(47): n is a, c, g, or t
  misc_feature (79)..(79): n is a, c, g, or t
aattctggggaatnaggttcggggtatgattncaccttggnaaatgnctgaattcccattatggctccctccttgccanaggtaaacgggtctggtcccagaacaggaggaggacatgtgatgactggagtaacgatgaggggctctggggaaggacagggctgagagcaagtgctgggacctttgggaccgagtcatattctaaaaagagcacaggctttgggggagaggagctgtgaggccaaggcagcatccccctggggagcttgtcaggagtaacaggagccactggcagtgtttgggcttttggtccctttttttctctcccaggggaagggagaaggaggcattgcaggaagccagccaccctgagcacagacccagctacagaacagacttgagctgcgtgtccttggcaaatccccaagtgtttctgtgccttggtttcctgatatt

SEQ ID NO: 268555 - DNA, 563 bp, Homo Sapiens
  misc_feature (471)..(471): n is a, c, g, or t
  misc_feature (488)..(488): n is a, c, g, or t
  misc_feature (547)..(547): n is a, c, g, or t
aaatatatcaggaaaccaaggcacagaaacacttggggatttgccaaggacacgcagctcaagtctgttctgtagctgggtctgtgctcagggtggctggcttcctgcaatgcctccttctcccttcccctgggagagaaaaaaagggaccaaaagcccaaacactgccagtggctcctgttactcctgacaagctccccaggggaatgctgccttggcctcacagctcctctcccccaaagcctgtgctctttttagaatatgactcggtcccaaaggtcccagcacttgctctcagccctgtccttccccagaggcccctcatcgttacttccagtcatcacatgtcctcctcctgttctggggaccagacccgttttacctctgggcaagggagggagccataattgggaattcaggccattttcccaagttgtaattcataaccccgaaccttaattccccaggaanttaacaacattgaggangttatttccggggttgttgaaacccatggacattggggttttggggggaacgggaaaangggaaggattaggggg

SEQ ID NO: 268556 - DNA, 438 bp, Homo Sapiens
cttgcctcagaataggggccagctccctaaagattttgcttgctaccctacagacagttttaggggccctagaatcttctcagaatgagagtatgtgcccagaggttagtcagctatgaccatgcagtattcccagcccccccgccccacgcctccaccatctgcttcctctgaagataccagattggctgtacaccaggatgttccgggaatccccaggagagcaacagaatgtgatggacccaaatatgatgcctcagtaactcattccaggatgtacaaactgtaactgtcaggatgctccttatagctaattaaaattcttctagttacatctattttctattagctctttctattttcagtgacatctaaaaggccaaaataatccctgtggtaccactgggtttttttctatggttttcagatagggaacga

SEQ ID NO: 268557 - DNA, 311 bp, Homo Sapiens
  misc_feature (33)..(33): n is a, c, g, or t
  misc_feature (94)..(94): n is a, c, g, or t
  misc_feature (275)..(275): n is a, c, g, or t
ccaggaaggaactgaggaccaagtgcaaggatnagtagccaggaccagagtggccgcctggaggtccccatctcacgtgtgatgccaccccgtnacccctcccctcctgagcagggatccaagaatgtgccaagagtcccgccagcctcagccaggtgggcctgtatatagggtccatgtgcaatagggaaggacgtcttctattttttgctgccccctccccgcccactgtctggggcagggggagaaggtattttcgagataaagcacaggcnccacaaataaaagtcgtgaagttgccaaaaaaataa

SEQ ID NO: 268558 - DNA, 495 bp, Homo Sapiens
  misc_feature (31)..(31): n is a, c, g, or t
  misc_feature (49)..(49): n is a, c, g, or t
  misc_feature (57)..(57): n is a, c, g, or t
  misc_feature (74)..(74): n is a, c, g, or t
  misc_feature (114)..(127): n is a, c, g, or t
aacctataaagagccccttcccccttggttnccctcctttcttcccagncccggggntcatcaactaagagccnggaccccttttaagtcgataagaaacagtttacaacctgnnnnnnnnnnnnnngaagtctgctgagagcttcccctgcacaataaaacttggcctccacaatcctttatcttaacctgaacattcctttccattgatcccaggtcttcagctaagctcaaccaattgtcaaccagaaaatgtttaaatttacctacagcctggaagcactcacccccgctgcttcgagttgtcctgcctttctgaactcaaccaatgtatttcttaaatgtatttgattgatgcctcattcctccctaaaatgtataaaaccaagctgtacctcgaccaccttgggcacatgttcccaggccctcctgaggtctgtgtcaccggccatggccactcatatttggctcagaataaatctcttcaaatatttt

SEQ ID NO: 268559 - DNA, 422 bp, Homo Sapiens
  misc_feature (37)..(37): n is a, c, g, or t
  misc_feature (132)..(132): n is a, c, g, or t
aacaactactttcaagccccccgaagcactcggttanaactgtcggtctaattggcacattattcctaattcattaaaaaagtccccaagggcttcttaggatactgctctatgttattagaagtccttccnaaatagaaaaactttattaatttaaaaataaccgccaattcagacttcgattcaaacaaggcattttaccaagtccggctgaaagagcttcttaccacatctggcatgtagaatggcagaagactatttttgctagattccttgttgctgcagccatttctgatgtccttttccccttcacacctttcgtgttacacatgtctgagatgacatgatgctaagtaaccaaagtactgctgcgatggaattgctctgatgtttttttccagagtgaaagctgctattacttt

SEQ ID NO: 268560 - DNA, 449 bp, Homo Sapiens
ttctaaaatatgaattcccatctgtatgaggtacttctttccaactcagtgactttttgcccagagacttggaagactgggcaatgttttctttcccctttcccaactcctggagacaaggcccctaggagcaatttccctcccagtagggcaggccgtagtccctgctctgtcttacttcccactgcagcaggaacatgtcctcgcctctgattccttctgtaccaagccattggtccattgaggtcaattgaggactcactgtaaattttaaatctgttaataaagcaaggatattggcatgttcctcttctcatcaatatcctaaaagacatttattttttacacactccttgggaaaaattaactttttttcactgaaaatatttccttttttggttatcttgatctcagattattttgtgaaagaattttactgtacttagttc

SEQ ID NO: 268561 - DNA, 589 bp, Homo Sapiens
  misc_feature (181)..(181): n is a, c, g, or t
  misc_feature (553)..(553): n is a, c, g, or t
attcttctgatgagctccaagacaactttcgagagttctatgacagctggcatagcaagtccactgactaccatggtttgttgttaccgcatatcgaggggcccgaaatcaaagtctgggcccagcgctacctacgttggattccagaagcccaaatcctaggtggtggccaagtggcatnctgagcaaactcttggaaatgatggaggaagtccagagtttacaagagaagatcgacgagagacaccacagccagcaggcccccccaggctgaggccccctgcctgctgaggaactctgccccgcctctcgtctttgtttccttgcgctctgctccagcgacattcctctaagcccgtcttacccaccagtggctggaaagctttgggagatgaagacgatttggccaaacgagaagatgagttcgtggacctaggggatgtgtgacctgtttgttgagtgcattgtgaaagaggaatgtgggagattgggacagctgatccctggatttgtgtcgacgctacagctcatgctggctgggtccttagcccgngcactccgttagaataaacctgggcttcgggaaata

SEQ ID NO: 268562 - DNA, 858 bp, Homo Sapiens
  misc_feature (187)..(187): n is a, c, g, or t
  misc_feature (224)..(224): n is a, c, g, or t
ggggggggaacccaaacccagaactgcgaggcgggttgaagcgttgggaacctcaaccacggagagaaactctctttaccgaggttaaggcttcaaggggggccccatcttgcccggacataggttaagagccattccaagtattagactggcaaagatcataccagactagtacattgttctaatnggtgactagcctcacctgactggtgaggcacataaanaacctgaaggtcaacggagagacaggtcacccagagagcgctcccacacccctgtgttcccaaattccacatcaactactctctctggctgaataaataccaagaaatacctccttcaaagacctataataaaaagcattcaagagacaacaccaaagtggagcagcattcatgagaactctgagatggaaattcccagtcagccttaatgctggagaatttactttaggatgtaaaaataacacgtaccgcctatatttccttcactttatttgctctcctctgcagagattactgctgtgtgtgcagcgtcataagagtagagaaggtcaggttgacaaaacttcttggtggggaataatctttagtcttccaaatatatatgccttgcaacttccaggccacaaaagcaaactctggtttggaaaatgccaagtcccatctccaaggaaactcaataacttccaaatggccccaagatcacatttgtgtggttataataaatcattaaaaacattaaggaataattcagaatgaaagagctttcagggttgttaatattttcttttcctcctagttttggcagacaatataaacctcagtaaagaaaatgcctgctaaataaaataggaaa

SEQ ID NO: 268563 - DNA, 421 bp, Homo Sapiens
  misc_feature (376)..(376): n is a, c, g, or t
  misc_feature (384)..(384): n is a, c, g, or t
gagagatttggatcttctgtcaagccaatgatttcttactaattgtgatcttgtgaaagtacttttccacacctcagtttcttctgtagaatgagcataatactcacattgcagataatctatagaataactaataaaaacaaaccttgtagtgtgcctgtcagaggtactcaataaatgttagttcccttttccctttgataaaatctgacctcatggagatgggagagaataatcttgcaatgagaataatttttacctcttgacttatgcatttttctacttaaattgggatgtctgtctaatgcttattatatataaacatgtgtaatatagctgcacctgggtttttgtcctagtgtttgatcctttgggnttttgaanccagaccttattaccggtaaaccattttttaagggcc

SEQ ID NO: 268564 - DNA, 933 bp, Homo Sapiens
gatgctcctaatttacatggagatgcctacctgaactgtttcctctctgccttgattgaaattccagcttacattacagcctggctgctattgcgaacgtgcccaggcgttatatcatagctgcagtactgttctggggaggaggtgtgcttctcttcattcaactggtacctgtggattattacttcttatccattggtctggtcatgctgggaaaatttgggatcacctctgctttctccatgctgtatgtcttcactgctgagctctacccaaccctggtcaggaacatggcggtgggggtcacatccacggcctccagagtggggagcatcattgccccctaactttgtttacctcggtgctttacaacagaatgctgccctacatcgtcatgggtagtctgactgtcctgattggaatcctcaccctttttttccctgaaagtttgggaatgactcttccagaaaccttagagcagatgcagaaagtgaaatggttcagatctggggaaaaaaacaagagactcaatgggagacagaaggaaaatcccaaggttctaataactgcattctgaaaaaatatctaccccatttggtgaagtgaaaaacagaaaaataagaccctgtggagaaattcgttgttcccactgaaatggactgactgtaacgattgacaccaaaatgaaccttgctatcaagaaatgctcgtcatacagtaaactctggatgattcttccagataatgtccttgctttacaaaccaaccatttctagagagtctccttactcattaattcaatgaaatggattggtaagatgtcttgaaaacatgttagtcaaggactggtaaaatacatataaagattaacactcatttccaatcatacaaatactatccaaataaaaataacatcattgtattaacgcaaaa

SEQ ID NO: 268565 - DNA, 539 bp, Homo Sapiens
tctgtactcttcttccctgtaatgatggggctagttgtcctcaaactgtttctcagacttctttttaagcttgcttcctgttcagttctgccaataggggtcactagagagagactgggaggcagaaggagagaatatgcttcctgtttttgctgttcttgttaatgttgcttacaggaccagcaatgcttcttcacctagagacacttctccccagcagtggcagtgccacttcagcttctttcagcactactggaatcagcctcagtgattccccctgtacccgctcagagattatccacagcagccagatggttctaccttccacaaagattgtggttgcaattctgggcttctaagttctggttacttcatatttttccttttgttcctccagccctagaggtggtagctgctttctgaagttattatttctagatgacttttggtttttcagcctttgtattttgcttttcagccctctaatgcctgtataaccaatttccctgtaataaataaatttcctccattgaaaaaaa

SEQ ID NO: 268566 - DNA, 290 bp, Homo Sapiens
  misc_feature (210)..(210): n is a, c, g, or t
  misc_feature (219)..(219): n is a, c, g, or t
  misc_feature (226)..(226): n is a, c, g, or t
  misc_feature (245)..(245): n is a, c, g, or t
  misc_feature (275)..(275): n is a, c, g, or t
tgcttaatttgtttgttttttcactttagcagtacattctggaaatctttctatgtctgtatttttcatcacatgggacatagcataatttaactagtacacgattgatttctcaatattacttttaagagtgacttaatgggagtcaatggcttaaccttccattcatggatttatggcaatattattatggggaccctattaaattcntaatccccngattttnaatttaaggccggcccgcnaagcttaattccccttttggtgaggggttnaattttaggcttggg

SEQ ID NO: 268567 - DNA, 294 bp, Homo Sapiens
aaaggaagcaatacagccatgagatggctatcatttatgacttggcaccttataaaggtaaaggtggcctgttttacctttgttatgtggtctattggctgaacattaaccacatatttacgcatctttctgttggcatgtaggaatgattgcatttctgtagtgggaggagcctggtaaatgatttttttggcatatgcagattagacagaaagacaggtatgacttagtaaataagtgttccattcttcaagagtagagtagacagtaacattcctcaattattgagtggcg

SEQ ID NO: 268568 - DNA, 295 bp, Homo Sapiens
  misc_feature (16)..(16): n is a, c, g, or t
  misc_feature (24)..(24): n is a, c, g, or t
  misc_feature (33)..(33): n is a, c, g, or t
cgcccttttaaccaanttgggtanacccccccntgaccaaaattgggagccatatttggttccccccctccctgatttcccccagaattccagaaactatttgtaagtattccttaacttatggtgatacagttatttgcataagtgcaataagaatctgttctaatttgtaacaggacacgattggagaaattggttgttttactaagactttgactggaatggtgtgcttttctttaaggaatcaaacttgacttatggaaccaataaagtccttggaaaaactgaagaaaag

SEQ ID NO: 268569 - DNA, 357 bp, Homo Sapiens
tttttgagctatacttcagctcaaaaagaggagctttttgatgtgatttgtcaagaatgtagattgttttcttgtgtgaattcttccctgtataatcctgatcattctattttagtggtaagagcccgagaaggagtatggatacctgtaaggctttcccgtccttggaaagcctctccttctgtgcatattattactgaaattcttcaaaagattttgaaggcactcttgggcgttaaattgctgctttaattttaggtcattatggggatgattgctgtcacaggctactgccacggagctgggagttgctttgcatttccacagtacaaaccagcaggactaatgtaaataatt

SEQ ID NO: 268570 - DNA, 393 bp, Homo Sapiens
  misc_feature (303)..(303): n is a, c, g, or t
  misc_feature (306)..(318): n is a, c, g, or t
agagattatttggagacataatggcccaaaagcttcccaaatctgatgcaagacataaacataaaaatccaagaagctccaatgaattccaaataggatgaactcaaagagatccaccccaagacacaagacacagtatactcaaactgttgaaagacaaagagagaatcttgaaaacaacatgagagaagcaactcattatgtagaaggaatcatcaatacgattatcagaattattgtcagaaatgtaggagtccagaatgcaatgggctgacatagtcaaagggctacagaaagaacaanacnnnnnnnnnnnnnctgccaaccaagaatcctacattcagcaaattgtccttcaaaagtgagtaagaaattaaggcattctcatattaa

SEQ ID NO: 268571 - DNA, 256 bp, Homo Sapiens
gacaaactttttaaatacatcctaagcaagggcaatcatttaggttgaatcacacacacacaaaatgcgctgacttttgactattttttatctcccccaaatgggtgatttcatgtagttcaatctaatacaaggctcctagtggctctggggcacaatgtgggaaaaagtcagaagggagaaggaatgttgaattttgcccaaatactttgccagaatgggagcctgattaccatgccaagggtgggtgctgccg

SEQ ID NO: 268572 - DNA, 503 bp, Homo Sapiens
  misc_feature (27)..(27): n is a, c, g, or t
  misc_feature (32)..(32): n is a, c, g, or t
  misc_feature (50)..(50): n is a, c, g, or t
cgttgacctgcagcctttttttgggtnctgcncccagtcaaggtgaaggnctggtccagctcctatttagaaaaccaagtgttacctaggtcctgtgttatgagaaggacttttagccacaagattccaaaagttagtcttggcaaaatgggacattctttgaatgttgttggagctgaatggctcctagatggtgtgctgagcccttccccatgagatgatgttccagaagaatcccagagatatgaggccatcctcttcagctccacaccaaagcaggcatccactcaaggccagctcaacacttcagctccacaccaaagcaggcatccacccaaggccagcccaacagttgaacccttccactagtaaggagcaaagcagcctggatcatggctgcacagttctcgggagaacagttgtctttgttttaatgggctgtctgtggccctgcagcttctctctactggccccaattctgagaatgcagttttaaaaatcac

SEQ ID NO: 268573 - DNA, 495 bp, Homo Sapiens
cagaccgactttttgccgatggttagaaaatcccttaaaaggtttgccaaaggaaacaaccgtgggagctgtcacagtgacacacaaacaacttacagacttccacaagcaagtcactagtgctgaggaatgtaaacaagtttgctgggccttgcgagacttcacccaggttgtttcgatagctcacactcctgcactgtgcctgtcacccaggaatgtcttttttaattagaagacaggaagaaaacaaaaaccagactgtgtcccacaatcagaaacctccgttgtggcagaggggccttcaccgccaccagggtgtcccgccagacagggagagactccagccttctgaggccatcctgaggagttcctgtttgggggtgtgagggaaaatcagcgcggattttaaaaagatggctgtgcctgcccggcgtggtgggaggggagctggtttcctggtgaactttctaaaaggaaaaataattttaagtaaag

SEQ ID NO: 268574 - DNA, 202 bp, Homo Sapiens
  misc_feature (128)..(128): n is a, c, g, or t
  misc_feature (143)..(143): n is a, c, g, or t
  misc_feature (167)..(167): n is a, c, g, or t
  misc_feature (173)..(173): n is a, c, g, or t
taaattcttaagctcctgaaataagtaggaaactcttgagagtttgtgaatacaggttaaccagatgggccttccctgccattaaagggaactaatgtggcagggaaacatgggattaggcattattncagtttaccaaggancttcaaaatttttcccagcatagnaaaagnggaaactttggaaggggtttaaaatttcc

SEQ ID NO: 268575 - DNA, 562 bp, Homo Sapiens
  misc_feature (24)..(24): n is a, c, g, or t
  misc_feature (30)..(30): n is a, c, g, or t
  misc_feature (35)..(35): n is a, c, g, or t
  misc_feature (45)..(45): n is a, c, g, or t
  misc_feature (68)..(68): n is a, c, g, or t
  misc_feature (284)..(284): n is a, c, g, or t
attcaagaaaacccagtgccctanattacnaccanggattcccanagagtccactttactcccctgcnaccctccaatggagcaggtgctggtatccatggctgggagccctgaaggtggatcacatcacagtactctttgccagacattccccattgccaaccctggagtctggttagccctgaagggtggctagaccccagaagggcagtaacaatcactgcagtctggctctcaggaagccccattccctagaggaagggggagagaaccacatcaagggnttcaccccatgggacagaaccctgaacagcagccattgagtcccagatctttccactgaaacaatctacccaaatgagaagaaatcagaaaagtaactctggtaatacgacaaaacaagattctttaatagcatccccaggagatcacactagctctccagcaatggatccaaaccaagaataaatctctgaattgccagaaaaagaattcaaaaggttgattatttaagctactcaaggagataccagaggaaggtgaaaaccgacttaaagaaaat

SEQ ID NO: 268576 - DNA, 496 bp, Homo Sapiens
  misc_feature (49)..(49): n is a, c, g, or t
aaagggtgggaaaaactggccccaaaaagcctgccagcaacactgtaanttgaaaggaaactggaacaccctccgaggttctcccgaacttcaattgaaccctcaaggggtttgaacaatccttgggtggcgcctatcaactcctctgggctgaagctgtccctgctggatcccattgcacggaatgttctgataaggagtagatgaggtggtgtttaccccaggactccggggatgaaaagttgaaagaagattggttactgtggtcctgaagctctttacactgagccagactgtcttgaggagtgcttacttcttcagaacaaggttgaactgagctagatgagattcttctttggtacaagggccgaccaggtcctctgggctcatactcttctaagctagggagcgaagaagaagatactgttcgagatgacaatgggtgaaatggctcttgaccaatagcatgttgatgattctgtatttgtacaaaagg

SEQ ID NO: 268577 - DNA, 815 bp, Homo Sapiens
  misc_feature (11)..(11): n is a, c, g, or t
  misc_feature (37)..(37): n is a, c, g, or t
  misc_feature (42)..(42): n is a, c, g, or t
  misc_feature (58)..(58): n is a, c, g, or t
  misc_feature (64)..(64): n is a, c, g, or t
  misc_feature (78)..(78): n is a, c, g, or t
  misc_feature (87)..(148): n is a, c, g, or t
  misc_feature (225)..(225): n is a, c, g, or t
  misc_feature (296)..(296): n is a, c, g, or t
aaaaaattcanctgggccatggtggtgtatgccctgnaaatncccagcctactcgggnggctanggcgggagaaccgncttgaaacnnnnnnnnnnnnnnnnnnnnnnnnnnnnnnnnnnnnnnnnnnnnnnnnnnnnnnnnnnnnnngagtgagtccccatctcaaaaataatacaaatatatttaaaaaagaggaccaaaacaacaattgtgcatggaagaanaaagttttaaggcagccatagtcaaaagacaaaactgacaaggaaattttttacctctgtggcacacaatnaattttaataataacaattatggattattactgataatgtacacctaagttatattagaattataggagtttcacataattttggaacatacaccaataacatatttatacaaatacagcccaaagaaaaccaaacaccatttcacatttgacaatgcttcctatataatttttatacccaaataagcccaaattatgtcattttaggactttagggaaacctaagatccttaaaggattaattaggttagaaaaatacataatttataatttgattttggaaagcttgtcaaatacaaaaggtttaaaacacttgacattacaaaataaaattacaggtcatcgtaaagtcatttatttaatccaagtgataattcaaggatttcaaaaaaagcaaaaaccttcattctttgagagaggtgacttaactttctaaacaagaagccctaataaaaacagcctgaagccaatcacatttgattttcaaaattttgtaaacaaactataagatttaatctt

SEQ ID NO: 268578 - DNA, 612 bp, Homo Sapiens
ttcagacgcggcagtgttgacccacctgcctcctccgcagagaattggcggttgtctgccgggtccgcgcggactcgcccagctcagataaagtacagaaagacaaggctgaactgatctcagggcccaggcaggacagccgaatagggaaactcttgggttttgagtggacagatttgtccagttggcggaggctggtgaccctgctgaatcgaccaacggaccctgcaagcttagctgtctttcgttttctttttgggttcttgatggtgctagacattccccaggagcgggggctcagctctctggaccggaaataccttgatgggctggatgtgtgccgcttccccttgctggatgccctacgcccactgccacttgactggatgtatcttgtctacaccatcatgtttctgggtgaggggaactgtgggaaatattgactggcctgccagaaacacagaaatagaagcatgctggtgaatggtcaaagtctttggcaccttatttcacttctgctgtgatcaatttcatgctgttgacctgtgtgtcacttaagctgtgatcccataattctttttaaaatattaaaataacatttaattttcaaaa

SEQ ID NO: 268579 - DNA, 569 bp, Homo Sapiens
  misc_feature (351)..(401): n is a, c, g, or t
  misc_feature (490)..(490): n is a, c, g, or t
  misc_feature (517)..(517): n is a, c, g, or t
  misc_feature (557)..(557): n is a, c, g, or t
cactaaccctcatggtagttagccatacttgggcaaattgcaatgaacgctcttggaattctatgtttttcctactgatcccacagaattcaggaaaaatattccctgggaaactttaatatagcttataaactggcagattgtattttccaaatccagatcgtattttccaacaatatcttctatcccatatgttctttgccaaagttaccatgccactcccttatcaaatggtagagtctattcctctccccttaaatctgggcagattcatgactgctttgaccaacagagtatggtagtaataatgctacgtgaattctgagaccaggcaacaaagacataagcctnnnnnnnnnnnnnnnnnnnnnnnnnnnnnnnnnnnnnnnnnnnnnnnnnnntgagaagtccagttaccctgatatgggctatgctagagaggctacatgtaggtgttctagtcacagtcccagctaagtccagcctctgncatctcctggccaggtcactagaccgnttaagagaagccatcttagatctttccagaccagaccaancgtcctcgtgcc

SEQ ID NO: 268580 - DNA, 486 bp, Homo Sapiens
tactgatcccacagaattcaggaaaaatattccctgggaaactttaatatagcttataaactggcagattgtattttccaaatccagatcgtattttccaacaatatcttctatcccatatgttctttgccaaagttaccatgccactcccttatcaaatggtagagtctatccctctcccctttaaatctgggcagattcatgactgctttgaccaacagagtatggtagtaataatgctacgtgaattctgagaccaggcaacaaagacataagcctctgcctggttctcttggaatgttcactctgggggaatatagttaccatgtgagaagtccagttaccctgatatggctatgctagagaggctacatgtaggtgttctagtcaacagtcccagctaagtcgcagctctggccatctcctgccaagtcactagacctgttaagagaagccatcttagatcttccagaccagaccatccgt

SEQ ID NO: 268581 - DNA, 434 bp, Homo Sapiens
  misc_feature (368)..(368): n is a, c, g, or t
  misc_feature (404)..(404): n is a, c, g, or t
aaatacttacgttataagcatatctagtatttaagataataaaaatattaatgctgaatgtgtgatcttgcacttatttccctactgccacaactcagatgagaggccagatggagtctcatctgaaggagttagagcgtgtctgcgattccttgacagcggcggaacggaggcttcacgagtgtcaggagagtctgcagtgctgcaaggggaagtgtgcagaccagggaacacaccattaggggagcttcagggccagggtgtccagccgtccttctgagtttttgctagatgcgttaaaaagaatgcttttggaatgatttcacccagtttgaggggcacttcatgtcaggggctttgaatttttnaaattccccatcttactttaggttccgtaaaaaccntccatttttccatgccaggttacttattaa

SEQ ID NO: 268582 - DNA, 475 bp, Homo Sapiens
  misc_feature (317)..(317): n is a, c, g, or t
  misc_feature (421)..(421): n is a, c, g, or t
  misc_feature (428)..(428): n is a, c, g, or t
  misc_feature (436)..(436): n is a, c, g, or t
ggttcaaagagtgtcactgtcaatctgggcacctcccactagctcacctctcctgcaaattcactgggctagcaaaagtccccactggaagcagatatgaaacatatcttacatgtgcagagctcactgtccttcccaagagctttcccttctgttatcccagggaaaccctcgtggtgaccttgcaggcacctggggcagagagccctccttcccttcactgctgagcagggttgccagatttagcagaaaaaaatctatttgttttctaggctgaaactcaaatttaactggggtgttctaggattttcattctngataaactccactgtttaagggaaacagaaggcaaagttattctgggggttcacaaaattttagggagagccccatgtgagtttaaggttctttttggcccggngttgggnttttatcntgttaagggccacaggtttacatgttttcatggataggc

SEQ ID NO: 268583 - DNA, 339 bp, Homo Sapiens
  misc_feature (87)..(87): n is a, c, g, or t
  misc_feature (137)..(137): n is a, c, g, or t
  misc_feature (165)..(165): n is a, c, g, or t
  misc_feature (209)..(209): n is a, c, g, or t
  misc_feature (310)..(310): n is a, c, g, or t
gtagtacatgcttatcatagttgaaaaaccattgataagcacatgcagataccatccaaaatttttatcacccattgaatacctttnggcaagatttagaaggatagaatcagactgtacatgtcattttatatagngtctttctgcacatttactataaaactntccatgtgattataaatctcatttaatagctaaattacattgtnctatggaagtagtatttgtttagccagctaactgtttaggcgtttatatttctcccagttccttggctattgaaggaacagtggctttaaaatcacctttnggggcatttatggttacttccggtttgga

SEQ ID NO: 268584 - DNA, 424 bp, Homo Sapiens
  misc_feature (66)..(66): n is a, c, g, or t
  misc_feature (73)..(73): n is a, c, g, or t
atggggggaaaattattaacccccccaagtggggtgccatgggtttaaaaaatgggatccacaatngatagangtccctccatgaatgtttaccaagttggtaagggaatacccgttagtgaaagaggcaaaagaagtggggttcctgaaaatgccagtttcccccatcccaatgattttgataacaaaattcccaacttttcctcaatgaaactgatgcagtattatttgtgcaaataaaatgtgtcataaatatgcaaagaaagggagacatactgttcttatcttgaatatgtgcatttaaatgaattgtccaaaatgcataaatgccttgcgttctataaaggaaacaggaggtcaaaaagacagcgagatatctagtccttccacaaggtatggaaagcaataaacatcttcctttctt

SEQ ID NO: 268585 - DNA, 1252 bp, Homo Sapiens
  misc_feature (35)..(35): n is a, c, g, or t
  misc_feature (59)..(59): n is a, c, g, or t
  misc_feature (74)..(74): n is a, c, g, or t
  misc_feature (91)..(91): n is a, c, g, or t
  misc_feature (102)..(102): n is a, c, g, or t
  misc_feature (213)..(213): n is a, c, g, or t
  misc_feature (1233)..(1233): n is a, c, g, or t
gcagaactgatcaactgcgactagagacgtctttnaaggaaattttccttttcctcttnctggtctcctacagntttacagctgagctttngaggtttgganaattcaagatgtttgtttcataagaaaaggggcagaaagcaagcacaagacacttttaggtctagactaaaatggtagttacaacaatttgaaccttgttggtgcagtgcnggttgaatgcttaccctgcacagcctctattaccttaaggaattagttgtcattttcctattgaattttgagtaaatggtgaaattcagtgtcctttagaatcgactcccaagactatatttgaagaatgcattgattcaagaaggacatttaaaagcaaattctgactttttcaagaccaacacacttgtttaggcctattaaattgtactatcacttgttacatgccctctgaattgggagaaagtgggcttgcacactttgaggtaactaactgtaatttacttgtgttctctctttcttgctctccttctcaacatgaacacaaacctctatggaaaagtagcctcttgttaatctgatctagtttgtatggaaaaagcccatggagaaccttatctttaacaagctcccagaggtgcccagatttggaaattctagagagcagtggtgaccttttagcaaagcttctgtaacagttcgaatgagttgcagaacattccactccatcaaatgacactgtaaacaaatcacttcaagagaggcttggttttgtgtggcacagatggacccaagctttcatgctgtgcactgagatagaaactccacccgcagcgcctgcgatggatggagcagtgtgccctgatgctcaaagcgtattaaaggaaaaaaagtgatcagcatggaaagtttttatggggaaattataactccaagtgggtgcattggtttaaaaatggatcacaatgatagagttcttcatgaatgtttacaagttgtaaggaataccgttagtgaaagaggaaaagaagtgggttctgaaaatgcagtttcccatccaatgattttgataacaaaattccaacttttctcaatgaaactgatgcagtattatttgtgcaaataaaatgtgtcataaatatgcaaagaaagggagacatactgttcttatcttgaatatgtgcatttaaatgaattgtccaaaattgcataaatgccttgcgttctataaaggaaacnggaggtcaaaaagacagcg

SEQ ID NO: 268586 - DNA, 460 bp, Homo Sapiens
  misc_feature (58)..(58): n is a, c, g, or t
  misc_feature (63)..(63): n is a, c, g, or t
  misc_feature (339)..(339): n is a, c, g, or t
  misc_feature (391)..(391): n is a, c, g, or t
gggaattgaattggaagattactgaagcacagtagcattccctgacttcctgcaacgnggagnatagttaaaaagaagatgccactggaagtaaaatttcaactcttttgtttttgaaacagtatagcttttcataatgtcaactaagcaataacttggctttttggtgtgttggctaccctactattggccataaaataggcactctggtacttcagttgatgaatgtttttgctaaagttggactgtaccgaatttcattcttattttgtacgctaattggtgtaaaataaggaagtaattgttgggaatgcatactgtattcttaggttttattangtacatttggttgcttaaacttaaggaataaggagtaaacaacaactgaatnataattgaactatctttctttttcgtttttttgagacaggggtctctctctgtcacccaggctggagtg

SEQ ID NO: 268587 - DNA, 426 bp, Homo Sapiens
tagtttttgataaatgataaaaatgagcccagttatcaaagaagaactagttcttacttcaaaagaaaaataaacataaaaaataagttgctggttcctaacaggaaaaattttaataattgtacctgagagaaacctgcttacgtacacattgccagatcaaatatttggagttaaaatgttagtctacatagatgggtgattgtaactttattgccattaaaagatttcaaattgcattcatgcttctgtgtacacataatgaaaaatgggcaaataatgaagatctctccttcagtctgctctgtttaattctgctgtctgctcttctctaatgctgcgtccctaattgtacacagtttagtgatatctaggagtataaagttgtcgcccatcaataaaaatcacaaagttggtttaaaggtg

SEQ ID NO: 268588 - DNA, 469 bp, Homo Sapiens
  misc_feature (21)..(21): n is a, c, g, or t
  misc_feature (40)..(40): n is a, c, g, or t
  misc_feature (54)..(54): n is a, c, g, or t
  misc_feature (63)..(63): n is a, c, g, or t
  misc_feature (72)..(72): n is a, c, g, or t
ccagtttcccctgaagttgangaattcccccaaaatgtangaaccccaactganctttgaagnagtcattanccagtgaagaattctccaggtgaaccttctgctgaaaaaaattcttctgctttcctgagtggtaagatttttcaggcaccagcacactgccctggggacccttctgttgccgactcttctgttgctctccattcactttgtatagggtttcccaacactgattcattcctgcccatcatctcaggtgactgtggcactcacacaaaggttgaagcagcttagtgtagtagtggaaagattccctgggatttgtgagagggggacggtcctgactctgctccaggtgagctgtgtgtccttggaccacttcttctctgggcctcatttttctgcgtttgtaaatgacgggtttcgataagatagtctacagggtattgaagctcatggtgctagctct

SEQ ID NO: 268589 - DNA, 170 bp, Homo Sapiens
aaatgtcttctgggtctgaggactgaaattctgaaatgtaaccaatatttaagagcttaaacagtgcttctgtatagaacttgtagtatgaaatatgacttcaaaaaagcctgagctgtagaattaattttttcaattgaatgagtaatactgctttaaaaaatataaat

SEQ ID NO: 268590 - DNA, 478 bp, Homo Sapiens
  misc_feature (11)..(11): n is a, c, g, or t
  misc_feature (36)..(36): n is a, c, g, or t
  misc_feature (43)..(43): n is a, c, g, or t
  misc_feature (66)..(66): n is a, c, g, or t
  misc_feature (97)..(97): n is a, c, g, or t
ccttggggaancctccttcctgtaccctcccaatanaccattnccctccaaaggtgggccctgctnacccatgagccctacagacccctgttggccnactcatagctcacacagtgcagtgaagcactgaagtcactgacccctagaaagtgaccctgcaggtagccccttaccctgttgccttccttcagccagaggcccccatctgggctgtgggctgataggtagaattctgtagttttcctctgctgttggagcagagtttggagaagtcactttaataagggcaagacagaaaattctggttcttatggtgggtgacaaaggtggctaaggaaaacacttgcagacagcttgattggtatttgtcatagtgcttcagggaggcaaaaagggagctcttgtgcccaggctgtgctagatagtgttgaatggaggcagaaaatagcactttatggtttattatagctggcaatcc

SEQ ID NO: 268591 - DNA, 302 bp, Homo Sapiens
gaaatcctcagcaggctgagatggaactcattcttctcatgaagaacgtggcaagcattatacagaggggccatagtctggaaagcaggagatgcttacagacatataagttgtttccagtgttttgctcttggtactcatggttccactatttacatcaaccttttgagaaacagatttatacactgtcttatacttccctcctttgctacagaatgaatctacttgtaacctaccaaaaatttaccctgtcacatttccccagctgctggtttaaaaataaatatcctggatttaaagcc

SEQ ID NO: 268592 - DNA, 442 bp, Homo Sapiens
  misc_feature (12)..(12): n is a, c, g, or t
  misc_feature (32)..(32): n is a, c, g, or t
  misc_feature (49)..(49): n is a, c, g, or t
aacggctgcccnttttggaaaaaggaaattancccataagggtaatgtnggtgctcccaatttgcccagcccattccccaaccccccttctccccttacctgcccttcacctaaagaaccccagaaaagctaattgctccccctttcagcctctgttgcaactaacaactctcagtggcctcaggacacagctttggccttgggaattctgggaaaacttttacttcctgattaaagatacatatgcagctaggccacctcctcccccccttactgccataaacaccaaagtgatgactggagctggaggagttatttgaaccacgacggaagggccaagagaaccacgaagatgccagttgccacattgttgagctgctgacccaacaccagccattgcctgtctctaaacatcttatgaaataaaaccagttttgtttaa

SEQ ID NO: 268593 - DNA, 361 bp, Homo Sapiens
  misc_feature (11)..(11): n is a, c, g, or t
ttccgattatncctatagagcaaaaaaaccgtgtaggtgtggataagtgagtatgtatgtgagtgtgccatgtggatttgccttgtatgaagacatgaagaaaatacaaagggaaactcttatttctgagaggtaggattgtgggtgagttttttcctttatggttgtttttattttagatattttctacagtgatcatgtattttattataaaagtgttataaaaatgagtttttacatgctatatagaactaaaaacacttacaaatgcaaaaacattatgtcttttgaaatgcaaggcctctacagaaacagtatccctcctgtttttaaaatcacacttttgatacccaatgagata

SEQ ID NO: 268594 - DNA, 528 bp, Homo Sapiens
  misc_feature (19)..(19): n is a, c, g, or t
  misc_feature (31)..(31): n is a, c, g, or t
  misc_feature (42)..(42): n is a, c, g, or t
ccctccaaacccctgaggngagctccctcanagaccccatcnggtccccaaggctgcccagtgtacactcagtgatgccttatacccaaagagggcatgtgcgctggtgtctgttggggacagcccccatcccctaccttggagtcggcagagaagcagcaataagcattaggcgaatgattgaaaagggcctctgcgccaagaggccttcagtccccttaacgtggctttcccaacttccctgacgaggctacaaaaggtccgctcacaaaagaaagccaataatgtaaataaatagaaaacgaagcctccacgcgtggtttttaaagggggatgatgaatgtgacaccacccacagaatgcattagaatctggtttttctgtgctttgtcattttactctgataggaatttttgttacctaactctgtgcataacttatttaatgtactgtataaatgaaccaaaactgttaaatatgtatttagtttgttctacttaaagtagtcaataaaaaggctatattcca

SEQ ID NO: 268595 - DNA, 420 bp, Homo Sapiens
  misc_feature (254)..(254): n is a, c, g, or t
cctggaaggttcagggccgctcttcccccatgtgcctgtcacgctctggtgcagtcaaaggaacgccttcccctcagttgtttctaagagcagagtctcccgctgcaatctgggtggtaaatgcccagccttggaggatcgtggcccaacgtggacctgcctacggagggtgggctctgacccaagtggggcctccttgtcccaggtctcaactgctttgcaccgtggtcggagggactgtcagctgagcttgnactcccctggagccagcagggctgtgatgggcgagtcccggagccccacccagacctgaatgcttctgagagcaaagggaaggactgacgagagatgtatatttaattttttaactgctgcaaacattgtacatccaaattaaaggaaaaaaatggaaaccatcaa

SEQ ID NO: 268596 - DNA, 113 bp, Homo Sapiens
aagggcattgttctttctagtttatttctttttatgaaataaaattattttatttaaacagttccattgtcgtttctgaaaactacagtattctcagaagttgtagcagcagt

SEQ ID NO: 268597 - DNA, 507 bp, Homo Sapiens
  misc_feature (268)..(268): n is a, c, g, or t
  misc_feature (339)..(339): n is a, c, g, or t
  misc_feature (350)..(350): n is a, c, g, or t
  misc_feature (392)..(392): n is a, c, g, or t
  misc_feature (409)..(409): n is a, c, g, or t
  misc_feature (444)..(444): n is a, c, g, or t
  misc_feature (492)..(492): n is a, c, g, or t
atgtactactgtaacaagaagaccagctgcaggagctgtgccctggaccagaactgccagtgggagccccggaatcaggagtgcattgccctgcccgaaaatatctgtggcattggctggcatttggttggaaactcatgtttgaaaattactactgccaaggagaattatgacaatgctaaattgttctgtaggaaccacaatgcccttttggcttctcttacaacccagaagaaggtaggaatttgtccttaaggcaggctgcganataatgcaggtcatctcagaggcatgtccaaggctcaccttaaccccatggggccgggccttcgggaaggntcaaatgtgtncctactgggtgctggggaaggatatggtccccattttacaantagttttacttacagtnggatggccgtcttgaggcccagttgatgcttgganttctgttggggatttttattcaggaacccagttacttcggggggattnaaggggctggcaacc

SEQ ID NO: 268598 - DNA, 295 bp, Homo Sapiens
atccttgccataataagtcctagaaataaggtggcctctggggttgattaacattgtggctgacttacatcatcagggactcaagttttcaaaaatctgttctgccagagtaccttgggtatttcccttcatgggcagaaaatggcagcagtgtatgttccagatacagagggttgggattagctcttctgacttggggaaactgtgaaatatttcctacaattaatcccagtcttgagtgagtttctcttgtgctcccatgtccaaaattaagggatcagctcttaaacttatc

SEQ ID NO: 268599 - DNA, 373 bp, Homo Sapiens
  misc_feature (281)..(281): n is a, c, g, or t
ctttagagacacatactttaaaatacttgggtgaaatgatatgatgcttgggatttgcttttataacattcctaagaaagggaacagagaaaataaaacgttgctaaccattaaatttgtgtaataatagatgggagttcactatagcatctctatttctgtgtaggtttgaaatttttcaaaagaaatgctctaaacattatctatcaaataaggctttcaaagcattctcttaacatgtatacaaacattcaagcaatttaaaatattaatttaaaaantatcaccaagagtggcattccatacccttaaaaggattagggtccaaagggcaaggcaaagggcatcccggaaccaggcttaattttcaggt

SEQ ID NO: 268600 - DNA, 398 bp, Homo Sapiens
tgagaacccaaagtcctgtgcccttagagacagtttgcaccttccccccatattgtcccccgggacagcccatatgatttttttccccccccaaacaagtatgcaaacagaaacccagttcaaagggggatggagtaaaagatgaggcagtagaaatgcctttgaatggtttcctgtagctaattctctttaaattttgtcctgctttttttctttatgcagtgctaggtgttttaagttttctagtagtattgcttttgagttacagtataacctgagttactcctctgctctaacattgttgcagaagaactagtttattgttagccaggttgcttgaaaggttgagagtggagtggtttggcatttctgttttaaataaacatttaagctcttaa

SEQ ID NO: 268601 - DNA, 773 bp, Homo Sapiens
  misc_feature (12)..(12): n is a, c, g, or t
  misc_feature (37)..(37): n is a, c, g, or t
  misc_feature (61)..(61): n is a, c, g, or t
  misc_feature (97)..(97): n is a, c, g, or t
  misc_feature (679)..(712): n is a, c, g, or t
  misc_feature (754)..(754): n is a, c, g, or t
gccgcccccccnggaagaagtacccccccaggggaanaaccagtaaccagctccggggggncaaaagccaagggggggcaagacctacccccggttncatacccccccgccatttccccacttattaaactgtgtgaccctttgggcaagatgccttatcccactctgtgcacccagttttcctcagttataaaatgggaatatgaactgtatcaatccacacagatgtaaagctgttgtaaaggggacaaactaaggtaagtactcattaaatattagctattattatctgataaaaaaatttgtacatgtgtgtatgtgtatctttgggaaaagaagaagacatcttgtttactatttttttggagagaggctgggacatggataatcacataatttgctattattactttaatctgacttgaagaaccgtttaaaaataaaatttagcatgtcatatattccttatagtaggcttatttcaccttttttctgtccagagagagtatcagtgagaaagattttaagggtgaaaacatgaattggtgggacttagtaaagagctgaaaaactactacaatgtgggctacggttattataaaatgatagagatggaaactagagtaagtttattttgtctgttaaacctggaagtgagctaggcatggtcactcacgcnnnnnnnnnnnnnnnnnnnnnnnnnnnnnnnnnnaggatcccttgagtccaggagttcaagaccagtctgggcaanacagggacaccccaaatca

SEQ ID NO: 268602 - DNA, 441 bp, Homo Sapiens
  misc_feature (23)..(23): n is a, c, g, or t
  misc_feature (50)..(50): n is a, c, g, or t
ccccccctaataaaccgtgtgancccttgggccaagttgccctaaccccnccccgtgccaccccgttttcccccagttaataaaaggggaaatatggaactgtatccaatccacacagatgtaaaagctgttgtaaaaggggacaaacctaaggtaagtacctcattaaaatattaagcctattattacctgataaaaaaatttgtacatgtgtgtatgtgtatcctttgggaaaagaagaagacatcttgtttactatttttttggagagaggctgggacatggataatcacataatttgctattattactttaatctgacttgaagaaccgtttaaaaataaaatttagcatgtcatatattccttatagtaggcttatttcaccttttttctgtccagagagagtatcagtgagaaagattttaagggtgaaaacatg

SEQ ID NO: 268603 - DNA, 473 bp, Homo Sapiens
agctacagtgagagagcagtgtttggcctgcagctgggaccagcaaaacgtttcaccagggttctcatgcagttcagaaccccactgtccaacagatccaagacatttcccttttttcttacagaaagttgatgattggacatactaaatttcccactacagttaggagacagtcagtttgctttgggagtctacataaatcttctaagatagttctgtgaccatttaatagcaagaagcatgaatgccactacaaaggcaaaaatccacctctgagatcggccgttaataaacgtcccgtcatgtcagtttagattcaagaatgttaagcaactttgtttttgcggtgctccctatttcatagtatcttcaaatcaaaaataaaaattatctccattttgttaaagaacttacagggtcagggttctccttgtcacttagaattgggacactgccaggcaatcctctcccaa

SEQ ID NO: 268604 - DNA, 388 bp, Homo Sapiens
  misc_feature (171)..(329): n is a, c, g, or t
  misc_feature (332)..(332): n is a, c, g, or t
  misc_feature (346)..(346): n is a, c, g, or t
aatgtcctgaagtcccttggaaatgtaaagcttgtctgaaatgctgacatccagcgaaattaggttaagcaagcattcccagctgaaataagatctgaaataagttaaaactctttaaatgctcaaactacctgctttggattccctgtagggattttaaaaaaggaatgnnnnnnnnnnnnnnnnnnnnnnnnnnnnnnnnnnnnnnnnnnnnnnnnnnnnnnnnnnnnnnnnnnnnnnnnnnnnnnnnnnnnnnnnnnnnnnnnnnnnnnnnnnnnnnnnnnnnnnnnnnnnnnnnnnnnnnnnnnnnnnnnnnnnnnnnnnnnnnngtncacacccgtaggtncccagccacttggggagggcttagggtgggggagggttccac

SEQ ID NO: 268605 - DNA, 465 bp, Homo Sapiens
  misc_feature (107)..(107): n is a, c, g, or t
  misc_feature (358)..(358): n is a, c, g, or t
  misc_feature (422)..(422): n is a, c, g, or t
  misc_feature (437)..(437): n is a, c, g, or t
  misc_feature (450)..(450): n is a, c, g, or t
ttgtaaaatgaggtctctttctcaaaccaacaattttgtagttgttaggataaaggaatcaaatataacatctcaagcaaatggaccttcttggacaagttcctggnctcctctttaaatgccaactgggtgctaaggcactgtttaggtgttttgggcacatcatctcactaaatcctcacaccaccacatgtcagtgatgggtttctattttacatacagaagttttggggactctaaggtaacccatccagggtttaccacagtgggaactggggggtttagggcttaggacttcaccgcatttccaaatccttgcctcttaggcttttacaccaactatcttctaccctaatgntcaaagggcacagggctccttattgtgaggccatttccccccatactatatgggctttttgggnttggggctacacagnggcactatttccnaatcttaccttaaat

SEQ ID NO: 268606 - DNA, 248 bp, Homo Sapiens
  misc_feature (89)..(89): n is a, c, g, or t
aaaactccacagtccatacttggcttgaaatataaagataaataactcacagtcccccaccctcaaaggtttaataatagagtaggaanaagaagaaacagtaaacaaaagtttgtaagtgtgatatagtgaaatatatatatttggtctttgacctcatttcctcgtatacacttagaaactccaaagtgatatctttttgtatgcaaacgaattgactggtagctggcatcccctaggtagcttca

SEQ ID NO: 268607 - DNA, 455 bp, Homo Sapiens
  misc_feature (53)..(53): n is a, c, g, or t
caattgtaacaaaaacaactcccaaacccccacctgctaaccctggagagatnccccggatgggctgtgagtaacaaaagggagcggacagagaaacagctatataacgtggtatcactttccatccaaaataagtatccagcgaaaaacactgaggacaataacccaatgtttcctctctgtgtatggtttcactgtgcctaattctttaattgtaaaggagcttaagatattatttaaaagtgcaaaagaaagatgaacacccaagggcattttataagttcacagcaatgagcactcgagcattccaaagataacccctggatggaaggcaaagggacgtccactctgattctaacgagggacagaatcgaagcatcaccagcaggccactgagttgtggaaaggacattttatacctggaaaacagtttttttaaattatctgtgccgaaa

SEQ ID NO: 268608 - DNA, 531 bp, Homo Sapiens
  misc_feature (95)..(95): n is a, c, g, or t
  misc_feature (445)..(445): n is a, c, g, or t
  misc_feature (457)..(457): n is a, c, g, or t
aatccatccaaccttcctgtaaagaaaaaaagggaaaatgtccgggaacctgtgggaacaagtggggttcctgaaactgccatgaagaacccccnggtgaaacgttttgctgtccccagctgcaggcccaaacactgctctcctcactgtagctgataactcactaccccgagaggcacagtgactcatcaacttccagtttggaccaacatctatggatagagaacaaaaaggaaatacataacttatatctcactaagtattcatgaaccaaaaataaattctatttctatgttatatttacacaattagaaaaatctaaaatgagatggtaaagtcatataaactttgtttaagccccactgaaaataaaatgaattgatccctatgattgtcattcttaatttccatggatatttagagccaaacttggctaataaataanctgcttatacanaaaatttagattcaaatacagcattactgtttgatccaatgaaaaagacgtttacaatcagatcattcctgaat

SEQ ID NO: 268609 - DNA, 450 bp, Homo Sapiens
  misc_feature (78)..(78): n is a, c, g, or t
  misc_feature (130)..(130): n is a, c, g, or t
cgtctccagttaggcgctaatgctggatgaattagtcttgaagtggccactagtaggtctccttgtgggagggcttangagccagatggggagcccaggccctgccctcattttaaaatgagcccctggnactcccagagagaggcattaacaggttacaagaatgaagctattaaataataggtgtggcattaataataggtgtggcagtgtttcttgagtaatttcaagagctactcacaggttgacaagatgtaccctaaggtgctttctttaaaatatatacatagagagagaaaacaattttttaaatgaacttttgagttcctgagatccaagaaggggttaaaagttaatgttattttgccccatatatactgggcttagggctttatttctgcccctaaaaatattctacttaaaaaaaatccctcatcccatttatagtct

SEQ ID NO: 268610 - DNA, 427 bp, Homo Sapiens
aatattacgctcctctccttcaagttaaagaagtcccaccctgagtgttgccctgtagaatggagcccaagagagcccaaggaaaggggataaaaatgcctcactttacagatgagactggcaggtttgaggtgtccagtgaggtaggattacaatgaaatcatccctctctacaagtgatctgtggaagtcttgcacacttcccaatgtcatatccattcttccagtctttgtccaataatggataaatttaacagaacaaggtatgactcagcatgagaactgtcagagatgcatgggccatcccagaaagcatttataaggaaagatctaactcaacagaaaatagtctttcaggattcaggactgtgatagatgccacgaaaatttgtacatgcttaaggatcttacatcctctcatatttaa

SEQ ID NO: 268611 - DNA, 199 bp, Homo Sapiens
aaccacgtgcacattatttctataattaaacatttaactgaggtcacaagaccgaagaggaaatatgaagctgttataaggaaccagaacaactaagtagagaatatacagtaaaggatagggaagcaagttagcaaagtgggaagaaatggaatataaataaaagaagtagaaatgaagaaatgagaatcacttaaat

SEQ ID NO: 268612 - DNA, 412 bp, Homo Sapiens
  misc_feature (20)..(20): n is a, c, g, or t
ttgaatacccttgaggatgngggaaaaagtgtttatgctgtgtaaataaattaaattgaagtccctgcccttccaagtagtggagataaacatgtacctagcctataatcctgaggcagagttgagaggagttgggaggagccaaataatatcccaactgaagccttcaaagtcaccctcttttaagaagtgacacttgaccctaacgcctcaaggctaactaggattttgattggtggagaagccctggaaggacattccctggaagagaatgcaccttttacaaaaatatgcaggcatggaagcatgtgacctgggtggcaaatagtcagtggtttgcagctacaacattttaatacgtggaaagaaatttaatgaaatgggtcaagaaagtaaaattgaggaatgcttt

SEQ ID NO: 268613 - DNA, 463 bp, Homo Sapiens
  misc_feature (18)..(18): n is a, c, g, or t
  misc_feature (26)..(26): n is a, c, g, or t
  misc_feature (32)..(32): n is a, c, g, or t
  misc_feature (44)..(44): n is a, c, g, or t
  misc_feature (62)..(62): n is a, c, g, or t
  misc_feature (71)..(71): n is a, c, g, or t
acctggccccccccaaantgccgggnattaangggcgtgagccnacggcctgtaaattttgnccttttaanggggagctcccatggaaggccagtcaaaaagaccccagtttttaaaagaggatttcacttccctttgaccctcctaggcagataagaacagggagaaattcttgcgtacccacccccagacttgcccagaagcctcgtggcccaagaagtagccccgtgccctggctgcccctgaggcctcctcacacccaggagcatttgatagcttgcccacccctgttctgtgtctcctaccactccctccatgccagcggcacgtttcattatggtttcccacatccaaacctcatagcaaatgtaattgtggtgataataggtagtctagccagcaacactaagtattaaaaatgactcaatgttattttggtatttaactttgtaaaagaaaaagg

SEQ ID NO: 268614 - DNA, 362 bp, Homo Sapiens
  misc_feature (155)..(155): n is a, c, g, or t
agtgtgagccaccacacccaaccaggttatttgaacatttttaagtactgtatttcctctattgtaatattgactgtcatctctgtgcaggttttttagtggttgctctaggttgaaacgctttgaattcttaggtatctaagagtgagcatttnctttttttgactgctatactctcaccagttgccagcttctcatataaatattgtaaatgctctcgtttagggtaactcaggcttctgggagttgaggggaacttcaaaatcagaagagctctgggaatctgcatttgtgctaagatttagcaaacttttttcctcgggtatatgtgtctcactgcttagagtagttggttctccagt

SEQ ID NO: 268615 - DNA, 530 bp, Homo Sapiens
cccacaccgtgcaaaacccacctggcccaagaggattggacctgaacctccagaagtaaacaaagtgcccagcgggggcctctctgccgcacctttgagtcttatttccccactccagctcccctttgtgaaggcctctggagtcactcatacaaggtcagcaactacagccgagggaacggccgctgcatccagatgtcggatgattcagcccagggcaaccccagacgaggaagtggcgaggttctatgctgcagccatgcaggtgaatgctggtgagatgcttcatgggactgggggtctcctgctcagtctggccctgatgctgcaactctggctccttggctgagttcagtcctcccagactacctgccctcagcttggataaccaggctgggctcagctcagctcccacaaatgacagccccttaagcatgcttctattagtcacctaaccctctgtcacccagtctgttgctgctccatggtggggccaagagtcacttctaataaacagactgttttctaat

SEQ ID NO: 268616 - DNA, 470 bp, Homo Sapiens
ttggcctcaactgcccaggcggacgggagggaggcacccggccggctggactaatctgggatcgcggtgatttgcagcgtggaaaagaaatgcagatgatcatgtctacctgatgcgctgtgggttttttgataattagaatttcgcacattcagttttcagggttcagctcctttctctaaagtaaacagcccattgtcagggatcttctggtcagacaacctgtgattcatctagattttttaccgagctccacttcattgagaagtcaatgatgccagtctggttctttgtcaactctccctcggctttgtcacataattgaattatgtcataaccttattaatttgcacatagatcatctgaatgtcgtggtttaagacttaaggaggaacatctgtttgattactttcttttggggaactggaaatttccatcgaggaaatgtttttttaaaaagtctaatgatt

SEQ ID NO: 268617 - DNA, 264 bp, Homo Sapiens
ctgattgagaattatgtaaattcaatacaatgtcagtttttaaaagtcaaagttagatcaagagaatatttcagagttttggtttacacatcaagaaacagacacacatacctaggaaagatttacacaatagataatcatcttaatgtgaaagatatttgaagtattaattttaatatattaaatatgatttctgttatagtcttctgtatggaattttgtcacttaagatgagctgcaaataaataataccttcaatggaat

SEQ ID NO: 268618 - DNA, 742 bp, Homo Sapiens
  misc_feature (305)..(305): n is a, c, g, or t
  misc_feature (317)..(317): n is a, c, g, or t
  misc_feature (355)..(355): n is a, c, g, or t
acggggctttagtcggaagtccaaccttatcagacatcagaggacacactcaggatagaaactttatgtgtatagggaatgtggtacagcctttagccaggagtcatacttcatcagacaccagaggacacacacagtgctgtggctttttcagccattgctagataccatagtggagacattctgtgtgtgattatgcatgagactgtactggtaagacttgtatctccatccacctgaaggagaatttgctggctcattttcaggagccctgcccttcctaactgtggatggtgggttgtggnaaacccggtcanggtaaatgatagtggcaggaggcagtcaaaatgcccanggcagataggggtgggtacccgggtgaaacccaaccttaaagctgaagacagtcccggctaaatcctcatactgaattgagaaccttgtcttccccatttggtgggctttccctccgattgatcccaacccttcacctattttacgtatacctgccctttcctaattggtttttacactgctgtgcccaccttttgagtggtgcctttgcatacttacaaatcagtcaacgtgtattcccctattctgagcccataaaagacccagactcagctgcagtgaggagagaaatcaccctgctgtgggggttggggaccactccctgcatcccctctccactgagagctgttcttttgctcaataaaattcttttctacccatcctcaaa

SEQ ID NO: 268619 - DNA, 491 bp, Homo Sapiens
  misc_feature (402)..(402): n is a, c, g, or t
  misc_feature (428)..(428): n is a, c, g, or t
  misc_feature (436)..(436): n is a, c, g, or t
  misc_feature (460)..(460): n is a, c, g, or t
  misc_feature (479)..(479): n is a, c, g, or t
ttttttttaaccgtcaatctttaccaatttattttatacaaaacagtagcaatgtagaatatgggaatcgtcttccgctgccacgcacgcaagttgtgaacattccaagccaatgtatacaatttggaggggaaggctaaacaatagcatcaaccacgctactgaacataggaatttttcatttaaaaagattaaaaattagatagcaatgtcttcttaatattgctctcgtcattgaagactgaggaaaaataaaaagtgactttataagttttttaaaaaaagagggcaatggggaaaaaaacaagagggctgctacaacactgccatacaggtcaaaccatcatacttcaatatttcgcatactcgataggcagcattatttttactgaaccgtgtgcnactacatgtagaaacacatcaaagcnaaatatcntgggcagttatcaatcaagatccnaaaagggaaaaaaccaacnaaaaaataactc

SEQ ID NO: 268620 - DNA, 413 bp, Homo Sapiens
  misc_feature (218)..(218): n is a, c, g, or t
  misc_feature (245)..(245): n is a, c, g, or t
  misc_feature (256)..(256): n is a, c, g, or t
  misc_feature (296)..(296): n is a, c, g, or t
  misc_feature (311)..(311): n is a, c, g, or t
  misc_feature (321)..(321): n is a, c, g, or t
  misc_feature (347)..(347): n is a, c, g, or t
  misc_feature (356)..(356): n is a, c, g, or t
  misc_feature (368)..(368): n is a, c, g, or t
  misc_feature (386)..(386): n is a, c, g, or t
cgtggaatataggaaggactgcagtagatgctgtcactgctagggaatatccccaccaagttccatcattctcaaatgattttcaaaattttttcgccatgtccatgccctacctgcaatatcacatgcctaacatttttaaacagattcattagttttaattacatttatttaaaaatgttttaattacagtcataaatgaaactcagggagaccanttacacataggtaaccataaaacgaantacaacaggantcaatataacgtaactggaaggactaaccagatatatttnctgcggaaggctgantttgaggtcnggttatttccttttttaagggggggngggccggtntttgggtggggnattttcctggttaccacngggggcttggcccccttggtggggttc

SEQ ID NO: 268621 - DNA, 397 bp, Homo Sapiens
aaaacatcaatattataccctcaagcggtaaagagaacagttttaagcacctatcaaaggaggaatagattgtaattttaggatctgagtgttttatttccttatatttctttaaaattgcttggactctcttctctctaacctcacactttcaccaccatcaccaaaatttgctttgtatttatactcatttttaaagaaattactataaagtcagtaatttggagtctcttcggaagttcatctttaaaaaatcctccttcttttaaagtgaagtgggaggagaagaaatggataacaatttttaaggtttatattttatttccggctttgtttagcaatacatatcttaatgtactatacaatttcttcactaatgaaaaaacataattatttc

SEQ ID NO: 268622 - DNA, 621 bp, Homo Sapiens
  misc_feature (122)..(134): n is a, c, g, or t
  misc_feature (321)..(322): n is a, c, g, or t
atgaaattaataataataattcaataaattgaattatgccatatgtatcttttggggattggcttctttcactcagtataatttccttgatgttcatctaagttgttgcatttatcaatagnnnnnnnnnnnnnattgctgagtagggttccatggtactgatgtttaaccattcagtcactgaaagaaatgtgcagtttccggatttagttattacaaataaagtactataaatatttgtacaagtgttcctgcatgaaaatcagttttaatttctctgggatatatgcccaggagcacaattgctgaattgtatggtgnnatatggtttgactcagatctcatcttgaatttccacatgttgtgggagggacccggtgggaggtgactgatttgtgggggcatgtctttcctgcgctgttctcgtgatggtgaataagtctcacgagatctgatggttttaaaaaggggtgtctccctgcacaaactcattctctgtttgcctaccgccatccgcttaagatgtgacctgctcctccttgccttccgccgcgattgtgaggcctcctcagctatgtggaactgtaaatcgaattaaacctctttcttttatataatctt

SEQ ID NO: 268623 - DNA, 676 bp, Homo Sapiens
  misc_feature (242)..(250): n is a, c, g, or t
gcatctctgtcaattgaaagatgtcaatctctttcatttttcctaatcactaataacatctactaaaaacaaaatgtctgtgtaaataatttatttgaataaaattaaagttgttgagtgagctcggcttttgaggagtgggaaaggaggggtgcatagattagtggaagatgagaagctagtggggctcaagtccagcaggagcaggagtttggagccaggacttcctagcctctcagggnnnnnnnnnaacttccttacctgaaatgatttgtgctatataacttgtcctggctaaactttcttaatctcaactgtttcatttaatcaataacaactactgcgccaccttcataatatcaattttcagcatttcatttactgaatatcatttcctttccttccagactattctactgtgtcaaattcaatattcctttgactcaataggatctccaatccagtgaccccattatttgtttgtttattaggacaagaaaaacaaactttcccagaaactccccagtagactgctcctcatatctcgttggctagaacctgagttgcgtgcccattcctaaaacaaaactggcaagaaagatagttaccaagattggttcagaccaaatcagggattttttcctgaggagaggataaagtgagcttcccgggaggc

SEQ ID NO: 268624 - DNA, 412 bp, Homo Sapiens
  misc_feature (362)..(362): n is a, c, g, or t
  misc_feature (401)..(401): n is a, c, g, or t
aggaatctttggaatgtgtaaatatttgcctcccaggaagctcactttatcctctcctcaggaaaaaatcctgatttggtctgaaccaatcttggtaactatctttcttgccagttttgttttaggaatgggcacgcaactcagttctagccaacgagatatgaggagcagtctactggggagtttctgggaaagtttgtttttcttgtcctaataaacaaacaaataatgggggtcactgggattggagatccctattgagtcaaaggaatattgaatttgacacagtaggaatagtctgggaagggaaagggaaatggatattcaggtaaatgaaatgcccgaaaattgatattatgaanggtggccgcagtaagttggttattgattaaatggaaccnggttgaggatt

SEQ ID NO: 268625 - DNA, 729 bp, Homo Sapiens
tcccaaccggatcagctttctgtcctgtaaaacttctaggccccctcttacctgcttctgaccttatgctcaagaactctcctaactctggccagagctcagctttggcaactctgaccgttgagcagctctcatcccgggtttcctttacgtctctttctgatgacaccagcacagcgtgctccatggaggcctctgtccagcagccatcccagcagcagcagctcctgcaggaactgcagggtcgaggaccacatctctgctcagaactatgtgatcatctaaaaaagggggagctggcctccaccctatgttccatggattcggaacaagatttcagacatctgcatgagtgacaaactttctgaacaccaccaccaccaataatacttatcagcatcataaagtatctcttaaacactgatcttggcagggacggaactcctattcagcagtttttgtggaaagcagtaatgcttgcaaaacgtgtgtgtcattcagcattttaagtggagactatgcatttcatagtatatttgacagattagtactgtgtcctgtgttttgttccagattcttcagtataaataagctctatatcaaaaagttgcctgtctaaatagaaaatgtcttgctgtgttttgtcctatggaaaatactgtaattcaggattatgtttacaattgatccaggtgtttgtttctaacttctgtaatacatacaatgcaa

SEQ ID NO: 268626 - DNA, 790 bp, Homo Sapiens
  misc_feature (116)..(330): n is a, c, g, or t
gcaacccagaacaaagcaaaacccagcagactgtacttagcattgtctaaatccattctcaaattccaaatatcacagacacccctcacacaaggaatataaaaaccaccaccctnnnnnnnnnnnnnnnnnnnnnnnnnnnnnnnnnnnnnnnnnnnnnnnnnnnnnnnnnnnnnnnnnnnnnnnnnnnnnnnnnnnnnnnnnnnnnnnnnnnnnnnnnnnnnnnnnnnnnnnnnnnnnnnnnnnnnnnnnnnnnnnnnnnnnnnnnnnnnnnnnnnnnnnnnnnnnnnnnnnnnnnnnnnnnnnnnnnnnnnnnnnnnnnnnnnnnnncctactacccctgtattcaaggtaaaaattgaagtttgtatgatgtaagagatgagaaaaacccaacaggaaacacagacacatcctccagttctatcaatggattgtgcagacactgagtttttagaaaaacatatccacggtaaccggtccctggcaattctgtttacatgaaatggggagaaagtcaccgaaatatggtgccgccggcccccactcccaattcattccctaacctgcaaacctttccaacttctcacgtcaggcctttgagaattctttccccctctcctggtttccacacctcagacacgcacagttcaccaagtgccttctgtagtcacatgaattgaaaaggagacgctgctcccacggaggggagcaggaatgctgcactgtttacaccctgactgtgcttaaaaacactttcactaataaatggttataaatcaaaaaatgt

SEQ ID NO: 268627 - DNA, 885 bp, Homo Sapiens
gaggctgaacaaggtggtggtcttgtgcagttattaataaaacctgctgcacatatattaactctggacaggttgaggttaacattcaaaagatctatgagcaagctacctagttacatagatataaccagggcactgccccaacctatatctggtcaaccatcaaaagtgccttcccaagtctcacctgtttttcacctcttctaggacctttgacaactgtcttgttacaaatgtttggtccttgcttctttaacctcttagtaaagtttgtgtattctagattaccacagttccagagacaatgctggcacaaggcttccagccaatcctgtccactgacacggagaatgaaatcgtcctgcctctgggctccttagatcaggtatccagagatttttactcctccagtgccaggcagggcctacgtccataaactcagcaggaagtagttacggaaaacagatctccgcccttctgcagcccccttaagattaaggaggagtatctaatctctgaagggggaatgaggtaggaggtgggactcaactctggaagtggggctcaggcactcagaccaaactgagcactagctaaaataggtccagggcagatgctagtttccataggacacaccgacctgtgtcaagtcagttcaccatggctctggcagcacccagaagttaccaccctcaccctggaaatgtctgcataaactgccccttcatttgcatataattaaaagtggatacaaataccactgcagaactgcctctgagctgctactgtgggcgcacagcctgtagggcagccctgctttgcaaggacagcgcctctgctgctgctgtgcacagccggccgcttcaataaaagttgctaacacaa

SEQ ID NO: 268628 - DNA, 376 bp, Homo Sapiens
tgagtggtgggatcacgagtcctgtatttccttctatgcaattaatattttctaaaatatacatgcattgctttaagacaagaaaaatacttgctgttttatcaagaggcctagaggtggcaaacaatgtctggatccgtacaccaccgctggaggaatgcagaggcgggcgggggcgcgacaggctgctaggcaccgtgcccactgtctgtcctgtagcttcctaccagcccgaaacactgaggtttccagagggcagcgaggcaaaaggggccagacatttttctggttaacactccatgtattcagtttccaaaggtgcttaggccaggggcggtgaggccgaccttggccaggccgtgggtgggttgcttga

SEQ ID NO: 268629 - DNA, 422 bp, Homo Sapiens
  misc_feature (274)..(274): n is a, c, g, or t
  misc_feature (319)..(321): n is a, c, g, or t
  misc_feature (388)..(388): n is a, c, g, or t
  misc_feature (403)..(403): n is a, c, g, or t
actgtgataaaacatacacagtttacaagaatatgaaatgctttactaattcgtgtgtcatccatgctaatcatctctctattgttccaattttagtacaggtgcttttgaagtgggcactcttaattttttgaacattttctaggtttctgataccatactcattctgtgtcttacctatcacaaccccagaatcagccatttctccaaattccttttagtggagagtggtatttagaaaccagggatctgggacaccatttctctttttgtnattgttgtttgccttgctttaatgataggctctttttattaattnnnccattattataaaaggatgggccaaatacatacatttctatggaaaatgaatcaagtcttatttatnttacaggttaaaatnccattaatccccatttaac

SEQ ID NO: 268630 - DNA, 564 bp, Homo Sapiens
  misc_feature (239)..(251): n is a, c, g, or t
attcggcacagagaggggctacactaggctggaggggatatgggcctggctttagaggattatgctaggaaaaggggtgccagaggaagaaagctgataggaacaagccctgtggatcaagaggcccatcagtgagcctgcagggtctatgaactccttacatgcaaaattacatgtgtctgtctgtgtaggtctctacagattggtggaagtgttcacagctttcatgagattattannnnnnnnnnnnnaagaaaggcacactgccgcatgcaacacctcatttggatgtgtctggagtcttggaagtttgactaccctacattctcctacaaatggaccttgagagcttgtttggaggttctagcaggggagcgcactacttcgtatacccttgaccaaagaacagtcctcctctattggggaaggttgtcctcttctgaaactacctttggccaaaaattatagcagttgagaaaattatgacagtgaaaagaaatctgacctaattgactccatcttggcttctaacctcccaagctggcccttggttcattcctgggg

SEQ ID NO: 268631 - DNA, 841 bp, Homo Sapiens
  misc_feature (148)..(165): n is a, c, g, or t
  misc_feature (326)..(480): n is a, c, g, or t
  misc_feature (717)..(729): n is a, c, g, or t
tagagctaatagttgtggaatgttaatatttatgcaagagtatggagttcagctttaaaatcgtcaggaaagatgaaacatttgaatattctcttgatttaatattactactgaaaactacacagccatggatgcatgcagatactgnnnnnnnnnnnnnnnnnncctctctctcagaacttagcatccttccaggaggactaatagagtagacagttctcttttttggttcctttttctagctattactgagatgactttaagcagtgttaggtaataaaatatctaggatggtagctagttaaaaagaagtttttagtataaannnnnnnnnnnnnnnnnnnnnnnnnnnnnnnnnnnnnnnnnnnnnnnnnnnnnnnnnnnnnnnnnnnnnnnnnnnnnnnnnnnnnnnnnnnnnnnnnnnnnnnnnnnnnnnnnnnnnnnnnnnnnnnnnnnnnnnnnnnnnnnnnnnnnnnnnnnactggtgggcttatagagagactagctacacgtcagcccccacatgtgatgtgtcactgctcagactctgagagacgacggaagacaccatctggtgagcctcacatggaatttcggtcatactagaatagtctttaatataatatgggtcagcaccgtgtacgcgacctgctggataagggcctaaatgaagtttaaggtttgaaagtgattgggaaaaaagcgcttgctccgggnnnnnnnnnnnnnaggcacaccgggtccccgggcgggcccgtttggttaagcggtcgctaaagttgtggtttacccggaaaatgaaaaaggggcctgttgtttcccggggccaaaaccgactggg

SEQ ID NO: 268632 - DNA, 445 bp, Homo Sapiens
  misc_feature (20)..(20): n is a, c, g, or t
  misc_feature (36)..(36): n is a, c, g, or t
tctggcccaatctgtgtaangaaaaagaaatccagnaacgttacttcctcacataatgttataaaactactgaacatgaacgatccacttgttaaccaccagctgctgtttacttatcaaggttatagttcgtgcttctaactggagcactagctgctaatgcatatctagagaaaaaaatcttcctttgcagttagtgccaaaaggattcaaggcttgtctggctgcaaaatgagatttttatcaggcatcttgagcattattataaagcagatgacagtatcgtgtttggggtagtgaaattaaagcccataccaaagtgggccagccaagagcaggtgtcagcctgggacagatgtgaacaccaggaataaaagagcagttatgtaatccatttcgacgcacttctggaactgtaaactgtaaacaaatgcctgtgccgaat

SEQ ID NO: 268633 - DNA, 847 bp, Homo Sapiens
  misc_feature (16)..(16): n is a, c, g, or t
  misc_feature (26)..(26): n is a, c, g, or t
  misc_feature (31)..(31): n is a, c, g, or t
  misc_feature (47)..(47): n is a, c, g, or t
  misc_feature (57)..(57): n is a, c, g, or t
  misc_feature (68)..(68): n is a, c, g, or t
  misc_feature (77)..(77): n is a, c, g, or t
  misc_feature (119)..(119): n is a, c, g, or t
  misc_feature (153)..(153): n is a, c, g, or t
  misc_feature (295)..(337): n is a, c, g, or t
  misc_feature (554)..(554): n is a, c, g, or t
aaaggcctatttgtgnaggaaaaacngtacncccaacatccaatagnaacctgcccnccttgtgaaanaaagttaanattttcccaaagcaaaaaagctggcccaaaaccaagcctganggtagcatccctgcctcagacacgttattccagnaggaaaattgcccctgggcccctaactcacttgccccaaatgtccctgggatgagaggatgttggaaacacggccttctttgagtgccagaacagctttaactatatcaataccaaaaatcctcctgtgctaggatggcagnnnnnnnnnnnnnnnnnnnnnnnnnnnnnnnnnnnnnnnnnnnttgtccatgcaatctgttaacaatgggagaagtctcacacaattttagggtggtagaaaatgcaggtacaatactgtggattcaaggctatctctttccattcccatccctgttctttcttgttaaaaggttactatcagacttggaccctgtccaggtcaataatttgaaggtagctgatgatcttgatcaggtgggcgtcgtgtcttgaaccccntccatacgttctatcaatgctgcccaaacatctgtaaatgggagcagggacaaccaggacactgaactgattgctgtagagatcactgccctaaacctatctggtactagggggcaggtaaatccctctcctgggaggcagaatctcaacctctgcttccagttcagatcttttgggctaagggagagacaggcctagggggagacctataacaaaagtgacttgaaaaaagagaataactcgatcaaactaactcctagatgcaaaattgcaacgacccagaagtgctgcaa

SEQ ID NO: 268634 - DNA, 342 bp, Homo Sapiens
agagtttagtgtctccaagtaaaggtagaaattttacattatctatcaatgatatcggcgaaaactaaaattattaggaagtaagctaagaataatttatagtctagatttttaacttaaaagtggaaccaatttccaatggtttcttcccttagttcttgagttagccatactgtgaccattaaaaaacatctttaaaatgtatgtgaaaaaacctgaagaaaatgtgggcaaagggtaagatttgataagaaatgggtctaggtttataggggaatgcattatagtctttatagttatgtgtgtttgaaatataataaaacacttttaggatgaattctt

SEQ ID NO: 268635 - DNA, 419 bp, Homo Sapiens
  misc_feature (403)..(403): n is a, c, g, or t
gcacaacctctctgtgccatgaagataagtcttccatggccaaatcggtcatccgcactgcccttgggacttccgaagtgaaccattccaccagaacctttgattctgcacaagatttccttgctctgggaacaacccccaaatgcccttgggaggaacaacatgagctcaggaagcctctctttcttcacttaccattactaactctccaagcatagaaatccctgggaattgcgagaataactcccactattttaaaatttatattcagatttgtttcgtttcataagacacatcaaacaggcctattacaaaaggtttagggaaaaggaaaacaatgggtggagtcccgggccctctttcggatttcactgggcaccttatggcaagtgtaggggagggnacggtgggttcgtgta

SEQ ID NO: 268636 - DNA, 377 bp, Homo Sapiens
  misc_feature (46)..(46): n is a, c, g, or t
  misc_feature (310)..(331): n is a, c, g, or t
ccatgcacagcacgggtgagagaatggacaaggaccaactccatcncccctgtgtgtcaaatcagcctttactgctcttctacttaggtccctaaccggcagtattgaaatggaggtgggaagatacaactccttatgaagtaagacacagcaagagggcacactagcaaagcagtcctatataggagaaatgcttataggcatgacactgcattttaaatacaaaaaattaagttctcttccaattccaatctcaacagagggagccataagaaagattctcctctgagtcttctacaaaaacaagggnnnnnnnnnnnnnnnnnnnnnncagaggccaagaaaaaagaaattgggcaggcttcggaagcaggagc

SEQ ID NO: 268637 - DNA, 415 bp, Homo Sapiens
  misc_feature (141)..(161): n is a, c, g, or t
  misc_feature (371)..(371): n is a, c, g, or t
  misc_feature (386)..(386): n is a, c, g, or t
  misc_feature (398)..(398): n is a, c, g, or t
gcatagtaggctcacaagaaatagctgatagctagaaggtaactggttgacaagagggtgcatctacataggctttgaatttagggtgcttggataaacctcaggaatctgtgaacctcatgaaacctcctaccactctannnnnnnnnnnnnnnnnnnnntgcacacatgggaattttctgaggtcagttgctttcatcaggatcccatacaaatctacatttgtaatctgcatccctattcctcatcccaactccatatacatgcaacagattaaggaacagtactagacgaaagttgatagaattgatcagtggcatggtgatcagatgctctagagtcattgggtagggctctagtacttgtctccnggataattgagcccncttgtttaaagnactcataaaggaaaatt

SEQ ID NO: 268638 - DNA, 535 bp, Homo Sapiens
  misc_feature (244)..(244): n is a, c, g, or t
  misc_feature (399)..(399): n is a, c, g, or t
  misc_feature (427)..(427): n is a, c, g, or t
  misc_feature (437)..(437): n is a, c, g, or t
  misc_feature (442)..(442): n is a, c, g, or t
  misc_feature (466)..(466): n is a, c, g, or t
  misc_feature (486)..(486): n is a, c, g, or t
  misc_feature (496)..(496): n is a, c, g, or t
aaacgtaaagaataagaggaattaatacccaccattaaaggatgtccggccaacctattgtggaaatttatagaatagtatacaccacagttctgaatagtgatatcacataaaaatacatactagaggacctgccaagccatgagcagtgtttttgctttttgggggccagtccctggggtgtggagccgctaggtttgcacccatgaaacagaaaagccacaccctccaaggtgtgcttctncattttgggactgctgcagggagggcagaggcattgctgagactgcctggcaacggctgatgccccaggtaggaccttttccatttcaaagtggtgttctaagtctgcgtccaacactgtgtgaggaaaaaggttggtgcaaaaatattcctggntcatccacccattaaaatagttagatgnaggctattgncttgntgatcagctgttccacacttcctnatggaaattaaccctttggncggggctttnccaattgtctgactcgtggaaattaacccttacggcagg

SEQ ID NO: 268639 - DNA, 516 bp, Homo Sapiens
  misc_feature (40)..(40): n is a, c, g, or t
  misc_feature (67)..(67): n is a, c, g, or t
caatcaacttccggaaatcccccctccgcaaaggttatgnttccataggaaaacacgagctgaaaanggaaaacctgcaagttgtttccagttgcccttgaaaattcctttcaagtggcccacatcatttcccacgttttcccacatccgggaggaacccctggactgtgccagccttcgggcacccggcacagacactgtgctggcaggagcttcagacacgcccaagtggatggatttggattgaacgcatatgaaacaggagacgggttctcatgtgagaacaaagctcctccaaagcctgttcaagctctaagcgattctcaaatgttaccatttattaaaggtaaactacacctgttgaaggccaagttcagggcagctgttgtgatctgtgtagttaatgtatttattaatgcttgacttttaaaatcctgggcataaatagtgcagagcctcgtatgtttgtcagttcatgccgagatgaaataaatcacgcagaaagtgccagtcaaa

SEQ ID NO: 268640 - DNA, 393 bp, Homo Sapiens
  misc_feature (347)..(347): n is a, c, g, or t
  misc_feature (366)..(366): n is a, c, g, or t
aaaaactcctttatgatggaaaatttcaaacatacacaaaagtagagagagaatggtataataaacccactcagttttaaggattgtcaactaataccagttttatttcatgtatgactccaacaacttccccaaccagccttcagattatttgaaagcaaatttcagacatcgtattttactcatacattttctagtatctaaatctggaagagactcctttctaacaggtctgtagcattaattatacccatactggtgggcaacaaaatattccagaaatcctttggcttgcgaaactggaacctctttacccattaaacactaactcccttttttttcacccngaaccatgggcaaccacanttttgactttgcttttctgtgagtttg

SEQ ID NO: 268641 - DNA, 447 bp, Homo Sapiens
  misc_feature (424)..(424): n is a, c, g, or t
  misc_feature (433)..(433): n is a, c, g, or t
ttagaatgaagcagttaggaatcaggacgctgtgttggttagagctgcttctccagcagggtactcctgtcagtgcacgtactgcttcacatgcctgcttttgctgcaatgtatttctttaaagtagttcttcaaaactggtattacttggaaaccaactagcaccatgtttttgttgcactcatcttttaggataaagagcaagtaaactactaaagggatttctttagaaatcagtttcctgggggataactatgggtctgatagactcagtccatttcttatactgtctacagtattgtacaaagaggagctgaagttctcagttatgtctctgagggcaagtgaaattaaaggaaaggttggcattattttccaaattcccatacttaggggaaaaggtttttcaggggaccaatttttngaaataggnaggggtttttgggg

SEQ ID NO: 268642 - DNA, 356 bp, Homo Sapiens
  misc_feature (54)..(54): n is a, c, g, or t
ccccggggagcctcaaaaccccatttccccaccatttattatccaataaccccngggacctttttgttctggttaccttattcccctgtgagcttttgttgtgagttattgtgagagttaaaagatataaatgaaacactaaaatagggattggtacatagttagtacttaatatatgtgagctgtcttctctcccgtttcttaaatttctcaagccatgtttacatacacaaacaagtatatttatccatacatatctgggtaatcattcaataatttattcattaaaaaaaggtattgacctcctacttattaggtgccagccctgttctggattctggagttggaacaacaaa

SEQ ID NO: 268643 - DNA, 326 bp, Homo Sapiens
  misc_feature (21)..(21): n is a, c, g, or t
  misc_feature (280)..(280): n is a, c, g, or t
  misc_feature (314)..(314): n is a, c, g, or t
tgtatttttactgtacctttnctatgtttagatatgtttggatatacaaattcttaccattgtgttacaattgcctacagtattcagtacagtaacctgctatacaggtttgtagcctaggagcaataggctacactatatagaccaggtgtccggtaggctataccatctaggtttgtagaagtatactccatgacgtttgcacaacaactaaaccacctaatgacacatttcttgggaacatatccccatcattaaggtaacacatgactggtatttnctgtctcgggtccctctgacggttgatatttctnaggctttctatt

SEQ ID NO: 268644 - DNA, 568 bp, Homo Sapiens
gcgggactctgtatccccatagaggccgggatcagctctggggtgtcaagtctctggtagcagtcccagcgtgaagttgtttctaccacttattcccgagtaaccagataaagagatgccctctgtttcattagctctagtctccccccagcatcactaacaaatatgcttggcaagaccgaggtcgatttgtcccagccttaccggagaaaagagctatggttagttacactagctcatcctattcccccagctctttcttttctgctgtttcccaatgaagttttcagatcagtggcaatctcagtcccctggctatgaccctgctttgttctttccctgagaaacagttcagcagtgaccaccacccacatgacatttcaaagcacctccttaagccagccagagtaggaccagttagacccagggtgtggacagctccttagcatcttatctctgtgctgttttggttttgtacataaggtgtaagcaagttgtttttcttttgtggagaggtcttaaactccccatttccttgttttgctgcaataaactgcatttgaaattc

SEQ ID NO: 268645 - DNA, 415 bp, Homo Sapiens
  misc_feature (202)..(202): n is a, c, g, or t
  misc_feature (347)..(347): n is a, c, g, or t
  misc_feature (358)..(358): n is a, c, g, or t
  misc_feature (376)..(376): n is a, c, g, or t
  misc_feature (382)..(382): n is a, c, g, or t
tgcttattcaaccaatatgctactataaataccaatcgggaactgtgctagattctggggatacacggatgaataaagtaggcatgatgatatcataccagtgcctttgtttcctccaattaaattagtatattatgacctagaatgcaaattttgtatgaatttttaagtaaacacaaaaagcttttggagactcctgggnttatgccataatttcctaggtcgaagtgatattgtattgtattttcaaattgggttcttaggcttcaggaatctgattttcaggataaaagctccagcttttccttggaaaacactaacttacctggctggtttcagaatttttnggctcctggcntcctccctccggccttcnggtccnccttttcccagaattttcaggggtgggtccgtc

SEQ ID NO: 268646 - DNA, 566 bp, Homo Sapiens
gatcagacgtggcgacccgctgaatttaagcatattagtcagcggaggagaagaaactaaccaggattccctcagtaacggcgagtgaacagggaagagcccagcgccgaatccccgccccgcgcagtcgactggaacatgtggcgtacggaagacccgctccccggcgccgctcgtggggggcccaagtccttctgatcgaggcccagcccgtggacggtgtgaggccggtagcggccccggcgcgccggcctcgggtcttcccggagtcgggttgcttgggaatgcagcccaaagcgggtggtaaactccatctaaggctaaataccggcacgagaccgatagtcaacaagtaccgtaaggacaagttgaaaagaactttgaagagagagttcaagagggcgtgaaaccgttaagaggtaaacgggtggggtccgcgcagtccgcccggaggattcaacccggcggcgggtccggccgtgtcggcggctcggcggatctttcccgcccccgttcctccgacacatcacccgccctcgcttccacgccgagccctatgcagtctc

SEQ ID NO: 268647 - DNA, 478 bp, Homo Sapiens
  misc_feature (34)..(34): n is a, c, g, or t
  misc_feature (41)..(41): n is a, c, g, or t
ttccgaagaccaaccctggaacaaaaataaccanactccgncttccttaaaaaaattaatcctggccatcctgtggccatgccaccctaacttgaagaaaactgaagtgggggaagaaattgccctaaagcccccaggaaggtccgaggcctaacagtgaagcccgtgaatactgcccactgccactcccacccctgggtgacagtgccgagaaatacccacttgaggagtataaatcccatgctgcttttggaggataagattttggaccgatgtgctaatgggatgtaacttttgggggctttgggaggggaggagtgtactgtgcatgtgggaggacatgacttagggacagcgcagagaacagtagtcagcctccaaaatgaccccaatcatctttgcttcctggtattcaaacccttgggcagtatgctctcacactggagagggctgaccttaaccaaaaggatgttgcaga

SEQ ID NO: 268648 - DNA, 845 bp, Homo Sapiens
  misc_feature (708)..(708): n is a, c, g, or t
  misc_feature (713)..(713): n is a, c, g, or t
cactgaccaaaatgttatatagaatattactgtaccttgttttaacttcagagctttgtattttacataattataaaacaaaattaaatttaagagagtaattcttaaaaatcacaaacaagatttctgcctccagccaaaaagctgtaacagggactagatttaccctcctgtcaaaaaaagcagacaaaatatataaaacagtggttttcagacgttggacagcaagccttgctgataatgatccctgaaagaaaggaaacaaatgagatgggccctaagagcactccaccttactgcctggatggaatttccaggctgcacacagaggctggagatgttgttgagttgaagaaacaaagttcatctttcaaggaggctgagatggcgataattttgcaggtcagagtactggagaggaaagatctgcacagagagaactctctggggagctgcatagacttgctcatgagtcagcagctgagcgttgatcagcccttttgtgtgaggagactactggaagtcagggaaaaaatcactggaaagcagcagacagaacagtttccagagctcacacagagaacattcatgttctcaccagtctgtatggaaatacctcttaacatgacaggcattgaatagagtccacagtaatgggatcaaattaattctatcacaagaactggaaccagaggcaaaaagaaaagnaaagnaaaatctagactaacagctgttctagatcagcctaccaaagtttaaaagcaaattttgaagagattaaactatttccaagttaatgaagtatatttcagaacaaacccttaaatatttgagggaatacaaaa

SEQ ID NO: 268649 - DNA, 163 bp, Homo Sapiens
gaacaggccatgctgtagctccttaatgtaataatacactttatgtgatttttttcactatgtaggacaatgggttctttctctttcatacataaaaatattagtaaaaagaagatgtcaaaatattttggccctattttcagcagataaaacgagagagaaa

SEQ ID NO: 268650 - DNA, 305 bp, Homo Sapiens
cccatgttacacgggacaggacaagcctccgggtacaagccctcagtgaaggtacacaatgaggatgaatgggaaccaggtggattgggaggctagctcctgcccacaggcaggatctgtcctgaaagcaaggtcttcatgtaatccttacaataactcataaccaaggttcaaagattaagcaacaagagcacaggtccatgtagcttataaatggtgaaaatggattccttgcatcatttttactctttccactctaaaatactaatactgtgatttactcttcttctatatcactatttctt

SEQ ID NO: 268651 - DNA, 704 bp, Homo Sapiens
gattacccttgtacttttccaaccgaaaatcactggataccacaacaccaaccaaaagattggtggaacgaggaatgccctacacgcagcccacaggaatcccagtttcccatggaaaccaaaagcgagttgcttgcctgctcagcaagttgaaactgaaggagtggctccacataaaagaaaaataacttgaggactgtaccatggaaaactaaatttaaaaaaacagttataacagtgtttaatttagataagtttgagggaaaataatcagtaggcaagaggaacatttttcctgtagtagctagagtgccttgaaaaaatgtgttggctatgtgaaggaatatttcaactaaaatggaatggtatgcttttcacccttgaagtttgaggaggatcttgatatgttttaacattatcatggcagggaaatatataaagaagaaaaatatttttacattaaacccttttcctaaaaattgtaaatagaaaaataatttggttttttatcaagaacaacacttatcgttatgtattgtgttagttatattgcccagtctgttgcgactgactcaaaaagttaaatgttgccactgctgaagatgattatgagcatcgcaaactttgtttctgacccattttgacagtttttatatactcctttaaaatgatgaatgttacaggttaataaagttaataccttt

SEQ ID NO: 268652 - DNA, 397 bp, Homo Sapiens
  misc_feature (21)..(21): n is a, c, g, or t
  misc_feature (32)..(32): n is a, c, g, or t
  misc_feature (47)..(47): n is a, c, g, or t
  misc_feature (68)..(68): n is a, c, g, or t
  misc_feature (92)..(92): n is a, c, g, or t
  misc_feature (106)..(106): n is a, c, g, or t
  misc_feature (118)..(132): n is a, c, g, or t
accccgagtgggggaaacatnggggccttaantccaaccacggggancgggtaaaacggttggtaaanacctgagaaacattttggaatggnccttcaccttattnctaacccatgcnnnnnnnnnnnnnnngcagcgactaattgtgatgcattcagatttcagtattcagtactgtatatttcaccctgtgtaatggggccccctctcctttctctctttttgtattgtatgcgattctgaaactgattgagtcatgaaaataatttgtggcggtgattctaatgtattaaaaacgtttcgtgttcctttctaactggattacaccctggattgaaaaagtcttcctcgtggtagttatatgtagtttcaaacatgaataaactttttgctttca

SEQ ID NO: 268653 - DNA, 128 bp, Homo Sapiens
atttacctagcagttcatttatgcaccaagattcttgtccccaaggttgtaacttagcagatggagacagacattaagcaacagacatgataaacaacataattatacagaaaaaaaatagatgcagt

SEQ ID NO: 268654 - DNA, 422 bp, Homo Sapiens
tggtgtaatgtcttcaaatattaccaaaccttcctctttaattgaaaggtctttccccattttcagtttatacattagcactgtgggaaaaactgcttatgaaccaacactacttccacgttatattgacattatttctctatttaccaagtgtgtatgggccaattcacattaaagaaaccaacactgcaacagaacagactataatcaactctgggttatgtgctttcaagatcattatgtgctttcaagatcatttgggttatgaagcctcaaatgcctctgagtgttaacttttagggcacatagtattgactgtacccttccacctacatttggtactggctatttaggtcaaatcctttacagtaggtccacaggatttaaaaaccatctctaggtccagaggcattcttaaaaag

SEQ ID NO: 268655 - DNA, 524 bp, Homo Sapiens
gatgtattcataagaccatgtaatattgatgtgattgttgccgcttgagaaaaaaaggcaacagctgattctttcaacaactgtcacagaatggctgggctgagaacgctgcccagggccctgcagctggcgggagaggtgtctggtgggagcggtgtctggtgcgtcagctgactgcttcgtgtctcactcgagagttgcttctggtttcacactttttaacccctctgtgctttagcagccgtgaccttgccttcattcgcttcatccagtgcaggcctgggttaattgaagacaccaaagtgtttctcttccagtttgaaaaccaggcaaggtttacacgttgggtttcagtgtatttggcctttggaaccccttcaaaactaaactttaagccttttggctgggtgttggaatgtctttagcgggggtgaccgggagtgacccgggacggtgttgtggtttacggctccagcttcagcctttccagaaacccttggtggagggcagtgttgggctgcaag

SEQ ID NO: 268656 - DNA, 528 bp, Homo Sapiens
ctacatcttccgtgggcgaattcccagaaaacacctttccgaaagaatccttctgaccctagagtgctgggcttagaccatctctacagccacagggcggaaactgctggtgtctgggtggtggggtatggtccgccatcccaactatcttggagacctcatcatggctctggcttggtcctttgcctgcggggtgtcacacctgctgccctacttctacctcctctacttcaacgcgctgctggtgcaccgtgaggcccgggatgagccgcagtgcctgcagaagtacggcctggcctggcaggagtactgccggcgtgtgccttaccgcatcatgccctacatctactgaagcggctccaccaccccaggtggggcatgtgcccactcatccaccagcacacccaggaccaggagcctcgacacacttgggactcaagggcttgcaccccacccagccctgaggatgaacaacctcagagaagaggtggtttagagcaaggaaaaaaatgaaaccagtgaccaaaa

SEQ ID NO: 268657 - DNA, 417 bp, Homo Sapiens
  misc_feature (40)..(40): n is a, c, g, or t
  misc_feature (107)..(107): n is a, c, g, or t
  misc_feature (381)..(381): n is a, c, g, or t
  misc_feature (386)..(386): n is a, c, g, or t
  misc_feature (400)..(400): n is a, c, g, or t
tttgtaacatatgctaatatgaacactgaaaaaatatttnctagtggtcaactatatggaaaagattgattaaaagcaaatctcatgttttatgacataaacttttnccttatttttcataatctgtatagagaaaagaaaacgagaatttggccaggatttttggagattattggagctgaaaagtctattttatatctttcaatatagacagcttcttaaaaaaaccctaatattatggatagacagtgcaggaaccaaacatctaaatatgacaataggcacttaatctttacctgaggccttgatttcttctccccataaggcagcatattgtgaggcagactctatttgacagagtgggtgaggaagtgataaatngtttnagccgggagtcccncttttccaaaaggctac

SEQ ID NO: 268658 - DNA, 456 bp, Homo Sapiens
  misc_feature (33)..(33): n is a, c, g, or t
  misc_feature (60)..(60): n is a, c, g, or t
  misc_feature (198)..(198): n is a, c, g, or t
ataatttgtgcactaaaagatctcctgctgatnagtcacctttgttgctgctgtgtaaanagaccccaggcctcacctgtttgtttaggcccaagatgcccatggacatgcagcgttagtgatccccactagctgtgaacagcccaggcccagaaaatgcccggcgtgagagccagcagacagcccaggcccagggtnaggcagtgcctgcttctgctccatcaggtgcaggggatttggctgaaggcgtgcatatttcctgggcacaaacttcctgagcctctgaaatgggaggctcgtcaatttcagaccaacctcttttcaacccatcatagcacgttcaaggtgtgccttttacttctacctgtacatcccccatcccttcaattctttcattccctgaccagtgagagggttcctgggggaagtatggtgaataaactgacatgcatgctt

SEQ ID NO: 268659 - DNA, 459 bp, Homo Sapiens
  misc_feature (249)..(249): n is a, c, g, or t
  misc_feature (449)..(449): n is a, c, g, or t
aaggagcggagagtttaataggccagacagaagggagaaggcagaaggaagaagctcccccgtacagagacagagggagggaggctccaaagccaagagaagggatccccaagtgcggtggacaccagccaggtatatatgcagaggctggagaaggtggtgttcgatttgcatagggctccggggattgggttgactaggcgcatcattcacatagctcatgaaaaagctggctcttccaccctgggncttttaatatgcaaatacatgggcgccatgatgttctacgctcgtcgggattccaggagacatgtaggggcaagggcaagaaggctgtgggaatctccatgtttgggtggacccagtttctaatggcctacatttgcatatgaaaggttgctggcctggctttaacagccgtggctttacaagaaacttttctggagatngcttaaaaaa

SEQ ID NO: 268660 - DNA, 470 bp, Homo Sapiens
  misc_feature (29)..(29): n is a, c, g, or t
  misc_feature (38)..(38): n is a, c, g, or t
  misc_feature (106)..(106): n is a, c, g, or t
tataaaaaaggggtcaggtgggcagccancattaagtnccacttctctggaggtgctgcaaccccctaacccccctggtcaggggcattttttagcacttacagcntccctccctgagacaggagagaaaggagaaggtggttctaacagtcctcacccattctgtggaaacaatctcccagagaagcacatagctccttctagacccacgaggaatattcctgtgaagaagccagaaacggtttttaggcaacacagccttgggggctgcatcttcacttagtgtctttgtctacacccctccacaaacacaaggaaagaaagcaagtcaggccgctcttcagagccttgtccttaactcaccttcagtgaactcactttctaaagatggagtcgagccctacatgatttctaacaaaggacgcatttagggttgccagctacccaggtttagcctgggccgtctggga

SEQ ID NO: 268661 - DNA, 345 bp, Homo Sapiens
  misc_feature (215)..(215): n is a, c, g, or t
  misc_feature (267)..(267): n is a, c, g, or t
  misc_feature (277)..(277): n is a, c, g, or t
  misc_feature (300)..(300): n is a, c, g, or t
  misc_feature (306)..(306): n is a, c, g, or t
  misc_feature (315)..(315): n is a, c, g, or t
tttaagtgaaacagagcagtagatatcaaaatgccttgcccatagtagtgatgagtggtttttttcctgaaattttgtttctgttatgtatttatatttatttgtggggttttagttatggaaatcaaatgtattccttactgtgggcttttgggtcaaaaagtttgaaaaacattgctcagggagaaaactgcctctttctcattttcattccngggagggtattttctgggctggctgggctttctgaggagccgagtagggggnaaggaagggncgaggggtccttaacatttgggntttgtnaaaattttnaccaaatttatcccctttttcaggacatta

SEQ ID NO: 268662 - DNA, 661 bp, Homo Sapiens
tctttcaactttaagaaacacctgaaggagcacatgaagctgcacagtgacacccgggactacatctgtgagttctgcgcccggtctttccgcactagcagcaaccttgtcatccacagacgtatccacactggagaaaaacccctgcagtgtgagatatgcgggtttacctgccgccagaaggcttccctgaactggcaccagcgcaagcatgcagagacggtggctgccttgcgcttcccctgtgaattctgcggcaagcgctttgagaagccagacagtgttgcagcccaccgtagcaaaagtcacccagccctgcttctagcccctcaagagtcacccagtggtcccctagagccctgtcccagcatctctgcccctgggcctctgggatccagcgaggggtccaggccctctgcatctcctcaggctccaaccctgcttcctcagcaatgagctctcctccagctttggctttgggaagccagactccagggactgaaaaggagcaacaaggagagggtctgcttgagaaatgccagatgcttggtccccaggaactaaggcgacagagtgcagggtgggggcaagactgggctgtaggggagctggactactttagtcttcctaaaggacaaaataaacagtattttatgcaggc

SEQ ID NO: 268663 - DNA, 550 bp, Homo Sapiens
  misc_feature (69)..(77): n is a, c, g, or t
  misc_feature (336)..(348): n is a, c, g, or t
tagcattgtgtgtgagtggccccacaggtacattcaccctctagtgcagcccctcagtttaatgaaggnnnnnnnnncaaacacaaagccttaagctctttgagtacttcctttaccaaatgagcatggttctaacacctggagctgggcctacattggaaacaagcccctcctgccctctgtccattcttagagcataccttcatccactccatgctcagcacgtctcatcccaagcgacaattagttggctagaaacacttttctgtaattttaaacttagactgttttgttacaaatttttgcaccattctgttaaagatgcagaattgggcnnnnnnnnnnnnnacagatgaaataagcccttacctttcctcttgtctctggggaatgtcagctgatggttcttatttaaggttttgcattttgttcactatccactactgttcgttagccagaaattctctagtgatctgaagcaatgtgactgaagaccagttttaagttatgtgttggcaagttgccttatatttaaaaggaaaaagaaaaa

SEQ ID NO: 268664 - DNA, 452 bp, Homo Sapiens
  misc_feature (21)..(21): n is a, c, g, or t
  misc_feature (30)..(30): n is a, c, g, or t
  misc_feature (37)..(37): n is a, c, g, or t
  misc_feature (196)..(205): n is a, c, g, or t
cctttgaaagtggtggccttnccactcggntcccctnccacaaaaaaggaagacctagacagagcaggaccctaatattaacatacaaggtatagtgacaataagatttcctcacaaatatcatgcctaaattttataattattgataaacccattaaaagtaaaagcctaaacacctctcccattccttaactgnnnnnnnnnntagatggaatgcactcattttgtctttatggatattctccaatagctaaaataacttgttatcttaacaacacatactatacagataaatgtcttacctattaaagatttgatattttctaagattaaatcactagtaatacttccagataaatcttgccccaattcagcaatcagcttggcataaccttcattctcttctcttaacaaattgaatttttgctgcttataactgaaatcagatataa

SEQ ID NO: 268665 - DNA, 460 bp, Homo Sapiens
  misc_feature (166)..(166): n is a, c, g, or t
  misc_feature (428)..(428): n is a, c, g, or t
tgggaataaaaaagaaaaaccagtgaagactttaactaaaagtagaatttcaaagtattagaaaccaaaccccaaaattaaatgtgaagatcagtgtctgtactgagctggcccatctggtggacacaggatttgcgttatcgactgcaatgttacccagggattncacgatttctagcatctgttcagggttaagaaaattggattgagtaccaaatacagcagagcaaacccggctttgaggcaagggccccatcaagtagtcatgcagtacttttgttagggttctgggtgcaaatcttcctcgtccctcccaccttctcctgggcctccttgtaaacccaaaccgccaggaaccttcaatttttctttcaagaccagggctgtttcttaatgttggtaattggtcaaggaaatgggtgagccantgcttgctctgcacatcgtcctcagagtgctc

SEQ ID NO: 268666 - DNA, 322 bp, Homo Sapiens
  misc_feature (29)..(29): n is a, c, g, or t
accccaacagagaagggaaagcagtctgntcctgaacataggggacataagttcattcatgcccaagtatctttcccagcatgtttctccccatttagaatatctagcatgtaaggcctttcaatattaatataagccccaatatcagctctttcccctttgtatttcatctctttctactctcctatttgtattttgtgttcctatcaaagtgtcgtatctgggagatgacctgccttatcctgttctataacagttttgtttgctgctgtgtctttagaaacaggcctggcacacagtaagcactcaataaatctttgat

SEQ ID NO: 268667 - DNA, 641 bp, Homo Sapiens
  misc_feature (79)..(142): n is a, c, g, or t
gctggaaaatccaaaagaaactttaaatttcagatatttaatgaaatcattatagctgtggtaatttcctttagctggnnnnnnnnnnnnnnnnnnnnnnnnnnnnnnnnnnnnnnnnnnnnnnnnnnnnnnnnnnnnnnnnactctggcagcatattccaaataatttctgtaaaatttcagtttgaaattaatagaagacatattaaattgtttaaactctttgttatttaaattctatattactttagtcgattactctgtattattacggcaaagccttgatatgttgccccgaatttaaagaaaaggctgttcggccctaaaaacaggaatattttattacccaaaaggaattaactacccatatgtcatttacagaaaagagtaaattcttcagggcatagaaaatacacatttccctctgtttgtgtggaaataagccaaatacctgttataatagattcctcacagaattttgtgaagcttcaggtaaacttgaaagagaaaaattaaaatgctagagtttcataattacaaattgggatataaaaatagaataattatttgaattttgtatttctctccaggggatcaaaagtaatatataaacttttaataaatattgatatagcttcaaa

SEQ ID NO: 268668 - DNA, 432 bp, Homo Sapiens
  misc_feature (340)..(348): n is a, c, g, or t
gtgtaccaccccatatatttcatattactgtttcacatgtacagctttctacttctttgtaagaacaccaaccaaccaaggtttaagtgattaataggcttgagcaccgggtggcagatgttctatgcagtgtggttcaagtttctttgacccgcacttatatgcattgcctaatatggaatttaagataccatacacagtctctcatggacctatctctattgtagaattatgacttatgtcttacttggcaaatttttctgaatgtgacctttttttgctgatttgctgggtttgggattaactagcattattttgccacctttatattgtatttatnnnnnnnnngtactatcaatcaatcatactactttggattgttgtgctggtgtaatgtggatttaacatcaataaatatttgacaaataaaaa

SEQ ID NO: 268669 - DNA, 390 bp, Homo Sapiens
  misc_feature (25)..(25): n is a, c, g, or t
  misc_feature (41)..(41): n is a, c, g, or t
  misc_feature (79)..(79): n is a, c, g, or t
  misc_feature (201)..(201): n is a, c, g, or t
  misc_feature (221)..(221): n is a, c, g, or t
cccagtagtgacctttgccccccanagtggggtaagcaccnccccagatgagaaaaagcagccacagtcaaccccggcnctgtttgccctcatttggtgatcagtcagtcacacataagttcccttgtattcctaaatttcatgcacttctccccagatgcctatagggttttctctcactgttgcccaatggatgtcatnccagacagtgggctcatatncttacggttttgtgcaatcattgtcgtattgtagtcttaagactcattatagtgtatttttgatatttttgaaatgtgttaaattttttaattcagtaatatgagccagagcatgttgcagcaaatctattgtttgtaaaaataacaataacaataataaataaaataa

SEQ ID NO: 268670 - DNA, 408 bp, Homo Sapiens
  misc_feature (180)..(180): n is a, c, g, or t
  misc_feature (289)..(289): n is a, c, g, or t
  misc_feature (318)..(318): n is a, c, g, or t
  misc_feature (328)..(328): n is a, c, g, or t
  misc_feature (342)..(342): n is a, c, g, or t
aaattagtctaataatatagtttataaactttctgaagcaaactaagccctccgatttaagcatctcaataaaggaaatataattttctaaatcagataaaattggtggagacagcagaagaaagctaattactagtatttccaaaagattcatattaggcattcttctaaataaaagtnctcctatttataacttgacaatcttaagagggaaagtaggcatgtgtatgttgggaacccgggcaaatgaaggatcaattaggtaacaagctttacattaggaatgggnggggaaaccaaaaatttttatggatctcnggcataaggnaattctctggtacnataacagctttgacatttttgggcctggttaaatttcccaagggcagttgttaggcccctcccttt

SEQ ID NO: 268671 - DNA, 480 bp, Homo Sapiens
  misc_feature (339)..(339): n is a, c, g, or t
  misc_feature (346)..(346): n is a, c, g, or t
  misc_feature (364)..(364): n is a, c, g, or t
  misc_feature (373)..(373): n is a, c, g, or t
  misc_feature (461)..(461): n is a, c, g, or t
atcaagtagcattgaacaatggcatgattccaactcagatttgtgggacaccaaagcccaggatcttcccaagtgccctgctgcagtttagcaggtcctctccagctaaagagcagtgagacattgggagcccaggagtgttgaggccaggccaggctgaggcccatcagtcacaggtgtgactgggctgcttgtcacacacagggcgtggtctggccactgttgccagtgctcactcagcggccacatgctttttaatatgacccctgaggcactgaaaaataaccccatggccaactgcaggatagagagatgaggtcaggacagcagccctgtgcnaattggnattacacttgttggctcngagttattngtgaccccctggtgcagtgctcccacggccagtggttgcacacagggccattcactggtccatagactgaaaccatgtgaccattttnagagggccgggcacacttt

SEQ ID NO: 268672 - DNA, 701 bp, Homo Sapiens
  misc_feature (108)..(116): n is a, c, g, or t
  misc_feature (196)..(232): n is a, c, g, or t
ttgacatttatggagattggtgttgtaacatattttgataaatactaacttattttgttggggttttggttgtctcttgtcttaggacctggtagttatttgcttgannnnnnnnnccgttattttctacataggcaaagagaattcgagggatagacagtctccaagaaaagtgaagtggtgggagagaattgcnnnnnnnnnnnnnnnnnnnnnnnnnnnnnnnnnnnnnggctgagatttccgtgcaagacagcacccaatagactatttagagttgacatttgacattttaatgggcgccatggctcattttgtagattgagaaggtgcgtctcccctgctccaagtctcatcatgacagcgtgctgacagctgggagtctgtggccttcctcacgcagaggccttaaagctggacacagaagcacgcctaggctggggcagggatgggacccatgccccctccttagaggacgggcttcctggttaggaaaggacacgtgggggtgccttgcataatagttcactggtcaccgtgcttttatgagtagtgtttttgtgcacttgccaggggttttctctctgtgtgcgaggggagtgatttaagcaatggtgtctggagtaagccttacaattttaatagactttttcttatcatatccctcatttctttccctgaaataaaaatacacacaagcg

SEQ ID NO: 268673 - DNA, 493 bp, Homo Sapiens
  misc_feature (308)..(308): n is a, c, g, or t
ctagttcccgttgcagcaataatgccggggttctcctcacaactcctccaccagaaacactctccaaacaaaaactgacggcctcaagaaatggcttctgattgacttcaggaaagccaagagcacctttacaccttctgagcgaactgccggactgggttctccagcccagatcttccttctagagactactcagcgttctccagctgggggaagagggaaggagacaccacaccgacaaaccccagaccattttgcaggatttgtaacaaggacaccttcctctttaagagcaccctccctccctnccgcgtaggccgcaggtcagggtgaactggttggaacccactgagtctttaaaataaagttagaggcaatcatgataatttagtttacttctgaatattttaaatattacgaaaacaagtataacagctttgttttcaaaactcttttgaggtatcagccattaaaagattaaggtttttgtaaa

SEQ ID NO: 268674 - DNA, 506 bp, Homo Sapiens
  misc_feature (12)..(12): n is a, c, g, or t
  misc_feature (28)..(28): n is a, c, g, or t
  misc_feature (45)..(45): n is a, c, g, or t
  misc_feature (56)..(56): n is a, c, g, or t
  misc_feature (69)..(69): n is a, c, g, or t
  misc_feature (80)..(80): n is a, c, g, or t
  misc_feature (112)..(112): n is a, c, g, or t
  misc_feature (132)..(132): n is a, c, g, or t
aggcctaaggtnattggcccctcaactngggcattactaaaaacngttaagtcacnttggaactaaatnggataggaaanttttcagtccaaatatggtgtttaaatagaangactgatagatccaaattgngctaaagttcatacttaacgatgaatacacgaattcctaaaacatgagtaaacaagacagcatgacaagatcactttaaggattatcctaaaatgggtaattatagtaatcttatttttaaaaataattcatccaacattcagtcagtgttcaaacttccaatctctgcccccattcctctctctatagtttgtttgagttgggatccaaataacgtgcacacattgatgtcaatacaaaattgttttaactagaaaaggttgaagagatagacacaaacagtgctgaaggcaacttttcagtactttcacttctttttaagttagcagcattggtgtttgaatacttctaatttgatttcatatcctcgtgcc

SEQ ID NO: 268675 - DNA, 421 bp, Homo Sapiens
  misc_feature (364)..(364): n is a, c, g, or t
  misc_feature (383)..(383): n is a, c, g, or t
cttgactcaagtgaggtttgaaggcccaggctgctagatcctccaatttttaaagagaagttggaaatctagatttttatgtcataacggtttaaaaagacattgttggctaacacaaggtggtgggtgagcaaacaaaacatgtttgtaggttgccagttttcaacctctgttccaaatccttccagtcttagttcatgggctctgttagaaaggggagggctttgtctgggtctgatacctgggcccctccccagtcttcctccagccctgaatttgatcagcactcctcatgtacctttcctgttggcatctcacctccagggctttgtctgggttgggaaagggattcttcaagaaggangaaaagacagaaggccttngacttcttggttgagggacccgagttgcccggggggcc

SEQ ID NO: 268676 - DNA, 329 bp, Homo Sapiens
cataagcttagttcagctatggggaaaaagcacatgttaaaagcagtagataggcaaggattaggtaagaatcatggtcagggaaagtaattagaaatcaggaagtcagcgggtataccaaggaggcggcatgaaataagggagcaagagaaagcctattttctgtgagctttctgaggacccacattgtatctctaccacagcttataaagcaggatgtttgtcaatgatcgaattgataagtataaataatgttgaatcaaacatatgttgagaaacagatgagatgtttatcgcaggattatttataatggaagaaacaaatatat

SEQ ID NO: 268677 - DNA, 733 bp, Homo Sapiens
  misc_feature (188)..(209): n is a, c, g, or t
  misc_feature (225)..(285): n is a, c, g, or t
  misc_feature (499)..(590): n is a, c, g, or t
  misc_feature (662)..(662): n is a, c, g, or t
  misc_feature (723)..(723): n is a, c, g, or t
tgaaccaagcaaggatcaatgtgctgactgcattggccaattgctttgatacttctgctatttttttagacacaaacccataaactaactgcttaagaattcatactgcttgaattatgtaaaatatattttacagtatatctttccttgggccttagattactattcactgggcaaatggtatttgnnnnnnnnnnnnnnnnnnnnnnaatagacggaagtctnnnnnnnnnnnnnnnnnnnnnnnnnnnnnnnnnnnnnnnnnnnnnnnnnnnnnnnnnnnnnttgggcttcaagcaatcctcctgtgtcagccaccagagtagctgagactacaggggtatgccaccatgcccagctggcatttgttaaatcttcatttgaggtctagatctaggcactgtggacactgaaaaacagttgggaaatctttcgagctgtggaaatccaaacaaagactgataattcctggtaggggtgtgtgcgtgacgtactgcannnnnnnnnnnnnnnnnnnnnnnnnnnnnnnnnnnnnnnnnnnnnnnnnnnnnnnnnnnnnnnnnnnnnnnnnnnnnnnnnnnnnnnnnnnnttataccacgggtctaccctttgtttcccaaggctggtcttgaattccttggggatcaagcaatccttccanctttgccctcccaaaagttggttgggaattaataagggcaatgaagcaacaacgactgggncaagaaggga

SEQ ID NO: 268678 - DNA, 447 bp, Homo Sapiens
  misc_feature (412)..(412): n is a, c, g, or t
  misc_feature (436)..(436): n is a, c, g, or t
ttggatgacaagggctcgagcctcagcgcctgtcctgattctgcaaagtctatgaagagtagtgtttcaaacggacattgccagcaggagagatgaggcttgttctgtttgggaaagacctgttcataacgccaagcctgccatcccaaagcacatagtcagggggctgaactctcaaatcctcagtgtctattttcatagcaacccttctttgatacttactgcccctcaaatatattttatatcttattcacttatataagcagaaaagcccagaccaaaatgtaactgaatttttatgtttttaaatacaaaatttaaaatgtatgaacccaaactgtcgattgggaactatggcttttaactcttagtgcgggagtggcatccctctgggagcccacacatcctgganttttattgggtttatgggacgtanggtttgacttt

SEQ ID NO: 268679 - DNA, 437 bp, Homo Sapiens
  misc_feature (19)..(19): n is a, c, g, or t
  misc_feature (42)..(42): n is a, c, g, or t
  misc_feature (83)..(83): n is a, c, g, or t
  misc_feature (393)..(393): n is a, c, g, or t
ggccgcctaaattaacccngatgaaaaccctcctccaccccnggcccatacatagggtttccccaataaatgaaccctgtgcnaatttgaaccttttgaaactccttagatttccttcctttgcctagataggagtttggactagatggatcttgaaagttccttttaaatctatatttctttagtgatatatcttgtatctaatcttcagaatgttcactctcaaactaaagtcatcccattacatctccttggaaaatcaatgggaaatcccttattttagaagaggttcaacaaacatgaagtgctatttgaggatgttcctggaaaggttaaataacttgaaagggttataatttcactattaaccagggcaaactcttcctgggggtnctccttagggataggtaaaataccatggaattaaaaataaatct

SEQ ID NO: 268680 - DNA, 352 bp, Homo Sapiens
  misc_feature (36)..(36): n is a, c, g, or t
  misc_feature (54)..(54): n is a, c, g, or t
ctttataataaatcagatgccctgaggctctgttgnggaagtagaatccccaangggactcccagacagtaaacctttttcgctgttttcagctctgtcacatgctcagtttgtgaccccagggaaaagactattgctttgccatgcctgttttcctaaataaaacagttgctggcatttgcacatccacaacgtgttgattaacaaagggattggtggagataaacagatgccaaacctgacctatttcttaaactttatggaataaactaaatttaggatttctcatcattcatatatgatgccataagggagaagagtttatttggggaaaataaaagaaatttccaca

SEQ ID NO: 268681 - DNA, 424 bp, Homo Sapiens
gacccaaaatatatattattataaaccacaatatccagagtttgtcaacataataaaccacttgccatttgttggacctatacaactgtacaggagtaagtcccacacccaaatcaacctaatttttatttataaatatgacctagaacaccaacagcaacagagaaaactgaagaaaagaaagcaactagaagatgtaaaaatattatagctcaggatgtacttcattcttgaagccaaatcagtttgatataaaaattgagtcattcagaggaccacagagtttgtgcaaattgaaagtatgattgttgacttttgttaaacagaaaggccaaacattaggatagctagagttaataagtattttggaaagtaaagctaaagacataccttttaagatatgagataaagtgggcaaatatga

SEQ ID NO: 268682 - DNA, 557 bp, Homo Sapiens
  misc_feature (458)..(458): n is a, c, g, or t
  misc_feature (485)..(485): n is a, c, g, or t
  misc_feature (508)..(508): n is a, c, g, or t
  misc_feature (522)..(522): n is a, c, g, or t
gaccaagggtaagaaggaccatggattcaggttgtgattatatgttgatttgagtttcataggggacattcaggttatgacatccagtgggcaattggaaatagaagtatagacccataggaagggtggtgagagttatacacgtgaatcttgtcaagctatgggaaatcaatgagattgttgagtaagtggactatgattgaattacccgaagtaatcattgtcctataataccagagcacaacctggaagatacagaaaactcaggcataggggagggtgtttgagaagtaaatctggtaaagattttgaaagccttgaagaaaacctagaagaaaagtatctggaagtgtcttagtctgttttctcttggttataactgaatacctgaaactgggtaatttattatgaaaaggaatttatttccttacagttatgggagtataaggaagtcccanggttcaaggggctgcatctagtgaggncccttcttgcccagttggggacntctctgccagagtnccctaggcagccacagaggcttcacttgccggagg

SEQ ID NO: 268683 - DNA, 495 bp, Homo Sapiens
  misc_feature (126)..(126): n is a, c, g, or t
gtgctggtggacgtggtctctgcagctgagctgggaggctgcacgtgggcctgatgggtcttactgagagcctgggtgactctgacagctcttgtggccaccagttaacttccaagaggaccccanggagatggaaagacccaaatagtttggggggcagggcttgtgcctaggacccaagttcatcccatcactgctgtgggaacgtatggctcatgaatcaccagtggtgtgcggcatgaaagctgggtaccttgctgggaggtcccttgttctttcctccttccagaagcttcccgcctatcttcatccacaatcctccaataggttgtatttcacactcatcaccgatggctttaggcacaagctttgtgtgggtcactctggttagagcattttacacaccctcatgtcaagaagaacaggtcagtgatatcttttcactccactctttagacaccacataatggaactgaaaacttattagttgtgcct

SEQ ID NO: 268684 - DNA, 530 bp, Homo Sapiens
  misc_feature (25)..(25): n is a, c, g, or t
  misc_feature (96)..(96): n is a, c, g, or t
  misc_feature (114)..(114): n is a, c, g, or t
  misc_feature (136)..(136): n is a, c, g, or t
  misc_feature (146)..(146): n is a, c, g, or t
  misc_feature (193)..(193): n is a, c, g, or t
gggggaaccccaaaaacggtagganatccccacgggctggaagaaagatccctgaaggccccgagagcatgtcccgcatgggtcatcattaacccnagctcccaacccctttgnagaaatcctgcaatgatgcccnaagggtgccnagcccaaagacagcagcattcccccaagcgcaaagagaaaagcgggncctcgggaaaggaaattcccgtctccctcctccctccctcgtcttccctcttccctcgccctctaacccggattcaagtggcatcgggccaacccagatctcactcgtgcaatggccaatgtacatggtggactatgccggcctgaacgtgcagctcccgggacctcttaattactagacctcagtactgaatcaggacctcactcagaaagactaaaggaaatgtaatttatgtacaaaatgtatattcggatatgtatcgatgccttttagtttttccaatgatttttacactatattcctgccaccaaggcctttttaaataagtaaaaaaaga

SEQ ID NO: 268685 - DNA, 898 bp, Homo Sapiens
acgctccgtgtccatcccaggggccagcatactacgctcacctgggtggccttccgggccaggtaccacctggtggataaggaacatgacagtgctgaaggaagccatacctctgggcagagtaacgggcgagaccaccaagcactggccaaggcggtccaggttcaccaagacactctgcgcaccatgtactttgcttgacatgttttagtgtttagcgattgtgtaccgagtgggattcacgagaccagctacactcagaccaacagatggccagcccttccgtgacagccagcatcgaacatgagacgtcattgattttattagattctccgttttccagaatgccttccgtcccagatttcaaacttggattttgaactgcagacctgtatgagaacccaatgtcataggaaatatggtttgctaaaatctataagctgcttattaaaacagagtcccgtgtgtcctaaaaatctcctaaaaccagtctatgaactcagggctttaaaacatttttaatttatttggtcattcaatttacttgtttttaatacatgattctctatgaaattgatgggctcaaactagctgtgaatcttctgagagtgaaagcaacacaaaacacaagtgtggttttaaagccttgaacattctgatgttgtcactaaagttgatttccaggcgatgctcgtgtcccctggcgtggctcacccaagttcctcgactgaaggcggtggccatgcagaggcgtccgcaggtgccgtgttctgccagcaccgcccttcacccggcctgaactaaggagcagtggcagaaggtgggccccgtgtgtttacagcatttccaggtccagagaggttggcagacaagtgccattttaataaaaaatgtattt

SEQ ID NO: 268686 - DNA, 465 bp, Homo Sapiens
  misc_feature (364)..(364): n is a, c, g, or t
  misc_feature (412)..(412): n is a, c, g, or t
aaaagttttttaaattaagacatttattaacaagtgcttgcagtttgttaacttttttgaaaaaagtcattataaaattttattacatattaaaaatgttcttaaaaatctcaacttgactggatataaaacatttaaaaatctttaaaggcatattcagtgaaaccaagcctacattcatggcatttaaaaaaataattagtgagcaggaattggtttattttccaactttcccactgatcttcaaatacgtcacttttgttcaaataatgcaaggtttctaacagtccaattgtaaagatttttactaaagtgggatttgaaatttagcctctaatctattgagaatgatgaggattttgcngggaacaaagatgactaataattatccaagaactgcaacagctaggcnggatgccaattgggcaactcacccacgtatttcccaaaagcggcccacatttg

SEQ ID NO: 268687 - DNA, 390 bp, Homo Sapiens
  misc_feature (57)..(57): n is a, c, g, or t
ggccctcaagtgatttgccctgccctggccctccccaaagtgcctgggattaccggncatgagcccaccctcaccccagctccggtcacattattcctagcctttttatcccaaaaaatgggcagacccattcttttgcagaagatgtcagaagaaaatgaaagtgaaaacctatgcagtttgtttaccgtgaacataaaagtatgttaatttaaataggaaaatattttatgttaaatatgaaacaatagtttaaaccccacttgaaaagtatagcgtacaattatttttagactgaatttgaagatgatggaaagggtttttacaaaggcactgtttagatatacagattataattataattacattattattaaatatttattcttc

SEQ ID NO: 268688 - DNA, 493 bp, Homo Sapiens
  misc_feature (428)..(428): n is a, c, g, or t
taatctggctcactatacagttgaagacactgaagcccagggaagtttttttgcagtacataggtttcctgaatattttctatcagaatgtccttgttcctattattagactgggaaaaaagaaattagactgattaaaatcctatttggatgaaattaacagcttttggcaagacgtttgtagtattgacttactatctgaatttagcgttggtaacggaaagcgacctgtaaaacaagaaccaagtacgctggaagccgccttgcagggggcaacactgggtttggcttcagctgtgcaacttgggagcattttagcttggtaacactggatccccttttcaggtgagtattggggcttgtaatttgaatttgaatgaggaaaccgtaatgtgggctactgggtaaggttaaaacggattaaatgnccccagaccaaaacagctcgcttttcttgctgtccaatttccatttaaagggttcctttgtttcc

SEQ ID NO: 268689 - DNA, 484 bp, Homo Sapiens
  misc_feature (424)..(424): n is a, c, g, or t
  misc_feature (438)..(438): n is a, c, g, or t
  misc_feature (446)..(446): n is a, c, g, or t
  misc_feature (465)..(465): n is a, c, g, or t
cagttctacaagtccacgcgcttcaagcccacccgcatcatcttctaccgcgacggtgtctctgaaggccagttccagcaggttctccaccacgagttgctggccatccgtgagcctgtatcaagctagaaaaagactaccagcccgggatcaccttcatcgtggtgcagaagaggcaccacacccggctcttctgcactgacaagaacgagcgggttgggaaaagtgggaaacattccagcaggcacgactgtgggacacggaaaattcacccaccccaccgagttcgacttctacctgtgtagtcacgctggcatccaggggacaagcaggccttcgcactatcacgtcctctgggacgaacaatcgttttctcctcttgatggagctgcagatcctaaccttaccagctgtgttcaacacntacgtggcggttgnaaaggttncgtgttccatcccaggggncagattaattaaggttcaa

SEQ ID NO: 268690 - DNA, 514 bp, Homo Sapiens
  misc_feature (30)..(30): n is a, c, g, or t
  misc_feature (370)..(370): n is a, c, g, or t
  misc_feature (390)..(390): n is a, c, g, or t
  misc_feature (409)..(409): n is a, c, g, or t
  misc_feature (445)..(445): n is a, c, g, or t
  misc_feature (490)..(490): n is a, c, g, or t
cttgtcctaacattgctacatctaagagantttaacaaagctgtcagaaagcagaagcaaagaaaaagtaataagatgaaaatggagaccacgaaaggacaatccatgaatcatacatctgctacaaggagaaagaaaaggagggaaagagcccatcaatatcttggctcttaaatgtccagtgactggagaataagaaagatttatggtccaacctttgatgccattttcagaaagtgccacactggacttaaattcagctgcttccagaggtgtgcacctttctgagctagataacaggcaggtggcatttgctggtttacagtcccttatctgcctctctggagacttggggagttgttccatcttncagccagtttacttagttcntttcaggcattcatttttncctcactttaagtctctcccaggtcacattgttccnatttttatggtttcattttttttgagatggaggcttgctctggtntcccaggctagaagtgaatggcaa

SEQ ID NO: 268691 - DNA, 540 bp, Homo Sapiens
gatttcaagtgttggcaaggatgtggagaaaagggaacccttgtacactaccggtgggattgtgaattagtacaaccattatggaaaacaatatggtggtttctcaaaaacttaaatatagaacttatctggcattcccaccactgggtatatatcccacaggaaatgaaatcagtatgttgaagaaatacctgcacttgtattcatcgcagcactattcacaatagccactatacacaatcagcctaagtgtccatggatgaatggataaagaaaatgtgatatatacacaatgaaatactattcagtcttaaaagacggacatcctgtcatttgcaacaacatggatgaacctagaaaacattaagtgaagtaaatcacgcacagaagaatacctcatgatcttaattatatgtggaatctgaaaaagtcaaactcataaaaagagttaaatgatgctcaagagctgaaaggcagggggattggggagatgttggccaaagcatacaaaatttcagacaaaagaggaataagttcaag

SEQ ID NO: 268692 - DNA, 650 bp, Homo Sapiens
  misc_feature (12)..(12): n is a, c, g, or t
  misc_feature (46)..(46): n is a, c, g, or t
  misc_feature (67)..(67): n is a, c, g, or t
  misc_feature (76)..(76): n is a, c, g, or t
  misc_feature (91)..(91): n is a, c, g, or t
  misc_feature (131)..(131): n is a, c, g, or t
  misc_feature (163)..(163): n is a, c, g, or t
  misc_feature (192)..(192): n is a, c, g, or t
  misc_feature (241)..(241): n is a, c, g, or t
ggaaactggccntggactgacctccgagcctaactgcgctggcctnccaactgcaaacaccttactntgccttccngcccaattttaacanccagccattagaggcctttggctgtgacttgatgacgaangtattaccagaacttggtccctgaaacccatncccgtatttccctgggggctgctgtcggnagcaggcaaaactggtgtactccatgttaattacttaccatgaggaagnaactagggaataccctggtttaaagaggttatcatcagttaatgaattacttgtactcgatagaagtcttttagtgatgcaatagaaataacattaaaaaacacaaagcaaacccaaccttagtactaaagaaaaatgcatatttcaggtaattatatctaaagggccctttaaagaaaaatgagtaacattcttaaacggggccttatttagatatgtcaagatgacttttaaattatatatatgtattgtaacattttgacagcaatactaaacacaaggaggagaatagcatttaaagaattatatctttcctgcaaggatctttaggaatattaacaaatattaaagtgccctcactttaaagcctggaaaaaataaggcagtaaagtcaaatggcttgtagtaa

SEQ ID NO: 268693 - DNA, 495 bp, Homo Sapiens
  misc_feature (347)..(347): n is a, c, g, or t
  misc_feature (383)..(383): n is a, c, g, or t
atttcggcacagggtttgctcatataaatcaagttgcccaggaaacctgaggtgatgctatcatttgtctcataatttagaaacgtgatctcttgagagagagactacgcattgcctgggcactttcagattccttaggaagtgcccctttgatatttggaatgtggatatatttataaaacaaatggattgttattccaaatccacatggatttataaccaagccccagaagaataggcagctttgaaatagctagttcgtggaattgaacagaaccttgatggaatgcagttgcctgtgtgaggacagaaaacaaagaggctgcctcagaccacatgcctatctnagagattaagtgaatttgtggaggggacattttgtnggatgccttaaagatggaccagtggttgggttctgatgggaatatatacactcatctgggactaggccaatggaagcagtctctttcagttcacctccgtacagcacaagtt

SEQ ID NO: 268694 - DNA, 541 bp, Homo Sapiens
  misc_feature (66)..(66): n is a, c, g, or t
  misc_feature (73)..(73): n is a, c, g, or t
cagaaaaaacaaagaagctgcctcagaccaccaattccctttagagattaagtgaaattgtgaggnacatttntggaatgccttaaagatgaccagtggtgggttctgatggaaatatatacactccatctggactaggccaatggaagcagtctctttcagttcacctccgtacagcacaagttgttcctgctcatgacctcattgaggaaaatgagaattgtggtgctggtgactttcatgtgtcttgggaggttgaggtgttcaacatcgttaaggcactcccaaaacgcaaacctccttttttaaatgccaattgtacatctacattaattcatctatgcaaacttgtgttttcatggtttgttttttacactatatttctcattaggttctttaaacatcaggtttaatattgatattatgaataatttttaaaccaaagtattctataagtttgtgtgctttgttttcctggatggtttgaccaaggtaaacatcagtcttgtccttctctcttaataaagtcatccatttgtta

SEQ ID NO: 268695 - DNA, 269 bp, Homo Sapiens
  misc_feature (242)..(242): n is a, c, g, or t
  misc_feature (248)..(248): n is a, c, g, or t
ggtctcgaacctcttgaccctcatggacccacctacctcagcatccccaaagtgctgggattaacaggctgtgaaacccaccgtgccccagcaatcttttcttctcccagattaaacatccttactttcttcaagggttccttatttgatgtgggcagttcagtaacctgctattgttcttctgggacttgttacaatttggtcaatttctcatgcatttatttaaaaaaatttattggagnccgggncactagggatttactaaaaaa

SEQ ID NO: 268696 - DNA, 314 bp, Homo Sapiens
  misc_feature (20)..(20): n is a, c, g, or t
  misc_feature (29)..(29): n is a, c, g, or t
  misc_feature (47)..(47): n is a, c, g, or t
ccctcagcccaacagggttnaccccgttncccttgggaccagccttnatttaggatccacttttaataacctggttgaaaaaagcatgacaattaattagcacaaagtttaatccataaagaatttcagaactgcaaaggcagtgttaacacagctccagtgtgctgttacctttacctttagatgttgatgaaaactattgaatgaagatattaaaactgaaagtcttggttttcattaaacagggtccagtcagtggagtgaccaagtaaaaagtgaaaacaaagtccccatgggatggcccatgcagtaag

SEQ ID NO: 268697 - DNA, 500 bp, Homo Sapiens
  misc_feature (465)..(465): n is a, c, g, or t
  misc_feature (485)..(485): n is a, c, g, or t
aaaggaacatctgaatcacctttataaggatctaatttataaaggtgattcagatgttcctcacattaaggaacactgtagtgcttatagcttgtgatgtccagggagggacttgtcagatatatctataagcctccatgctagctttttaaaaataattgtataatagagaaaaaatatatgccaaatcttgtgaaaccaggttaaaaaattagtactatatgcaagacatgcttcccagaatattagggctagaaaggaacagtgtttttcaaagttccaaagcataggaagcttttaggaaatgaactcttaatcaaaactccagtttgtaaaaccaataaaagcagaatcctggaagccccacattacacatgcctttcctcttgaggggtcccccgggggtgctagtctccacatgggcacagataggatgtgtgaggcttacctgaggggacacgggangggggtgcccggtttggggncttggattgcaggga

SEQ ID NO: 268698 - DNA, 447 bp, Homo Sapiens
  misc_feature (14)..(14): n is a, c, g, or t
  misc_feature (44)..(44): n is a, c, g, or t
  misc_feature (61)..(61): n is a, c, g, or t
  misc_feature (84)..(84): n is a, c, g, or t
  misc_feature (99)..(99): n is a, c, g, or t
gaaccccaagcctntgacaaacaacaactggaacgcaacacaanacaactgggaatggggncgcccggtgccccaagccaagtncctggcgcaaaccanaggcgtcagcagacagatgccaggcaggccggtggggtccttgtgggaccacgggtctccccttctccgggctcgcgggggactggtccaggaaggggagaacgtgccggcaggggccaggcgcgaaggcgcggccctcatagcaccttgcagcagttgatgcagccgttctgggagccgttagcgcttctgccagcggcgcgcgtggccgtctcgaagacctcgcgcacgccttccttggtcttggcagagcactcgaggtagtcgtaggcttggatgcgcacggccatgcgcggccgtcatccgtgcgcacgggttcctgcttcatgcgggccagctctgtgcgga

SEQ ID NO: 268699 - DNA, 384 bp, Homo Sapiens
  misc_feature (51)..(51): n is a, c, g, or t
  misc_feature (60)..(60): n is a, c, g, or t
ccccacccggggcctcccctaaagtgcctgggattgccaggcgtgagcccncccacgccnggccctcccagttgccttttgaagagggtaaagtcaagtttcctatttcctagaaaacattttttagaaatttgttccgatgtttgtaccaatttacctcataagagaaccacacccttctccaaaagtgctggtactgcatcagtgagatgagtagggtttttgtttgggattgtaagactattaagatcctagtaagtcagtggtagtttactgtgatgtgagcattgtagattcccccgttgtcactaatcacacaaataacaattttgagaagtaggctataaaacaaaaaaaggttgctgttttctatttttaaatttt

SEQ ID NO: 268700 - DNA, 451 bp, Homo Sapiens
  misc_feature (27)..(27): n is a, c, g, or t
  misc_feature (62)..(62): n is a, c, g, or t
tacccgtgtgatccaacttgcggaaanccctggcaagctatcctacataaagtatgtgtatnatacttccctgatgtatagtatattcccaacaaaaaggtgaaataacccagatacaaaggtcctaaggattccttcgggaaaaagagccccacatgatttttatatgggtcagattaacaactgcaaagttcatttacaacttaaggaaattccattccctaaaacaaacaaatgtatttacccatgaatattccagaatgagtatcttccctaagaactctgaattgactatctcaggaagagcctgtgaatatctcaggaaacttttgtctcatctttttaaaaataataaaagataacacctacataaatgtatacattcttaggatcttaaatcaccagtaaataagcattttccaatctcttctcccttactgtatgaaaaatt

SEQ ID NO: 268701 - DNA, 493 bp, Homo Sapiens
  misc_feature (26)..(26): n is a, c, g, or t
  misc_feature (348)..(348): n is a, c, g, or t
aaacaacaagccattgtgggcatttncccatgtgagtgcagttaatggctgcatgatgctctgctggacggcaaccacagtgtatttatgcagtcaggcccccgaatgaatagattgtaacttctgctcttcaaacaatgctgcgttgatgaacaccctcaagatggcctgtctgcgcccttgtatggtgagacagactcctagggatggacggcatgggaagctggatgcgacatagtcaaactgccccccactgagctgaatgcagccagcactgcctgccccagagtgggcccctgggatgggaggcagaaggggtgaggagggattctgggccctggggccttncttcgcctatgcaggaaaccagggtttcaccttgggtttgggttaagatctgacagaaccaccctttcatttacttgcataactgggaagcattacaaaggggttcagattcacaaaggcacattcaatgggccataaacattta

SEQ ID NO: 268702 - DNA, 405 bp, Homo Sapiens
gtaggttaaaattacttttatttgcagtaattcagtcaaattctaccctaaagatgtgttttattataaataatattcaattatgaaacaaaaaaattatgatgtttttcaaaatgcaagtgaggtttgattttttacctgaatcaaatgcaaatgttacctgttaaagatattacagagaaattttattgattacaaaatatgtaagaaaattatcagctacagttttaaagtttaaaatgctctgattgtttctcagaaaaggttacctttgtattaattgttgtatgacatttagtaatgtcctaaaagtcttttgtgagaggtatttaaagtgctttgagacctgattcatggcccccaaagggtggtattaaaagaggaaaaaggacatagtagtggtag

SEQ ID NO: 268703 - DNA, 251 bp, Homo Sapiens
  misc_feature (27)..(27): n is a, c, g, or t
cggatgcccccctttacctcggggatnccccccctccttgccctatccatccattccagttatgtattaggatctttcctaccttttaaatttttctcccacctaggcactgtgtcacgtacctacagtccccagctaccccaggaggctgaggtgggaggatcatctgagccccaggagttggaggctactgggagctctgattgcaccactgtacccccagcctgggcaaacagagtaagaccgtgtct

SEQ ID NO: 268704 - DNA, 385 bp, Homo Sapiens
ataaatttaattcaaggtggttagtgaatgtgaggcaatgtaatgccttcacgaaagttaaagtaatccagttacaaaagaagcactgtgtatagtctcaaatagctgaaggtacaatgggctccatattttacaaagtacaaaaaattatttcatatacaaagaaaaatacaaataatgtgcaaaaaccattttcacaggtgggcaatttataaaatggaaatgatagaaaagtccttcattcttaattatccccaaatttcttatatattaacacagttctatttcctagtgtgtggacaattttaaatttgaaattctgatttatttttaatctacaaagtatttttattttttaaaagggaaccatttcattattgaaatc

SEQ ID NO: 268705 - DNA, 641 bp, Homo Sapiens
  misc_feature (24)..(24): n is a, c, g, or t
  misc_feature (31)..(31): n is a, c, g, or t
  misc_feature (487)..(487): n is a, c, g, or t
  misc_feature (490)..(490): n is a, c, g, or t
  misc_feature (586)..(586): n is a, c, g, or t
gaagaagttaccctgctgggccanaaaaggnggcgacatttttttccctatccgataagcttctttggccttgctgtagcactccatcctcttctgttggtgaaggaaagcctctgctctgtagtcatcatagtctgggtactcaaagtcctggaaagacagttcacttggtgtttcttaagtctcttttaatttctttggctttttctctttagacttctggccagtatgagatgtgacattctcattttggtgaacaaactcttgggctacaactgtttttacagggtccccttcaagaacacagttaagaaattgcactgtgtgttctaatgaatagttgtggtccttgaaaatgtccaccagaaaattttggttaatggctggaaatatcttaaagagctgcttctcctttagtttagtggcacaatctttttcaaacataagggtctcccttttcaaattatgtttttcctgtaaggcaatntcntctgacattatttctctgagtgatacttttttagtttgagtattccaatgatccaataaaggtagcatttcagatgctgttaaagtcttcagtaantttttgcctgttctctgagatgatttttgttcaggattatcaagcccagtatgtc

SEQ ID NO: 268706 - DNA, 419 bp, Homo Sapiens
  misc_feature (45)..(45): n is a, c, g, or t
  misc_feature (161)..(161): n is a, c, g, or t
  misc_feature (265)..(265): n is a, c, g, or t
aaagggaaaggggactgtgatgatccccatttccatgacaaccanttgcctaccccctactttggtggaaagaaggaaaaagcccctatgtctccctgaaggctttccccttcaagacttcaagtagtggttaacagagtcagccctggtcatggaggaantggccacggtggaaagcctaggtggagggcaagcccactcacgtcctttgttgcggcctctgtgactaacagcagggccagccagggagggaggggcggtgctngcaggatgcgctggtccccttggttggtggtcccaacaagccggcgggggccaggacgtcggcgtggggtcccatccccttcctcctcctcaacctgagcttcagcctcagactcctctactgaaccctcaggcccccaggggacttgggggct

SEQ ID NO: 268707 - DNA, 459 bp, Homo Sapiens
  misc_feature (382)..(382): n is a, c, g, or t
aattcagccttccccataacttaacatgattaaactaatattcaatttaccacaaaagtggaattaatgagaggtaagtctagaaagagtttggcttactctggaggatttttgatgctaagatgagtaatttgtacttttgttagtcagataataaggaatcatcgaagttttgtgcctgtgtgtggcaagatatccggaacgtaaaatttactctctgtttttaaatatacagtttggtggcatccagtacattcacatcactgtgcaaccatcaccaccatctgtcttcagaactttttcatcatccccagctgaaactatagtcattaaacaataactcctctggtcccctcagtccccaacccctgggtaactactnattttactttttggcctctgggattttgactattctggggtacctcatataaatagaagcatattttaaagaattat

SEQ ID NO: 268708 - DNA, 440 bp, Homo Sapiens
  misc_feature (15)..(15): n is a, c, g, or t
ctgcctgggaaggcnaaagggcccttatttgcccaaagaaccagtgaattgggccccaaagatcaaacacagcatttcatgtaatcagaattctaaacgcacaactcgggagctgtgcacggcttctcaaagtgattcagttgcagaaccaagagcaaaactcgcctgtttttgtcctcaatggcacccatgagctttccaatagtatagttttctttctttccttgtcctggttgaaggtaacgtgttcctagaaaagaaaatgctgcataggaaaactgagatgccttttattccaacgtgtttgatccctgtcactcattattctgtactttttattgtacattctattcctgtaattattgtgccctttaagtgttgtaaaatcgttttggaatttgtgcctgctagttatgcaataaacaggctctacaagtgaa

SEQ ID NO: 268709 - DNA, 385 bp, Homo Sapiens
  misc_feature (247)..(247): n is a, c, g, or t
  misc_feature (283)..(283): n is a, c, g, or t
  misc_feature (322)..(322): n is a, c, g, or t
  misc_feature (374)..(374): n is a, c, g, or t
ttgaggcatagtcagtagaggggcaagtatggaagaaaaaagaccagtttagtggcacctgtcatggtctaggtgacagttgaaggctatctgaattagaatgatggaagttttagaaagtagtggattaatatcagttttattaaataatgtgaagagatattttgatggaatgaatgtacatcgtgtataagagggatagaggattgagaagggctaactttcagttaagatttaaaattccttnccaattaagtgcttaaattaaaaagcaacacatgantgtgcagaaaaatgcagtacacctgatgtataatacagncttatactagttttgtccctgattcttggggaggggagattctaaaaccccngggggtttccc

SEQ ID NO: 268710 - DNA, 997 bp, Homo Sapiens
ccctcacagacacaccccaaaataaagttttacttgctatcttcccatcctttaatgcagccacaatgacatataaaattaaccatcatgttatatgaagtcttgggagtggactggaagaatggggcttaggatctagctttaaggaagtcaagcaatgaaatgtcacatatttttaaaaggacaaaccacaaaaactgtgaaaagcaatagtggtgtcatcagcaaatagaaatttttgagaattcctagaaggcagaaagaagatagggttggaaaatctaagagaaaaggaaccaagataagtgtgcttttcccatagggagccctgcagtagcttcaagttaagtcgataaagacaaagaggaggcatagatcatggggcaaccagtgatcaggtatccaccaaggaacctcagtttagacatcatggtctgtttgggataccatttttgactataagataaagctgtgatccaatctgtaaagaaacctcaagggaggatgctaggataagcattagggcctctactgcagacaaagaggtataacaaacaggaatggaagctctaccaaaaagaagatacattaaaatgcttcacccccggagtaactgctcctagagtggcagctgtgtctgggagtgggatgctcctcccacagacaagcagcagaagagccacttacacagaacctacaagggagcagcccatcagtgaaatgggcccacacaatttcagagaagctctgagtaccagctgtccaagctaatcgatgcactctgtcattcacaaatatgaacagataacctaggaacacttgaaactaaggaaaatgagcagcatggaagagaaggaccaaagggaacaaacagaataactaacttcagaagaaacgtataatttagggaacaaaaggaacttctgaaaacctcacatcaatatccttagaaaaatctgagaaaatatagtatccataaaacaaaaaaagtgatatg

SEQ ID NO: 268711 - DNA, 649 bp, Homo Sapiens
  misc_feature (79)..(79): n is a, c, g, or t
  misc_feature (108)..(108): n is a, c, g, or t
ctaatgtagatagtttctcctttacttcacttcaacagctttttactcaaagagtatatgttcctcctagtcagctgcnccaaaccatcgcgttacgcttgtcacacnacaagtgtctctgccttgagtcatctattcagctactacagtttctgccaccacatgtgcattctacaggtgcgaatgacagtagcattatgagtagtgtggaattcaggtagtaaatatgaaactagggtttgaaattgataatgctttcacaacatttgcagatgttttagaaggaaaaaagttccttcctaaaataatttctctacaattggaagattggaagattcagctagttaggagcccaccttttttcctaatctgtgtgtgccctgtaacctgactggttaacagcagtcctttgtaaacagtgttttaaactctcctagtcaatatccaccccatccaatttatcaaggaagaaatggttcagaaaatattttcagcctacagttatgttcagtcacacacacatacaaaatgttccttttgcttttaaagtaatttttgactcccagatcagtcagagcccctacagcattgttaagaaagtatttgatttttgtctcaatgaaaataaaactatattcatttccactct

SEQ ID NO: 268712 - DNA, 260 bp, Homo Sapiens
tttgtggaccgtgggcacaatgcctccaaagccacaggggctttctttaatcagaaagaccattaaaacaaacgttcttcttttaatacagccattgaaaagatgacacattaagaaacatgtaaacactgcagctgcttaattacaagttgcactgcttgatttagtacctatgcactcccaggtttgggggaccttaagagagggggacaggagcctcccctcactttcacagttggatagagaaggccaagaatgtg

SEQ ID NO: 268713 - DNA, 390 bp, Homo Sapiens
  misc_feature (45)..(45): n is a, c, g, or t
ccacccggtacaaaccaagtcgggcacacctaggatgggcccggnggacaaaatcccggcccctctgactgtttttgtaaataaggttttattggaacacagcccacacatatttgttgaccttattgtttttggctgtttttgtacttcattggcagagttgagtaattgcagcagactctatggcttgcaaaacctaaaataattactttgtgtagcgctttatagaaaaaatttgctaactcccgatctgtaacccccaacctatccgccgcaccctgatctaggtaattttgaagcaaatcccaaatgtcacatcatctatccatatttcactatgtatttctaaaacatattcttttattcaaaataaaactctaatatcattct

SEQ ID NO: 268714 - DNA, 441 bp, Homo Sapiens
  misc_feature (58)..(58): n is a, c, g, or t
  misc_feature (136)..(136): n is a, c, g, or t
acaggatttaaagctgtacagtcaaactcccaggcccacgcacttaatctcaacaccnctttgctatctccctagcagtttatgaatgagaaaaccggagcccaggatgtctgactctctcctgaggtcacacatncaaggtgctgccacagcccagatcctagaaccccaggttaactcttgtctcatctagggccttgtcttcttgaagaacatacttactgtggaaatacaggtgaaaattccgcatcaaacagagataccaaataacagctctaaatagacagtgatgcatttgctctctccttcttgttagtgtagtttaatttcctgagaagctttacacatacccctgagcttttctgtcacagctaattgtgcaacttccaagtagttgtcctgcctatgtttgttacttgggctcattaacataccctttac

SEQ ID NO: 268715 - DNA, 474 bp, Homo Sapiens
  misc_feature (11)..(11): n is a, c, g, or t
  misc_feature (53)..(53): n is a, c, g, or t
aacacccagcnggtataaagaacggggcccctgaagctagggtttgaaacccnggtgtgtgagacctcaagtgaacagttccccttttctgagccctcaatccttccttatctgtaacacagcgttaacccactgcccctggccctccagtgggaggatgtgtataaagcccctccaacagatgcttagcaaaagtaattgtggagtaaggctacctttggggaaagttggagaaaaacaggggcatgagaggggcttctaggatatagtaatgtttcattttgtaatccccaggctggtaatacaagctcatttgtgaaaactgtacatttatgatctgtgcacttttctattaggtgcacaagttatatattattcccaatcttttgctatatattagtccaggtttttacttttgcaccaacctatttttgcaccaacctaataaatgtatgataaattccgataaaaaaa

SEQ ID NO: 268716 - DNA, 443 bp, Homo Sapiens
ccagcccctgcccacccactggtggaggtgctaactagcagggacgtggcataggatgggagctgggcgtgaggtgcttggggtccaatctttgtccctcagcttctcagaatccggccagcccttgtgttccccgtgcccccaaactttcctcctcccccactgcagtgagtcaatagtcccagggtgggccctggcctccctgccctgattggggactcaggaggtgaggcccttggggcttcctgccccctccttgcccacctgcctcccccgggcagcacgggagggagagcagggtgagcacgcttgttggtttcagatgcactttctgcttgcattgccgtatctgtgcgttccttcatcctggtcctggctttatggaacaccatgtttttagcatgtttttaaataaaaacggataaagtgtcaaaagcaaaaaa

SEQ ID NO: 268717 - DNA, 384 bp, Homo Sapiens
  misc_feature (356)..(357): n is a, c, g, or t
cccccatatgtactatgtacaagtgatttataaaaacatgggcattaatggtacaggcaaagtaaactacagtggagtttcagaatctcagttcactgcatcttgattaaaaaaaccatgtgacattcccaattatgaagtcagtgaggtagtggaggtgttttccttgaatatatttacacaagacagtattcctcatctggctgaggcattcttttcctgattttgtccaagttgagagtcctctgtgagggaagactccagctgagacagactgggtgatgacgctgaatctgcagaggtgctggtgaccaattcccctaaagcatctacttgtctcctcaaactgtgttaanntgttatcactgtctgccgctttccttt

SEQ ID NO: 268718 - DNA, 558 bp, Homo Sapiens
  misc_feature (65)..(65): n is a, c, g, or t
  misc_feature (112)..(112): n is a, c, g, or t
ccgtggccaaagggccagaagtggtggatgcatctgtggtagattgatttaaaagccaccgattnggagccgatgagccagcaggctctgacagccaaagtggaagagattngtctgggttgaattagaggaaagtggtgaggaggataagccagaggtgatttagtgatagtgatgaggatcctggcagaactggacatcatcacacattcctgaaactggtatgaggcaagaaacagtcctctctatacaagagcctaaactcttaaagaaatgatatgtacctttttagcccttaaggatgcccattatgccatgctcttggtacaccctacatagatgttaagaccaggaggcacttgttcattgtatatagtggtgcaagctaagttagttgatccaatatctcctacccagagtctcagctgtgcttatatcccaaactactgattatgttgatgacacttaattcccaaggaaatactgcatttagtatatgttcctcaaggtggccaaaaaagaatatagtattttttagaaatttaaataccgagtgta

SEQ ID NO: 268719 - DNA, 381 bp, Homo Sapiens
  misc_feature (18)..(18): n is a, c, g, or t
  misc_feature (33)..(33): n is a, c, g, or t
  misc_feature (71)..(71): n is a, c, g, or t
  misc_feature (79)..(79): n is a, c, g, or t
  misc_feature (97)..(97): n is a, c, g, or t
cccttgacggggaaaatnaaagcccccaggccntccaaaaagaaaggcctgaaaaactccttgaagttcgncttaattnaaaatcaaagaacttttnttttgtaattcacctatgtcaaaggtgatgttggatgtggaagctccctgcaaatgggcttttacaaggtcccatggatactctttggttatattctaagttggttacacaaatatgagtgtgattaaaatgacagtgcaattgctgttgcaactgtaagctttgtacttgttcccctaaccacagaaccatggattttaacattaccacttcagtttgtaactcagtgttaattttacactgaagtagccatgcttagttggctgcatgcttccagtcctcta

SEQ ID NO: 268720 - DNA, 529 bp, Homo Sapiens
taaactgaagggccaggtcagtctgctcctccaggcacagcctgggaccccatcatgtgccccactctgcagtctgagcttccactcaagtccaccagggcctgcctcacatatatatacaagacccaatgtcagagtctgcctctgcccatgtctggtccagagggttgcactttggccactgcctacatgttccccagaggttggcacagcatgaccctggacctcaccctaaccccaggcaaactctgctcatcttcgagctctctggaacccatttctcaagggagaaccacattcccccacctcacagccaagttcaaggaagcagcctggctaaagcaatgactcaaggataccagaagcagagcacgcatttaagaagatgcgctgactcgcaggagcagctgactcttcttaagaagagtttactgattcttctttcagtacgggccttttaataagatattgtattttacttcagctatgggtgcagacaattaaaggattctagaaatctgaaaaaaaa

SEQ ID NO: 268721 - DNA, 511 bp, Homo Sapiens
gaaaatacaagctttgaacttagaaaagttcctccagaattaaataatatcagcaaacttaatgaacattttagtcgatttggaaccttggttaacttacaggttgcttataatggtggatcctgaaggtgcccctaatcccaatttgcaacatacgaagaagcaaagaaagcaatatcaagtacggaagcagtattaaacaatcgctttattaaggtttattggcacagagaaggaagcacccaacagttacaaactacttctccaaagcctttagtccagcagcccattttgcctgttgtgaagcagtcagtcaaagagcggctgggtccagtaccttcaagtactattgaacctgcagaagcccagagtgcctcttcagaccttcctcaggtgttgtctacatctactggcctaacaaaaacagtgtataatccagctgctttgaaggctgcacagaaaaccttacttgtttccacctctgcagttgataataatgaagcacagaaaa

SEQ ID NO: 268722 - DNA, 363 bp, Homo Sapiens
  misc_feature (18)..(18): n is a, c, g, or t
aaaaaccgggtcctgtcnggagaagtgaccttccagattcccctgaagttccatggtgcagagaattttattccagcataaccctacagacccttaaaaagtaagatatttgacaatgaatctgctgcctgaaataaaaccattaggactcactgggacagaactttcaagttccttcaactgtgaaaagtgtctttttggacaaactatttttccacctccaaaagaaattaacacatggacattttaaagtctttagtataaagaaaatttgtattcaatgtgttaagcattaacatgtattttatttgtgtatccactccatctgatttttctgagccattttgatttgttccttcatta

SEQ ID NO: 268723 - DNA, 557 bp, Homo Sapiens
  misc_feature (11)..(11): n is a, c, g, or t
  misc_feature (23)..(23): n is a, c, g, or t
  misc_feature (480)..(480): n is a, c, g, or t
  misc_feature (492)..(492): n is a, c, g, or t
  misc_feature (501)..(501): n is a, c, g, or t
tggactacagnagagaaaaaaangaagggagggatacagaagggattcatatagtgagaagaccatgctctctccaagccagctttccagaattcccttcaatgtgccttgggagtctcacctccttccttgccatagtcccggcagcctccatggtgccgaggtagaagtaggtcctcaggtccctttaactgaattgagtcatggctcaccaccactaccaccagaaaacgccctctcttccttgtgccgcagcacctagggatttcctattccttctcctcaccagctaatcacaatctacctatagcctcagtagggggtctctatgcctgatgcctccattcaaacctctggagctcctctcctgccctcttctgcctgtggtacattggcctctcctgctcctgtccatcttcacaactgtcatttgcccatccctaaatccatcatccttgcccaaaagattcccactgcccngggaaggagtcnggaagaacnggaagaactgtaagaagatacatagagcatgtttggaggcctaaagaaataaagtt

SEQ ID NO: 268724 - DNA, 377 bp, Homo Sapiens
accatagaagtggacctaaaggggaccccctaatgtcacccctaattttccctttaggggtaagggttcctcccctcattcccagctttacctttcccttcccaccctaggagagccccagagatacagacctaattttttaaagaaattaaataacaaaacagggaaactcatagaaaaccttgcaaaaggagaagagttacatgttttttaattccgtatgaacaaactgcacgcagtaccatgtaaggtgctgacaaagaaactgatgtctattagttaaacagaggaagtggctttacactaccattctaaatgccagaagttttacaggacctagtctgaagtgacactatcaacctcgacttctaactgga

SEQ ID NO: 268725 - DNA, 378 bp, Homo Sapiens
  misc_feature (116)..(280): n is a, c, g, or t
caatttgtggttgaaagacattcctgccttcaatgtactatagtctcatatatgtatttcaagccacaaataataaccaatgagtaggccttgaaatcaatttagtggagcaaaannnnnnnnnnnnnnnnnnnnnnnnnnnnnnnnnnnnnnnnnnnnnnnnnnnnnnnnnnnnnnnnnnnnnnnnnnnnnnnnnnnnnnnnnnnnnnnnnnnnnnnnnnnnnnnnnnnnnnnnnnnnnnnnnnnnnnnnnnnnnnnnnnnnnnnnnnnnnnnnnnnnngaggaattcggcttttaaccgggggagggcaggagggttgcaggtgaggcttgagggttcggggccactgtaggttccaaccgggggcgataggagtt

SEQ ID NO: 268726 - DNA, 338 bp, Homo Sapiens
  misc_feature (19)..(19): n is a, c, g, or t
  misc_feature (35)..(35): n is a, c, g, or t
  misc_feature (72)..(72): n is a, c, g, or t
aaggaagggacgaaagaanaagggaatggtcaaanttgccctcaaatggatcagcccagcaggaccctgcanaaatgccttaggtaagcgcccagagctctccccttgctcaagcctgtcccaatggagccttaagttccctcagagtaaaaacggaaaacacaatcacattagtctccctggcttttcccttaactcttcgcactagctcttctgtctgcctggaacgctcctctggtcacgtcctcctggctacctctcccacctgcttcagtctgtggtaaagtatctccctcttaatgaggtctcgggcaaccccatttaaaattacaacctag

SEQ ID NO: 268727 - DNA, 467 bp, Homo Sapiens
  misc_feature (39)..(39): n is a, c, g, or t
  misc_feature (58)..(58): n is a, c, g, or t
gaattacatggcatgcagtatccaaaattatggctctgntgccattggagatttaacnttaaagaataagaagtgtcattcacaattccattgtacaccccacccctcccacgaaaaagaaaaaagtcactacctattcaagttcctagatctggtgcagcattaaggattaaaacttaccactttacccaggccttccccatgtgcaaataaatccctcctgacaagcagtgactatacagtcttcaagaaatattagtacagtcagtctctcatgtgctatctttttacatatcagcggctctaacaagggaacatcttccattcgaggacacaggggcgttcccagagttttagcagggtccgttttggttttggtaactagattcagtttgtcactgctcttgctagaaatgtgtcccatgctatgatttcgcttgtgatctttctcgtggtgccagctctct

SEQ ID NO: 268728 - DNA, 292 bp, Homo Sapiens
gctttctgggttccagtgttctaatacagaaaatgagaaagttgggctggaatcattgtgtcccaaaattggtacactttccgctagtggcatgtgacttgactctaggcggtacgtggatgaggatttttttgtaataggatgtttttgcaatctgtatttatatatgtacagccatggtttaaggtagtgatacaaaattttcttttacaatacttttttgattttaaaaagtcgagttaaaaaaattaactgtagccaaaaagttaatgtactctgtggaatatggggg

SEQ ID NO: 268729 - DNA, 472 bp, Homo Sapiens
  misc_feature (382)..(382): n is a, c, g, or t
  misc_feature (420)..(420): n is a, c, g, or t
  misc_feature (449)..(449): n is a, c, g, or t
taactaagtacacagaagccctgctcttgagggtgctgctgtactttagcctcttcatcaagcagatgccttacctttgatctttctctggctccttacatctgttctcagttggtaaagaacccggaggaggtagaagcagggaggggtgttattagcactcccggatcaccctcactggcctgttggtcagaagactcttgataaattaacacaaggaaccaaatgggggcaagggcactgctggctggggaaagaggccatttgctgctttctttctccctatccccagaaggagagtcttccttctgtgctccttaaggatcccctaagcagtgtctactccgtttgcttcgggctaggtgttttaacctcttccttngttatctggcagaccttttccaaaatttcggagtctgnctcaaagctaggagtttttcgtgaacagnttttttcaagggtgacaatttgg

SEQ ID NO: 268730 - DNA, 446 bp, Homo Sapiens
  misc_feature (329)..(329): n is a, c, g, or t
  misc_feature (428)..(428): n is a, c, g, or t
aatattaagaaaaatgaggcagtgtttcagccctgtgaacccacagtagttatgaacaagcagtgtatagctgagtgagcccagcatatggctgctaaacgcaggaggtggtgatccaaaaaaaggaatcagtacagtgaaatgctgggtgctgcaaagaagtttccacctttagacccggaagagaaagctcaggtagtgctcctctccttctggtgttctctgcagtgcatggagggttcgcacttggagcagacacaaggctcaccgtgaagacatccatttcgtaccacccaaggctccaagtggcacccttgaaagagctgtcnacgaaaactctaggctttgagcagactcaggaagtttggggaaaggtctgcaagataaccgagggagaggggtaaaacacctagccccgagcaacgggntaggacactgcttagggg

SEQ ID NO: 268731 - DNA, 515 bp, Homo Sapiens
tgataccctatgttctggggattagcagtgaggaatgatgaggaacttgaggcaagtcaccagcccctgatcatttcgcctaaaagagcaaggactagagttcctgacctccaggccagtccctgatccctgacctaatgttatcgcggaatgatgtaaagaggctggagaggagctgggcccaggggctcctcagagcagggaactccactatgcatctctgcagaggctgccagtgcccagcagtgagggacctgacctcaggggcagagacaagagaggcaccaaggaggatccaagagctgactatgcctgcattgctgagaacaaacccacctgagcaccccagaaaccttcctcaacccaggcgggtggacagggtccccctgtggtccagccagtaaaaaccatggtccccccacttctgtgtctcagtcctctcagtccatctcgagcctccgttcaaaatgatcatcatcaaaacttatgtggctttttgacctttgaatagggaa

SEQ ID NO: 268732 - DNA, 405 bp, Homo Sapiens
agggaattctttttggttggttccagttcatactagtcccttcccaatccatcagtaaagaccccatctgccttgtccatgccgtttcccaacagggatgtcacttgatatgagaatctcaaatcctcaatgccttataagcattccttcctgtgtccattaagactctgataattgtctcccctccataggaatttctcccaggaaagaaatatatccccatctccgtttcatatcagaactaccgtccccgatattcccttcagagagattaaagaccagaaaaaagtgagcctcttcatctgcacctgtaatagtttcagttcctattttcttccattgacccatatttaatactttcaggtactgaagatttaataataataaatgtaaatactgtgtatt

SEQ ID NO: 268733 - DNA, 644 bp, Homo Sapiens
  misc_feature (98)..(98): n is a, c, g, or t
tgcctaatttggctcaaggggtctcagctgaaggaatgtctgaaattgtgaacccagccagggggtggggcgagtgaatttccctggctgatgttggnaccgtcaggacacagtggggtccctggagtcccagcccagggaagtgagaggcgattctagtgtcacctgagacagagaggcctgggctggggcaaaggccgagtgtccctgggagcatacggggcactggcctggcactcgggaaactggcctggctgaccagcaactgtactagcctctgtgggccaccctccctcccgcaggtgggccctgcatggttcctgagcccattgctctcctctgtagggtttcttcaaagtcctatagccccgcaccacagtcccctgagagggaatggcagcaacaacacgcttcctggctcctacccgaatctcaccgagtcatgctccttgtgaaatgggtccaggaatcggccatttttgagcaagctcatgcactgattctcaatgattctgaagtttggcccgagtaagacctgcggacaaccaggggttcgcatccgagactggcacacccgcttcctccgctagatccgagtgggtctagcctgtaacaaatgtaaacaggaggctggggcggtgtca

SEQ ID NO: 268734 - DNA, 409 bp, Homo Sapiens
  misc_feature (32)..(32): n is a, c, g, or t
  misc_feature (113)..(113): n is a, c, g, or t
aaacggctctaactcctcggttcccttcaaancccggaagagaccatacatgtctttgcgcataagcattagtttcacattcagattaaaactattgcctcccaacctgctgncccaagggatgatgctgagatggcaaattatcagatacgtatcttttattcagatatccttaggagcatgtgcacattctaaaggaaatcacttttatttgctccgagctattaaaggaagaactagaatgaaaaacagtaaatccaaaggacttcagggccttaaagacattctataacctatatcccaactaaatatttgtattcatataaaaagcgctgttaggattctttcatcatgaagattaattttctattttaattagaaatatttgatacgtcataaactttcaggg

SEQ ID NO: 268735 - DNA, 428 bp, Homo Sapiens
ctcgcagcaactctttggtctcaacctttacccatggagaagcgaggattttacgagtctccttgcccaaggtcaagcccagggaacttcaaggtcccagactgtcctctcccaagagaacccagcttcccaaagtgactgaacaagctctgttaagaccctcaaagtaaaaatggccctcaggaaaaagattgtgacctagtagacttggacgatgcgagccttccggtcagtgacgtgtgaggcagaagcgcacggagcctgcctgcctctgccgtcctcagtttcctttcatgaggcttctagccaaagatgataaagggggaaatggtttttagtgcgtatattatactgcctcttaggtgtactctttataagctggtaaaccaagaatctagggagtggccaaactaaatataatttctttt

SEQ ID NO: 268736 - DNA, 693 bp, Homo Sapiens
  misc_feature (33)..(33): n is a, c, g, or t
  misc_feature (329)..(382): n is a, c, g, or t
  misc_feature (617)..(617): n is a, c, g, or t
  misc_feature (668)..(668): n is a, c, g, or t
aaaaacggcgtccattaccccgttccggatacnggttaataagctcctggtagggtggacagttaaaggactgcaaaaaaggcatgtgtagaagttgggcaaagccttccagtgttcccgtacaagtgtcttattcccttgcaccccaccctctgcaatgagaaatccctcccttcaaccatttttggtaactatagaatgtaatatctggaaaagcaaaactaaatataatcaggtgctcaaacttttattttcttacaaaatgttatagaaatgaacccaaactaaacagatatgtacatgtatatatgtacaaaattttacttctnnnnnnnnnnnnnnnnnnnnnnnnnnnnnnnnnnnnnnnnnnnnnnnnnnnnnnccaatactatgaaattgattttcttaaagtaatagtaatcttaaattgctggttgtagttggttttccaggcttatttatatgtttgattgtggttggatatataaaggagtttctttcatttcagaatgcctccagtctcattttattatatcaaagagtccagaattttttttcccttcacaaatccttcaacatcaggacaaggcatgttaagttacaaatcacctttgggncatcatcttccttcttgagtcacaggtctgaaaggcaatgtagtttgtccnctttcagggatcagacattccggag

SEQ ID NO: 268737 - DNA, 533 bp, Homo Sapiens
  misc_feature (20)..(20): n is a, c, g, or t
gacctggagcatcaggtgtntactgttctgtctccagcccctcgcccactgcctaagaacttccttctcatcatggatatcaggttcatggatctgaagtagagatcagcaggaagccttgctgcctgggacatagagatcatctggccacccctagaggcagatgggctgagataaaagactgttggggccacctgacccagtaaactgtggactagtagaaagttcatattctacctctaaaaacaggtagtggtaacctgactcttctaatcttgaaccaaaaggaaaaccatgagactgtaattggtttcttagaccacctaagatgccactttgaattctctaagaccctggagaattgcatttctttcactgtgctactatgtggtttttaaaaaatcaatgctttatattccatatgtggttcttacccatttatctaggatgaaagtgtgaattagagggactccttccaataaagttcaaacttaaaaaaaatcattttaataaatatttttgccgatatcata

SEQ ID NO: 268738 - DNA, 476 bp, Homo Sapiens
  misc_feature (17)..(17): n is a, c, g, or t
acacaagaattaattantttcctacttggggggaaaaaagccctcatgtagaagcaccccacttttgcaatgttggtcctaagctatctatctaactctcagccccatgataaagttcccttaagctggtgattcctaatcaaggacaagccaccctagtgtctcatgtttgtatttggtcccagttgggtacattttaaaatcctgattttggagacttaaaaccaggttaatggctaagaatgggtaacatgactcttgttggattgttattttttgtttgcaatggggaatttataagaagcatcaagtctctttcttaccaaagtcttgttaggtggtttatagttcttttggctaacaaatcattttggaaataaagattttttactacaaaaatgaaatttgtttggacttccacttgagacagtaaagagagtattagacacccagtaaaaactgccatataaagaaaa

SEQ ID NO: 268739 - DNA, 455 bp, Homo Sapiens
  misc_feature (135)..(143): n is a, c, g, or t
aacatattcgaagaaagtctagtacctggatcttttgttaaacaatgactaagcatagactgtcacatataaaactaggaaaaatagcatactgcttttaaatcaagacaaaaaggcatacatttcaaagctgannnnnnnnnaacattgtatatgttttaaaattcaactaaaacgcatcagtatgatggcaagaatcatcttgctgtcactgcttttccttgtttcagcagtgtttctctcaggaacatcttatgtggatgcttgccatgtttaaggaagagtaaggaaattgttgtggctggaacagaaacggagaagggatagagttgtgggtgataagttcagaggaggaggaaaaggccagagcctgtgtagacttcgcatcagaatcaccaggggagccttttcaaaatcaaacaacctgaagcttgggactccattttccagagact

SEQ ID NO: 268740 - DNA, 458 bp, Homo Sapiens
  misc_feature (407)..(407): n is a, c, g, or t
tcctgcctctgtccaatgtcttgaagctgtattataagaataattttgaaaagaaataaggatatgggaaatctacaaccagaacaactatctctgaatgatctaggctgactcttacaaattgtaactgcaggcagatattcaatttggtcaataaaccagcagtgtatattgagcaactaccatgtgatcagctttgtacagactgcggaccaaatgactgagatttttgggctaactgaaccagggaagaacagctttaggggaaaaatgggtgggattttattttaggatgtgggtatgtgttgaggatgtattcagcagggcagttgggatattcagagggctggggaaaaactggggagccaagacaggggagggtgtttaatttgaatttattaaaggtngaattgaaatgttaccaaaggggaaggttgttgacagggactaccaccttg

SEQ ID NO: 268741 - DNA, 277 bp, Homo Sapiens
  misc_feature (36)..(36): n is a, c, g, or t
  misc_feature (42)..(42): n is a, c, g, or t
  misc_feature (55)..(55): n is a, c, g, or t
  misc_feature (71)..(71): n is a, c, g, or t
  misc_feature (83)..(83): n is a, c, g, or t
  misc_feature (86)..(86): n is a, c, g, or t
  misc_feature (103)..(103): n is a, c, g, or t
  misc_feature (111)..(112): n is a, c, g, or t
ctgaaaatagtagcacacagcccatatatgggatancatttnctaaggactgttncttcacattgagcagngcaggcataaanggnggttatttagtctaagncttttatnnttttatccctgattttcaacataacacgcaatgtggatgtcgagtagtgttaagaatggtgctgctcctgacaagtgtatgttaactgtttacattttctatctgcagaattatttctctattactgaacttttcctaagtaaaatgtctttgaagtctaaaatt

SEQ ID NO: 268742 - DNA, 403 bp, Homo Sapiens
  misc_feature (50)..(50): n is a, c, g, or t
caatttcctaactcatacatcatggctataaaccttatttgtttactgtntctcttccaaggacggtcagtcaccctttaaaattcatttcaagcctatgaaaagatagtttttgttacatgggcaatttacttttagtacagtaaaatgttatgtgaatttcctacagaatgtttgcccaaaatgaattatatctagaatacgcttaacaatatattctggaggcagctttcatttgaaattaggttcaccttctgagagtatgaaaaagttaatgggtttttgtgcctgaagattttgatgttgcatttggctacatttaatccactttcacccataaggtttagcatctaaaaaaattaaatcactgctaatgcaattaaaatgcattatgaaatgcatt

SEQ ID NO: 268743 - DNA, 414 bp, Homo Sapiens
ttgccaattataaaccaccatttggagggcttatgagcaatgtaagtccacctcatctaattaaaccacattgttttaaaagcttgaacagttttcatgcctataagacttgtctgaataataaactgctagagccagaattctgagtgtctttggagagccaggattttatctgctgagcgcaaggggccagggcactcaaagagttaaagagtgttcccgcattgctgggtagggttaatatcacagctgcctggggtaaagcattatccccgtacctcactttaacaaaagcctccttttggcaaacagactcccactttccccgcaaggtgtcccaaagggtgtttactgaaggtaaatctgccctaaatccttcattgcttggggtcatggggggtgggatagggaggg

SEQ ID NO: 268744 - DNA, 366 bp, Homo Sapiens
  misc_feature (137)..(157): n is a, c, g, or t
ggtcaattccctacatttgaaaatcaattaaatcccattaatgcaattcaccccacatcagtaggctaaagaagagaaatcacatgatccccttcaatagaggccaaaaaagcatttaataccccattcatgatttnnnnnnnnnnnnnnnnnnnnngccttccagcaaactaggaatagaggggaacttcctcaacttcagaaagaacatctacaaaaaacctgccactaatatcatacctaatggtgaaaaacttgaagcattcctactaagatcagggataaggcaaggatgtctcctcactactccttttcagcattgtactggaagtcctagctaatgtgacaaaaaaagaaaacagaaaa

SEQ ID NO: 268745 - DNA, 491 bp, Homo Sapiens
  misc_feature (85)..(85): n is a, c, g, or t
tccagtaacctgtaatgttgtaattcccgcaggcccctgagctccctttccctcaactcagtgagccccgggatttgctctcccnaaaagggctttgcctagtgtgttccaatggggaccctgcctgtggggagccctaagacagacatcctaattattctctctttttccccccctctctatgtgtatatttctaatggatctataagaacagcaacaagagagttctaacaattctagtgtgaagccaaatagtgatcttttagtgctttggggatggggtgggctggggtggatggatgggcaacagtgactttgattacccttgctgctctgcatttgccagtttattcttttgtttcttttatctgaactgactctgtcaaacaagtgtcaaagttgtgtgttaaaaaatgtttaacaaaaaaaatgttgtaatgacacaaagccttatgaaaatatttatggagttcaataaaagaagtaaaaag

SEQ ID NO: 268746 - DNA, 489 bp, Homo Sapiens
  misc_feature (230)..(287): n is a, c, g, or t
  misc_feature (317)..(317): n is a, c, g, or t
  misc_feature (413)..(413): n is a, c, g, or t
  misc_feature (430)..(430): n is a, c, g, or t
  misc_feature (444)..(444): n is a, c, g, or t
  misc_feature (449)..(449): n is a, c, g, or t
  misc_feature (458)..(458): n is a, c, g, or t
  misc_feature (477)..(477): n is a, c, g, or t
gaacttgtagtttgcatagtatccgacagatgtcaccgtatttaccttgaaaaatttaaaatattttgcaagcacccttgtgaaatttgatgtgatacccccaaggcaccctgagcacacagtttgggaacccattgcccttggaatattaatcatagttaccctcccagagagtgaaattttggataattaaaaaaatttcttttttcttgagatggagttttggtctnnnnnnnnnnnnnnnnnnnnnnnnnnnnnnnnnnnnnnnnnnnnnnnnnnnnnnnnnngctttcaagctattctcccgcctcatcctnccaagtagctggggattacagggcatgcaccaccacggccggctaaattttgtatttttagtaggagacggggtttctccatgttgggtcaggctnggtttcgaattcccganctcaggtgatcagnccgcnttgggcttncaaagtggttggggattanaagtgtggaggc

SEQ ID NO: 268747 - DNA, 458 bp, Homo Sapiens
  misc_feature (373)..(373): n is a, c, g, or t
  misc_feature (404)..(404): n is a, c, g, or t
  misc_feature (422)..(422): n is a, c, g, or t
  misc_feature (445)..(445): n is a, c, g, or t
tcggcacagcagtgaatagttagatcgaataataggctaaccaagaagcttaaaaggaaaagctgggaaatgagatgttcataaggaaatttaagaagctctggtatatttctgggaatctagaaggctatgtgcatgtgtagggttgtgtgctgcatgcttaggaaagaactaagaaggtcctaagctgtcagttctgattaatctctagactttgtgcaagcaagaagtaaaggctaaggaagggttgtaaactgcttggctggaatgtgaaaggtatgccctaacacatgtagttaggctgtcaatacacactgagtcttatactggttttaagcatttaaggaagtctctgcccagtcattagctgatncacaatgaacagcagagactttagtggaccncatatggttaggacattnaatatttttaggttaattagttncgggaaagtccac

SEQ ID NO: 268748 - DNA, 990 bp, Homo Sapiens
attccagggcaccagacgggccagctgtatgacattctaatgatggcacaagctctggacgggtggtttggcacacagtcaggttcctgggacctgcgcgaggggcggcagctgcagcagcacgacttcacctccccagatcttctccctggggtactggcccaccggggagtggctggcagtgggcatggagagcagcaatgtggaggtgcctgcacgtgaacaagcctgacaagtaccagctgcacctgcatgagagctgcgtgctgtccctgaaatttgcttactgtggtaaatggtttgtgagtactggaaaagataacctcctcaatgcttggcggaccccctatggagccagcatattccagtccaaagagtcctcgtcagtgcttagctgtgacatctctgtggatgataagtacatagtcactggctcgggggacaagaaggctacagtctatgaagtcatctactgaaaacattatgtggtttaacgtttatagttgaattgggccaaaatgtttcgaatttatagaaatagaaaagttgtaactttaaaagagaaaaaaaattacaaacacctgtttccaaaccttgacagaaaactactttgagtctacaaagaggaggcgacaagtccatcagcagaaagtcacctgtctacatagaccaaatggagcaccaaggccaagcggacagaggggccatgggttgtaggattgaggaacggaatctgccgactcacatgacagcccattctttctttcggggtgatctggggatcacgccttgcccaagtgtgagattacctttcggtcccttgcagttcacctcactttccgtcctttgtagagcagtggtgtccccaatgaacttgttcccgggttttgcatcttgtgaaatgtttttttgtatttttgttgaaggttaaacatttgtataaattgtaaatatatttggtttattacagtaaaggctttagtaccgaaa

SEQ ID NO: 268749 - DNA, 224 bp, Homo Sapiens
  misc_feature (200)..(200): n is a, c, g, or t
aagaagtatgttgaccaaatttatgtgaggggaagggtagggggaaaaatggtatgtaagtttcttattttaaagtctttattctacttggccctttaacaaataagacatcaagtttctctaacttgctgtaatcttaattcagtaagtatttatcgaggggcctactagacatatttattccctatgaggtcaagganaataagggcttgggcaccggtggc

SEQ ID NO: 268750 - DNA, 124 bp, Homo Sapiens
ataactaataaaggaagtgagagtgtggtgaattaagtgatgagtattatgtacaattgcctttacaaaaaacgtatttttactgtggaagaaattcatgcagagatgcctgtggaaaagtatc

SEQ ID NO: 268751 - DNA, 488 bp, Homo Sapiens
cggcacaggtggcacactgggcccagagctcagaaggctcttctgactactgggcaaagagtgtagatcagagcagcagtgaaaacaagtgctggcaccaccaggcacctcacagaaatgagatcaggctctgcctcaccttggggcttgacttttgtataggtagatgttcagattgctttgattaatccagaataactagcaccagggactatgaatgggcaaaactgaattataagaggctgataattccagtggtccatggaatgcttgaaaaatgtgcaaaacagcgtttaagactgtaatgaatctaagcagcatttctgaagtggactctttggtggctttgcattttaaaaatgaaattttccaatgtctgccacacaaacgtatgtaaatgtatatacccacacacatacacacatatgtcatatattactagcatatgagtttcatagctaagaaataaaactgttaaagtctccaaa

SEQ ID NO: 268752 - DNA, 469 bp, Homo Sapiens
ttaattcaaataatccatctaacagccatgagaccactcaagtatttgaggtcatcagctgcgtccatcaagacatgatattgaacatggacaccatctggtctgttggtctgtttttgttggcaaaggactccaaaaggatgcagttgtatgtgtttcagctgaaccacataccatagctcctctcccctcacaaaagggtttctctggggggagaaaagtaactgattatacctctcatgtctcaaactgaaattctgagaagcaaatggtcagttgagggccccattccagatctgccgggacgtcctcagatgtccagagctggcaaaaggtggagcaggcagcagccttgggcaccagccctgtctctttctgttctgataaggccacacacatggctttttgtgataagcttccagcccatgccactgaaataacgtttaagaacctgctgcatttcacagaa

SEQ ID NO: 268753 - DNA, 666 bp, Homo Sapiens
  misc_feature (11)..(11): n is a, c, g, or t
  misc_feature (31)..(31): n is a, c, g, or t
  misc_feature (36)..(36): n is a, c, g, or t
  misc_feature (73)..(73): n is a, c, g, or t
agcctgaaganttaacaggccaacatgcccnaccantcccctggcctaaatttttgttagttttttgtaaganaacacggtttccacccatgcctgccccaggctggaacttgaaactccctgagcctcaaagtgcatcccgccctgcccttggcctgcccaaagtgcctgggatttccaggcgtgagcccaccgtgccctggtctgcaatctttttattgacttgggaaaacaagaaaattaatcaccagctaaggtatgtaacaacagcatgtgagaggcagggttcagctaaccatattggttatgagtgcaaaagaaccagactttattcagtaagtacacaagattgagaagactgatatcagatgaaccttcttgctcaaagcaaacgatgccaagacatttatcgagggaaggattgcctagcagtagctatttagtgtgataatggcgtttgatagtttagacacaaacaccattgtcacactccacagctctgctaagggaaactctgtagccacgaaggtgtttaacttcacctccacattccaccattgtcactgataatagggggaaccttggtcagctccacatattgtgaccctaggcaggggaaaggaggcatcacggggtacaggcatcttgaggcatggggaagagctg

SEQ ID NO: 268754 - DNA, 375 bp, Homo Sapiens
  misc_feature (29)..(29): n is a, c, g, or t
  misc_feature (87)..(87): n is a, c, g, or t
  misc_feature (109)..(109): n is a, c, g, or t
  misc_feature (281)..(290): n is a, c, g, or t
cctttaagcaacctcactacccaagttgngcccacatcatatacccaagttgtcaaatatacatgaatctttcctgagattactagnttatacccaatctatttgcctntcttttgcctagcattatgttgtttttattagtataattttacagtaactctcatttaccttgtaggtcctagtgttccttccttcctctttctgtcaaaactgactcagcctaattctggacctgtattggtctatgctaactttaaaatgaatttgtcaagtttctaggnnnnnnnnnnttttgaacaggagacactgatgtgctttaaagaaaacaggcattactaggttaagccatatatcacataacaatcttttattttc

SEQ ID NO: 268755 - DNA, 452 bp, Homo Sapiens
  misc_feature (45)..(45): n is a, c, g, or t
tttaaatttaggccgcctaagcccatgttccagcattttaaaggnggcctaccctgacatacagtgtataacaacataactcccttggaacctccctatgtgtggtataattctactcttccaaggaacatgacttcaatactttcagtgattcaggtactgaaaagccttacctaaaaggctgttctttgtttccccctttcatactattcttttccatgacccaggatgcagcaaatgaaacagatttcttctcttaaggggatattaagactgttacttcctagtaagccaagtaataccatatttttattaacatctaacttttgtagatgggtgctaaaattgcatacattttaaccactaaaatagaaaaacaagtggtgctattatgtctcatggcaccagaaatgagctagcacttgggtttgttgttgctgttgtttattaag

SEQ ID NO: 268756 - DNA, 294 bp, Homo Sapiens
tttaacctggttgttgtagtaagacctttgtttcaatatcactcttgagtaaagattaaaataaagctaccattttacatttctatttcataatgaaaaactatgtcagtattttaatatggttacatttagccaaagttcgagggaaagagcttataaaatttaacttcttcataattttagtaatttcccagaggttctgggttttctggaaagtaaaacaatttatgcgaacctatgtctaaattcactgtttgttactatgtatgtttttttccaatgcttcttataaga

SEQ ID NO: 268757 - DNA, 428 bp, Homo Sapiens
aaggaaaaaaactttattccttttttcctaggaacttgtcaggatactttagtgaccattccctcactataactctcacccagacccacctaactgatgcatgagaagagccactagctgatgtggcccacagctcagactgagccagcatggttcgtgcaggggtaggtagcacagcatcatccagacactgcctcccctgggtagcttccattacatcatggacagcactgctcttccctgacttaaccttctgctttgttcaaatactagaaatattagatttcaagttcaataaagatgtggggcagatctgcctaaagaatatttcacagggacaatggccttccactgaggttaatggttactttgctcaaataacccttatgcttcaagttagggacagaaaaaatattttttaaggaagg

SEQ ID NO: 268758 - DNA, 364 bp, Homo Sapiens
aacttgtgattattagacattggttatatcattggtaagatggagctgtccccaccttaaaaatattcctaataaactatattttcatagtagataattcatattgttatgcacaagtcatggaacagtgaacctacatacttgttggaaataaaacgttcatattgaattgtgcagactatatgttaagagcaaacgtctttctacttacagaagtacgctcttcagggtcagaatttcaatcacgaggtcaggagatcgagacccatcctggttagcgcagtgaaatcctgtctctactaaaaaatacaaaaaattggcctggcatggtggcgggcacctgaggcaggagaatggcgtgaac

SEQ ID NO: 268759 - DNA, 686 bp, Homo Sapiens
  misc_feature (400)..(400): n is a, c, g, or t
atttaaggaaggtgaaattgttgaagtggatgaagaaacagcagctatcttgaagaattcaagatttgctcaagattttctgatcagaccaattggagagaagttgccaacatctggaggctgttctgctttggagttaaaggatataatcacagatccatttaagcttgcagaagagtctgacagtatgaagtccagatgtgtccctgatgctgctggaggctgctgtggcacaaagaaaagctgctaaatctatagccaaccaggggaccacagtagtgggcaagagtgatctgcatgttttttaacctgcttttccccactgcgcccggccataaatgaattatttttaagaggcattgattaaagattcacagcaaatcactagttaagcagattntttttctatttcctacttcaaagttctggtgccacatagtggtcagaaatggaacagagaagctgtcttaagccttgttcaagaagcaggaaaggcatcagaagtaacagttggcagagggtctcaggaaaaacatcttccttctgatcttttgcatagcaccttttggaattttcatcatgtttgcttattaaacaaagctcctactgccatcatactaatcatgcaaaaagattgccaaatcatgtttggtaggaggacttttgaggtagcttttgaacaaatg

SEQ ID NO: 268760 - DNA, 440 bp, Homo Sapiens
gtgtgtgcatgtggagagccagctgtttcagtaccatttgttgaaaagataatcttgcctccaccgtattacctttacttctttgtcaagattcataggccatatttttatgtggatctgcttctgggctgtctgctctgtcaactgatccatctgtctgtccttttgccaacctatcttgatgcctgtagctttatggtaagtctttaaggcaggcagcgtcatttctcctcctttgctcttgcccttcagtactgtgttggctactccagggaagtctccctttccatataaactttagaatcagtttttccgtatccaaaaaacaactcactggggatttttatgagggagtgcattgaatccatttatgaatttggggaagaaccggcatcttggactatattaaggccttcctatccatggaacttggaaaaatt

SEQ ID NO: 268761 - DNA, 523 bp, Homo Sapiens
  misc_feature (22)..(22): n is a, c, g, or t
  misc_feature (30)..(30): n is a, c, g, or t
  misc_feature (38)..(38): n is a, c, g, or t
  misc_feature (61)..(61): n is a, c, g, or t
  misc_feature (89)..(89): n is a, c, g, or t
  misc_feature (94)..(94): n is a, c, g, or t
  misc_feature (101)..(101): n is a, c, g, or t
  misc_feature (138)..(138): n is a, c, g, or t
gaacatccagaacgggaacgantgccagcngctccaantgccctaataacggcaaacgcancaagaataccagatccttaagaaataancctgncttaacncccggaatatcccaaacctgccttctatcttaatgangtttggctcctcccatcatagaatttttgaatggtttcactgttgtcctctaatgactcatttagacaccgtttctttgtgaatatatttttgataaaggtttcctgaatttcttcctgcttcaccaaatactgccaaagcctcttcacagacagtgccagatggtgtttggatttgaaaggagtgtttgtaggttccagtaaagctttgtggcgaagaattgcaggacctgcagacaaactctcttcggcggtatgacttgcgatataattttgaggtggcccaccatggatttcaagtcgtcggagaagaacttgttcccaacattgaagagtttttagaaccgcatgacaaagaggtgaactaactggaagctctgcaagat

SEQ ID NO: 268762 - DNA, 330 bp, Homo Sapiens
aattcacaggagggtagcagtcattcaactgtagtataatttggaattgcagctcacttcactttaagcagttcatctcagttctaatcattatgttcaaagcttcactctatccagatgccaagtttccccaactgtacaaaagcacaggagaaatatttctgtttggcaaggcctgggcaaatttttggaggcgttgtcatgcctcaacagggcaccagtcaggttataatttgccttaattgcttgtgccacaaacagcaacattgattacctctaggtcattgggcacttcaaaggaaagttttcttcccaggctactgttaaata

SEQ ID NO: 268763 - DNA, 954 bp, Homo Sapiens
tgacaccatagtgccctttctatgattttttttacttaatattcttcttggccttatatttaattccctatgcaattaatattttatatctgcattttttttaaaaaaatagatgttatataagtgattctcgtatgtagcacctgttgcttttccactgaaagaattacggattttgtactgtgatttatattcactgccccaattcaagaaatattggagccttgctacaatgtgaaatgttatagtcatggactccttccaaccagatttctgaaaacaccagagggatggtataattctgtctcacctataacatggtcctgtgacatagatattaagaccacaagttgtagtgaggctacaattatattcgtctgtcttggctttgcaacataatttagaaagcacgtatagttgttttttaaccaagttacatacaatctcatgtactgatttgagacttataacaatttttggagggggcatagagaaaggagtgcccacagttgaggcatgaccccctccattcagacctctaactgttgcctgagtacacagatgtgccctgattttctgcccattggccatagtactgtgcctaatcaatgtaataggtttattttcccaatcctcaaactaaaaatgttcataacaagatgaattgtagactagtaacatttgatgcttttaaatatttgcttctttttaaacaaaaactaaaacccagaagtgaatttttaggtggatttttaaataaaaaagattgattgagtttggtgtgcaagctgttttataatgaaaccacaaaatgaaatctaaaatcctgaaatgtgcctaaactatcaaaacacacgatacagctaatgtgtaaagatgctaaattctgttacttggaggatgaatatatttaagatttaaaacacaataataaatacatgattaattctataa

SEQ ID NO: 268764 - DNA, 805 bp, Homo Sapiens
  misc_feature (699)..(699): n is a, c, g, or t
  misc_feature (705)..(705): n is a, c, g, or t
  misc_feature (747)..(747): n is a, c, g, or t
  misc_feature (753)..(753): n is a, c, g, or t
  misc_feature (765)..(765): n is a, c, g, or t
ggcacgagcggcacgagcggcacgagcagtttttctactcttcccatcaacactagagcaatggctgtgcaaataggaataggaaatactaccacaatgatagaaatattatccacactatcacgtagggaagaacaatatcctgaaagagaataaaacacgaataaggtgatgtacccacattaatctgtgggtttgtggaatgagggttgcaaagttattgggaaaaggaaagagcagagttcacccattcaaaaaaaaccttttgtctactaatctctagtgtaaagaaaatgtagttcagataccattcattgtcttgggtcatgcttagtgcccccaagaagacaaacatatttattcttgggattctgataggcttcaatatgcaaaggacaatggaaaagtttagacactctattttcaaaattttataaacttgttttattggggaaaatgtccaaattgctagacacattctaagttctgccttggagaatcctactttgtctgagattgaggcagaggaattgttatcctgggcattactcagctcaggaacatggagcctgtggttcatgccagtgtgtgtcttcatgcagtctctccagaagagcaacagtaagaacatttctggttttaaatttcattttaaaatattttattatctgcaattcaccactgctctggggaaagcanaagggnaagttcccgttgtgtgtgaagagcccctttgggtataagggnttcccngccatagtcagnatagctatttcgtgacgcggttcttcccgtctttgttccg

SEQ ID NO: 268765 - DNA, 476 bp, Homo Sapiens
  misc_feature (22)..(22): n is a, c, g, or t
  misc_feature (44)..(44): n is a, c, g, or t
  misc_feature (72)..(72): n is a, c, g, or t
  misc_feature (87)..(87): n is a, c, g, or t
  misc_feature (136)..(144): n is a, c, g, or t
aaactggacacgatcgagaagnacctacaaaccccggccaacanggaaaaccctccgtgcgacgaaccagtnccgttcctgggaaantgtggtccctgggccgtccgcaaggtgtgcctgggacatgtagtgtgtnnnnnnnnntttagatttccccactcccaaggcccttccttcccgtcgagaagccttctgtataaagtattctcgtctgttgatccgtgccccacagtgtagtatgtgttatagtgtaagatctttgacccaatattggcggaattttaaggtctattttccagtggtgaacctgtgaatcacgctgctgcacatttggtgaagacgtgaagtagactgtttaggatgtaaaacattatatatatatatgtacatacatatgtaagttttagggaaagaatgtcttatataggcttcatgtggcatcttaggcaaaatctaaataaaaatatgtcaaattg

SEQ ID NO: 268766 - DNA, 220 bp, Homo Sapiens
gtttcaataattaagatggtgtactggtagcaaaagaacaaatagatcaagggaacacagaccctcataaatatagtcacctgatctttgacaaaggaacaaagacatttcaatggagaaagaacagtcttttcaacaaatggtgccagaacaactagatttccacaggcaaaaaaatgaatctagacatagatcttacatcttttacaaaaattaattc

SEQ ID NO: 268767 - DNA, 420 bp, Homo Sapiens
ttgcacaataggcaatccctcacataatttggaatattaagtttattcaagcatatttggtcagaaggagggtgatctcacattccagatttctaggcagccctaatttcaaataatctgtcccattatctgatttccgtatgtactgatatttatttggaacctatgattcctaagtgtagcaatccagctaattctaatattacctttcagaagattaaaattcatttttctactctgaaattacatgaagctgttgctctgccgatgattttcttccctattagccacctataattgaagattgccgggttggtaaaagggagccagagatctggacgtaatagagattaaaggagtatctaggctctagcgtttaccctacttatatatggcccacttttcccgggaaaagaaata

SEQ ID NO: 268768 - DNA, 287 bp, Homo Sapiens
tacataaatctaacattcttattttagaaagcgtaaaaagtgcctcaaaaccataacaacttcattaccagtaagaccctcccagtttcctttcatcttaaccttgactgcatctgccttgtggggcccccagctttcccaaggctttgtagcttctttcagaatgaaggctcccttccgtggctggggtgagcagtcttgagatatccgcaagggagactccccagaaaaaactaacagggcctttaataacctcctgttggccgggtgcggtggctcacaccgat

SEQ ID NO: 268769 - DNA, 419 bp, Homo Sapiens
  misc_feature (12)..(12): n is a, c, g, or t
  misc_feature (21)..(21): n is a, c, g, or t
  misc_feature (55)..(55): n is a, c, g, or t
  misc_feature (100)..(100): n is a, c, g, or t
  misc_feature (374)..(374): n is a, c, g, or t
ctgaaagtgaancccccgggncctaccttgaatttgaccacaagagaaaaagccnggaggaaaaggggcccattcctcccaaaggaccctgaaagagcanaaagaggtgggaccgaaagcccttaaggatccccacgactttttactgcccatcctgagcctacctcagtgtttgaatccccaagaggaagtcagtttacctctcaggtctgttgtaggacttgattttgtaaagcaatgcccatgttatgtggttgaaagggcactggacttagttagtatcaggagcactgagctcacagactgacttgggctcctactggtggggacctctgttagtcactttacctcatccaaagtataaaggaattggnccaaataatttaccacatagctctaaaacttaatttaaaatgtaa

SEQ ID NO: 268770 - DNA, 435 bp, Homo Sapiens
  misc_feature (11)..(11): n is a, c, g, or t
  misc_feature (91)..(91): n is a, c, g, or t
  misc_feature (138)..(138): n is a, c, g, or t
tgaaggccaancccccagtgatggtaccgtgcccctgtttggctgaatcctacctcacccctaaaggggaaccatttggcctcccccaggnaacatggtttggtgaagtaatacctacaatgtgccatatatcctatncccatgttcctgctttgtcctgtttgggatatttttccatacactgattcagtacccatgtgtattcccttgcttttgttgtctcatccgttgatgctacgtcccccaaattattgccacgaccagttgtaatgaagcttcacccttctgtattgtgctaggaattttacagctataggttttacattatagtcttcattcattttttaaaattgacacatgtaattgtgcatattttggggaaacaattatatatatatgttgtataacaataaaaatcagagtacttctataatt

SEQ ID NO: 268771 - DNA, 379 bp, Homo Sapiens
ctgtttgctgaatctactcatccttaagggtacatttgcttccaggtaacatgtttgtgagtaatacctacaatgtgcatatatcctattccatgttcctgcctttgtcctgtttgggatatttttcatacactgattcagtacccatgtgtattcccttgcttttgttgtctcatccgttgatgctacgtcccccaaattattgcccacgaccagttgtaatgaagcttcacccttctgtattgtgctaggaattttacagctataggttttacattatagtcttcattcattttttaaaattgacacatgtaattgtgcatattttggggaaacaattatatatatgtgttgtataacaataaaaatcagtacttct

SEQ ID NO: 268772 - DNA, 731 bp, Homo Sapiens
taaagaagccaattacctttctcaaagctgggcagaaattaaagaaaagtcgatggttacatgctttgaatctttcaggaagatgccagttctgaattatttcttcatcagaaatcacatgatgatccagcgctttgagaggccatatactgttaacaagaacatgtctatatccttttttaaggcttactggacaatcaaacatagtgagggcaatgagggttggacaggcagataatacacatatattctttaactttgcaaacccattgtcatgaagatagagtagttttaggttcttcaatccattccaaaatttggtatttggtagactctttatctgatttccatgggagatcaagtttgattaattttatacaactttgaagtggatgaatatctgtaataaaattgtttgagaagatgcatactctaagagagatgcaagactgcaaattttccatagactttaaatgaaggccattgaacttcacaaaaacaaaatctttttgacctgctcttatgttttcattatagtgactccattcatcatgactggttagctcttctgtgactgttccatgaaacatcgggtcaaactggctgcaagcccttatgagttggagacaagtgcccagccccaacacagtcagacaaatcgctgggcggccatctgctcctgagaccgttgctagagaaacaagacaacatctcaagttctccacatcatg

SEQ ID NO: 268773 - DNA, 637 bp, Homo Sapiens
  misc_feature (75)..(75): n is a, c, g, or t
  misc_feature (360)..(360): n is a, c, g, or t
gttttcaccttcaacctatccttcctgaagcccaaacttttaaagaatttacttccagacctggccttcagctanatatgattagggtgtttttctgagtgtctgtcaaattatgctggctaatttcaatgagaaaagattttagagtcaccagtgaaccccatccataaaagggacctaaaagctctctctggtcccctgagatccaccaacccccctgagagaagcccagaacttacaaatgcatcgtctagactttgaagaagcaaaggtatgattcttaatatagcccacccatcggcttaagtccaagccttagactctaatatttttctataacaggagaagcctccctgactnggagacttagagtctcacatcttctgccaccacatgaatagactaaaaagaaaggagagtcccacatcaggccaagtggtgacctgtggctatttcagctcagaatgtcagcctctgaagcatcaggtttgaatgactttggtgtcatgggattctgtccattgtccgtttgagtctgctgacatgcttcctctggaaagtgcagtttggcatggatgagtcagtggttttttattttggggtgttttttaaaaaataaaaatgaattgctttgaga

SEQ ID NO: 268774 - DNA, 738 bp, Homo Sapiens
tttagacttcccaaagagtcattatgttgagtaaaaataatttagtcttttctttttgtttggcttaacttttcttccctcctaccctatatcttttgtcttccaagatattataactaggaagagttagcatatataattatgctattatctcagaccctgagataccctgtaggacagattcacaacagagtcatcatttccaggctaatagcagggggttcaccctattcagcattccacattttcctctgtaggcactcacattagttttatattttaggtagcaatatgtgtagtttagctttgtgcaaacatattaggagtagacattcagtgtactgtgtcctggttatctagattctaaaccttcattttataaaaatcccagcccctgtggggaaagaggggtgttttattaacatgcggcattaacactgctgggctctgtggataggttgacatagtgtcatcgtcacagaagataaaattcgaaggagcatttgtggagagcatgcagtggatattagaacaatatctcaggattttatggtggtttaatcattatccacccctatcctttcgttcacacagtcaacctatattttttaaaattcactacggccaggcactgtgttaactgctgtagtgactcaaatgtatgattgcatttatatgagatatccagaataagtaaatccatagagacagaaagcacgttggtcatttctaggggct

SEQ ID NO: 268775 - DNA, 424 bp, Homo Sapiens
  misc_feature (399)..(399): n is a, c, g, or t
gatattaaagaaatataggaaagctctcaacatatgtgtatgtcaattatatgtactggaagaagaagaaagatgaggaaaaatgaaatacttgaatgatctgctttagaattgtgtacatttgtgtctaagtaccatgtcatgaataatagtgctaagagtacttaaggaaggatgaacaggatcaccttttatcagttttatgacaggagtcaagttgggtgcactgccaatggtgtgctttaggttccagcctgtctgctcacaaccggggaccacacaaaaagagttaacattaggtcatgggtaaggcttaggcaaggcaggatacacttccaaaattttttcctccttggaaggcttttttaaaggccaatttccgggaggatatatactganaaactccaaggggagggtgacggtt

SEQ ID NO: 268776 - DNA, 346 bp, Homo Sapiens
  misc_feature (157)..(157): n is a, c, g, or t
  misc_feature (328)..(328): n is a, c, g, or t
actctttgatgataaagcctgtccaagtactaaggacaattagagtaggcaggtgacctgtacaaagtattagtgataacacaacattcagcttcctaagagttaaaacgtgctgcttacatgaagggagatgatactgagctaagaaggcctgggnatagagaagcagagaagaccaacctacttcatattatttataaaatagagaatattctcagctaacatgctggggagaaaaaaattcttccaaaaaagggcaggaattaccaatccaatgcccaaggatttaccaaattcccatccatggttttaaatattagggggccanaaattaaaccattttcct

SEQ ID NO: 268777 - DNA, 347 bp, Homo Sapiens
  misc_feature (190)..(190): n is a, c, g, or t
gttaccctcccctaaaatacaataaaaaccccatacccactcacctaagcacaatatgagcaactgaacacataagacctgaaaccccactggggtcccaacagactcaaccctatctctttgtgtcctcagagtataattggcagtaatgacccatcgaactctggtctccctgccccaaaacccatgncttaacaacttcccagttgcccacttctgccgaaatgcccacagaagtgaatagactagtgagacagatatgtgatctcaaactcaagttttccagcttacacactattgataaaatactgaggaaaatctaagcatttttaaaagtcaaaaataaa

SEQ ID NO: 268778 - DNA, 611 bp, Homo Sapiens
  misc_feature (15)..(15): n is a, c, g, or t
  misc_feature (87)..(87): n is a, c, g, or t
  misc_feature (116)..(117): n is a, c, g, or t
  misc_feature (175)..(175): n is a, c, g, or t
  misc_feature (180)..(180): n is a, c, g, or t
  misc_feature (185)..(186): n is a, c, g, or t
  misc_feature (204)..(206): n is a, c, g, or t
gtcctccataattgntcacattatccatcatttatgtcaactctgcaaaataaatgcacactcatccccagagtctcccaaaacctntatctttagaatccaaccttgttttaagnngtagtacaatgaaggtagcattgttagtagtcacctgacaaaagctgtccattattcntgacnttaannattgaatgcaatgatttnnngaacataatacattaacatttacataatatatttagaatcacatggtttccagtgattagatttcagtcatgcctggaaaggagaagacagtggctaggagcacattccttataaaggatacataaatggtatacttaggatgactaatattaagaatttaaacacggtgcatttttttcctcaaaggaagcaattttagtttctaaagagcatttacttctgacatctcgattcctgatttcagtggctgcagactgtgtacttctgtgccacacttaggacaagtaaagtacacgtcaaataagaaactactcttagcacagaaataacagaaaatatgctcacatcctatggtgtgaggcatggtgggccactctccacatagagcgcattctttgccactg

SEQ ID NO: 268779 - DNA, 466 bp, Homo Sapiens
  misc_feature (193)..(193): n is a, c, g, or t
  misc_feature (427)..(427): n is a, c, g, or t
  misc_feature (444)..(444): n is a, c, g, or t
acactaacttaagctaatgctagggtagtgactgagatgtaaaaatagattttagaattaaaacaaaatccaagtcctcacacccctgtcatcccaggagatctttccttgtggtggtttctgtgagaattggccatcctgaggacacagccaggacggcagaggcctcctggctcaaggggcatgccctgcncttaccttctgaaatgtttaccccattgaccaaacttggctccagccattggcgggtggtttctagatagccagggcccaccaagagatattggccccttggatgagagtcaaacaccctgccttacaagggagatgtttttgaaatgggagagggaaaattgggcaccttcatctttttaaagggcagttatgggatttgatttttcagttaacttgaattttgttgcaccanaacttttttaaacattngttgaaggcctgttttcgtttg

SEQ ID NO: 268780 - DNA, 337 bp, Homo Sapiens
atgaagcaccatgcccggccttaaaatgccttcttaaaggaaaaatgccaactccatccttaatctcaaggaaatctgattgtccaaatagatctgttaatatgtaacatattaataggtaacttgctgtgtaaaattataagccatattttaaaaggttttaaaaatacttattgtgctccatttgtgatataatttctaacatttctgctctgtgatgggggtttatttgtaagaataagaggcaaaggaatgttagcatagcaaaaatgtgtttgaatgagttaaccttttaatcgcaaccctatgtgaataaaattactccactgttaaaaaa

SEQ ID NO: 268781 - DNA, 601 bp, Homo Sapiens
  misc_feature (112)..(112): n is a, c, g, or t
  misc_feature (340)..(340): n is a, c, g, or t
  misc_feature (544)..(544): n is a, c, g, or t
ttttgtaataggtgagataaagtacttagatttataaggcagcttcccctgtagtgataaattacaagcagacaatcttattttgtaatgtgatgaagtgatgatgtcttanctctacttagagagtgtatgtctgtctaacagaacaaaaagatgctctgtgtaaattccttcctgtagggcacactgcaggatttccatgtagatagaagaactatagggcctagtacagaaggtgcacacaaatgttggcaaagtcaaaaccccatgaattaaaacctactggaatttggtttttaggagtttggtaattagattatctcttttgttattttcattncagttaatatcctttgggctcagctagctttgaaattggctgatgaaaaaatatacataaaagggtaaaattcacacatacagcaaacaaaaatgcacaaagcctgcttcgtaacttttttttctggaattgtttttcactttgcctttttctgccaaaacaataatcaaagaactcttgctttaacctattcctgtacaaagnactgtttttgaccagattaatcatctgttgtgggcattctatcttgtagggacactg

SEQ ID NO: 268782 - DNA, 454 bp, Homo Sapiens
  misc_feature (23)..(23): n is a, c, g, or t
  misc_feature (47)..(47): n is a, c, g, or t
  misc_feature (56)..(56): n is a, c, g, or t
  misc_feature (64)..(64): n is a, c, g, or t
  misc_feature (71)..(71): n is a, c, g, or t
  misc_feature (414)..(414): n is a, c, g, or t
aacattccgtgcccgtaaaaaantcccgtgttcgggaaaccccgaanagatctganccagaaancccccanaggggacccaagaggcctgtaatggctgggccctgggcccactcactgagatgcctgcgagtcctcacttttctcatctgcaaaatagtgataaggctacttctgcagggctgctgtgaagataagaggggaaaaatatgtccagccccaagagcaatgccttgcacactgcatgtggctgagcaaaggggtgaagaatatccaatagtatagacttgcccatttatgaactaagaccaagtaattctgcccctcctccttacatggataactgatctacctttagaaggcctacaaacaggccgggcatgggggcacgcctgtaattccagcactttggganggccgaggcgggagaactgcttgggccccaggagtttgag

SEQ ID NO: 268783 - DNA, 402 bp, Homo Sapiens
  misc_feature (33)..(33): n is a, c, g, or t
  misc_feature (221)..(221): n is a, c, g, or t
accactggacctccggggcccccactggcctgnaggaattggggtctgccctgttgatgtttacatggcgcccctgcccccctggaggacccagattgctctgccccaccttgccagggcagggtctgggctgggcaacctgacttggctggggaggacccaggcccctgggcagggcagggcagcctgtcacccgtgtgaagatgaaggggctcttcatnctgcctgcgctctcgtcggtttttttaggattattgaaagagtctgggacccttgttggggagtgggtggcaggtgggggtgggctgctggccatgaatctctgcctctcccaggctgtccccctcctcccagggcctcctgggggacctttgtattaagccaattaaaaacatgaattta

SEQ ID NO: 268784 - DNA, 483 bp, Homo Sapiens
  misc_feature (12)..(12): n is a, c, g, or t
  misc_feature (21)..(21): n is a, c, g, or t
  misc_feature (31)..(31): n is a, c, g, or t
  misc_feature (41)..(41): n is a, c, g, or t
  misc_feature (84)..(84): n is a, c, g, or t
  misc_feature (101)..(101): n is a, c, g, or t
aaaaaaccaacnaaatccccntgaatttganttaactaaanaaagctttgggttgaaaacaactggaactccggggcccccaantggcttggaagaaaaantggggtcttggcccttgttgaaatgtttaacaatggcgcccttgccctcccctggaggacccaagattgctctgcccccaaccttccccaaggcaagggtctgggctgggcaacctgacttggctggggaggaccccaggcccctgggcagggcagggcagcctgtcacccgtgtgaagatgaaggggctcttcatctgcctgcgctctcgtcggtttttttaggattattgaaagagtctgggacccttgttggggagtgggtggcaggtgggggtgggctgctggccatgaatctctgcctctcccaggctgtccccctcctcccagggcctcctgggggacctttgtattaagccaattaaaaacatgaatttaaaaaa

SEQ ID NO: 268785 - DNA, 539 bp, Homo Sapiens
  misc_feature (170)..(170): n is a, c, g, or t
  misc_feature (258)..(258): n is a, c, g, or t
gtctggagtggtaacagctctcttcttactcattactgcaaattgattgtcttcccccctccctccagtaccataatcttagagacaacccttaaaacagctgtttttaggctgttccttgtactcttaggatatttgagtcacttgtgtcaaccactaaagtatagagnaaaagtgtaattagatgtggtttttaattttgtgtggcctaaaaaaaagtgccatgacggtgagagcccccaagttatcctttccccncttcggtgttccttccttctcttctctgcaatgccttctgtagccttcctaatgttccccgtggctaggcctttcctgccgagtgctctgatgcaatagtggaaatcgcttatatgtccttgggttgctggttggattaatctttaataacaatatatagaattgtagactgatgttttagcatttttccaacacacacaacgtaaaaataaaagcagtcgaccgcacttatggtaatcagttttgtataacttaaaataattaaataaatgaataaatcc

SEQ ID NO: 268786 - DNA, 364 bp, Homo Sapiens
gagcttttctttaaattttcttcctctaatattgccttttcttgtacaaggcagaccaggtatctttttatgctgtttttcctttactaagaaaagtattgcatcttgaagacaaaccatttcccagagtagtgataaaaaataacactaaaaaaactttaaaggtgagtcacttacatcaccttgatgaagtaaaaaaataaaaagcagttgggcactaaggatagctaattccaaatatctgtgtctaaacaattttaaaaactgtttatttattttgtaaggaatgtacccctaggtccaaaggtaaggtatggttttaaaaaattttgggcccaaaaattttacaaaaaccctttcaggt

SEQ ID NO: 268787 - DNA, 423 bp, Homo Sapiens
cagctcagaagacacccttcaaccctgggatgaccacaattccttccaatttctgcggctccatcctaagccaaataaattatactttaacaaactattcaactgatttacaacacacatgatgactgaggcattcgggaaccccttcatccaaaagaataaacttttaaatggatataaatgatttttaactcgttccaatatgccttataaaccacttaacctgattctgtgacagttgcatgatttaacccaatgggacaagttacagtgttcaattcaatactataggctgtagagtgaaagtcaaatcaccatatacaggtgctttaaatttaataacaagttgtgaaatataatagagattgaaatgttggttgtatgtggtaaatgtaagagtaatacagtctcttgtactttcaa

SEQ ID NO: 268788 - DNA, 478 bp, Homo Sapiens
  misc_feature (21)..(21): n is a, c, g, or t
  misc_feature (26)..(26): n is a, c, g, or t
cccagcagcctgaatgtgtgncctgntgttatatgataaataaacttctttcttacttgagccactatatttgtctcttgttaacattagtttagcctttatcataacaaatagacccaacaaaactagttccttggttttatttcccctaagcctttcctgatttgtgtttcacccctaataaaacattgtgattttcccttcttagtaggttttcctaaactgtatacaaactacattctgtgtgtaaagtatgggaaagtatttttttaattccatctcaaatctagcttaccttattgcacttacgtatttaactgtgccatttgtaatagctataaaaagccctgtgttcagatagaagtttcatgaattcacttaatagcaatgcattaagtgcaaaattaataacagtgctataatgctacctaaaataataagaaaagggataagacattgtccttgtgcttaagaaact

SEQ ID NO: 268789 - DNA, 705 bp, Homo Sapiens
tgtatgacactgtttggaaagctgcagtatctctcttcctgaggtccagaggccatttaaagaataaacatggggcttagaggtgtcttggccaccaaacacaggtaagccaacagagttcggctcccgtacgtggtgtggtgggacctggggcctggagccacttgtactcctggggtgggactgagggagggaaagggctcccccacttcaggctggtcactgtatgttgacttccctctggaagcaaaattccacttgtaaaaatcagcttccaagacaaaagatgatccgatgtcacttctgggtcaccaggaagggacacaggatctctctgaactttggaacagaccctcatattctggggccagaagtttgcccagaaagcagcaggtggctctgctgggctgcagagccagctcattggctgtccctgggcttcgtctccctcttccgagtagttgctgcctttcttcagatcaggttaccacaatgcctccccgctgctgacgcttcatcccccacacctccagccccagttacctgggagcttctcagaacccactttgccggtgctaaaacacaagagggggtgaaagtgggctgccagtaatggccaggaaaccaaccaccagagggccagggttgaaagacaaggttccgggtgttccaggggcctgaacggggccaaccttttggcaggtt

SEQ ID NO: 268790 - DNA, 476 bp, Homo Sapiens
  misc_feature (73)..(99): n is a, c, g, or t
  misc_feature (402)..(402): n is a, c, g, or t
  misc_feature (407)..(407): n is a, c, g, or t
  misc_feature (447)..(447): n is a, c, g, or t
  misc_feature (462)..(462): n is a, c, g, or t
agcacgagaagccttgttgcatatgagccaaaagtgcaaaaagctctatataatgaactaacctgccactcgnnnnnnnnnnnnnnnnnnnnnnnnnnntaaaatcagactgttctacaaaattgtgtatttgtatttttgtgtacgtacaattttctgctaagcgaaggaggatgtagtataggatgctgtgagaagagatttggtttaatcctatttctttgttacttatttttgttaacatcagatgcctgtctttgtcttatatgtgtatgacactgtttgggaaagctgcagtatctctcttcctgaggtccagagggccattaaaaggaattaaacagggggcttaggagggtgttcttgggccaaccaaacacagggtaaggccaacagagttcnggctncccgtacgtgggtgttggtggggacccgggggcccggggngcccacttgttactnccggggggttgggg

SEQ ID NO: 268791 - DNA, 376 bp, Homo Sapiens
  misc_feature (291)..(291): n is a, c, g, or t
  misc_feature (320)..(320): n is a, c, g, or t
gggagtacctagtaggtatatatatttatgcagtacataagatattttgatacaggcatgcaaatcataataattacatcagagtaaaagggtttccatcacctcaagcatttatcctttatgttatgatccaattacattcttttagttattttaaaatatacaattacattactattgactacagtaaccctgttgtattaccaactgctacggtgtattattcattagtaagtcctatccaaactttccttgtctttctttttccagctttattttggtatataaatnttgttcatctttgagaaaagccagcttantgttcaatttaggttctactcttcttctaatttaagaaattattcgattgtatatt

SEQ ID NO: 268792 - DNA, 351 bp, Homo Sapiens
  misc_feature (240)..(240): n is a, c, g, or t
  misc_feature (269)..(269): n is a, c, g, or t
  misc_feature (317)..(317): n is a, c, g, or t
  misc_feature (320)..(320): n is a, c, g, or t
aattgtccctcctcagtaagtgcaagccaccataccaggccctttgaacatattttaaatggctgatttaaagtctttgcctaatactaaagtctaacatttgggcttcctcagggaacattttctaatttactgctttctctcctatgtgtggaccatacttaagtggttttttgcatgctttgtaataacagtctcttgaaaactaaacattttaaataaggtaatgtgacaactcgnaaaaatcaggattcttcccctaccagggnatttgttgttattactgtttactgttggttactggtttattgttgttnctnttaggtgactttcctggaactaattatctaa

SEQ ID NO: 268793 - DNA, 749 bp, Homo Sapiens
  misc_feature (101)..(101): n is a, c, g, or t
  misc_feature (109)..(109): n is a, c, g, or t
  misc_feature (451)..(491): n is a, c, g, or t
gagatgtaagaatattactgagaatggaatagcagaactggcttctgggtgtccactactggaggagcttgaccttggctggtgccaactctgcagacacnaccgggtnttcaccagactggcacaccagctcccaaacttgcaaaaactctttcttacagctaatagatctgtgtgtgacacagacattgatgaattggcatgtaattgtaccaggttacagcagctggacatattaggaacaagaatggtaagtccggcatccttaagaaaactcctggaatcttgtaaagatctttctttacttgatgtgtccttctgttcgcagattgataacagagctgtgctagaactgaatgcaagctttccaaaagtgttcataaaaaagagctttactcagtgacttaatatatgttctgtattaaaattaatgtgctttgttggggtttannnnnnnnnnnnnnnnnnnnnnnnnnnnnnnnnnnnnnnnnaatggtaagaattaagacatttgtagattttaaagaaaaatatgaaattgtccattaaatcaagtaaaaatgtgcacaaatgttttcataaaatactgcaagcacttctcttcaagaatatgagtggatattatttttaccttatgttaatcagtgatatgctttagtcaataatatgattgataaaagaataacatggaatcatgctaacttattttcaaaggaacactgagcaataaagtatcgtggcatttatgc

SEQ ID NO: 268794 - DNA, 333 bp, Homo Sapiens
  misc_feature (31)..(31): n is a, c, g, or t
  misc_feature (82)..(92): n is a, c, g, or t
gcatggcccctcaataaacctagtcaaaagnaggacaaggaaaattaaaatatatgaatgaaagcccctgtagaaaaggagnnnnnnnnnnncaatgaagtgaattaaaatgcccaaataatttttcccacataagagaaacttaacgaggctatcaactctaacacacccaatatatacaatgattgcaactgtcccactatatatccccaaacataagataaggttttcttccctaaagttatctttcagaaagaaggaattgctttacaattaaatccttacttttgaggcagacaccaattattttatactaaatactaacaagggcta

SEQ ID NO: 268795 - DNA, 403 bp, Homo Sapiens
ctagattaaccaattggacttactgtttaaactttgagatactttccctgaaaaggtatatgggaaatagaagaaaaaccataatgagccatattatatgaatatgtagcctagccatacctttaaaattttttatgccttcttgactttacagataccttgtatattaatttgtcttaatttgaaactcatagaacttgtggtttacagtttagtgaatactattagcttaaaggatcttatccaaatgctttatttagattgagatgatttggagaaataagcctttcagacaatcttgcgcttaacttttgtgggtctaggaacaagagtacaaatggagtgtcacataccgtacgtctaatttaaacgttataaatcaatcttaaaaaagaacaaaatt

SEQ ID NO: 268796 - DNA, 334 bp, Homo Sapiens
  misc_feature (121)..(121): n is a, c, g, or t
  misc_feature (127)..(192): n is a, c, g, or t
aattaatccagggaacccattgggggggattaacctcattactgaaagggaccagtggccacccaaagccattccattaggggattgggcttccccatgaccccaaacacctctcttcttngaattnnnnnnnnnnnnnnnnnnnnnnnnnnnnnnnnnnnnnnnnnnnnnnnnnnnnnnnnnnnnnnnnnngtgagtttccatctttcctcacaaaaacaatggctgtcatcatttaaaatagattttatgcagtttgtctagttaagcaacaatttgttcttgtaaattgtatttaaaaagttatcgttaagccaggcgctgtggctcacac

SEQ ID NO: 268797 - DNA, 515 bp, Homo Sapiens
  misc_feature (440)..(440): n is a, c, g, or t
  misc_feature (445)..(445): n is a, c, g, or t
ttttggaagaaatacatttattttcttttaaccaaaatagatgagaatgagtctctatcctgctacctggtttgttgttattatggtttgttcccctctccagaatcacgaaaaggtccggggtctcacacagtgcaaaacattgaggtgagccctctaagccttggtctgcacaggttctgctcatacatgctcttaagcttgcaaattcagaagtgttggtctgtgtgccccagggtacaagagaccttcccaggggagccttggtgaccaggggcccagcatccctgggggactccatgcagccttttccctagggaagttctatcatctccagggtgctttgccacaatcaggggcagggagtctcaccggctcatagggccccgtgggacttttttggtcccctacttatcttttgggaaactaccccccctttntctcnccccttcttcctccggggaaccctggggcctaattggagttcactaggagctttcaccataggggtccag

SEQ ID NO: 268798 - DNA, 422 bp, Homo Sapiens
  misc_feature (15)..(15): n is a, c, g, or t
  misc_feature (29)..(29): n is a, c, g, or t
  misc_feature (246)..(246): n is a, c, g, or t
  misc_feature (249)..(249): n is a, c, g, or t
gaagggtcaacctantctctctcaaagcnaaccccctaggccaattgccctggaactcctcccctctccccttctttaaacgagcttgcctccctcctgccaagtttgagggcaaggctaagaaatgtcagcccacggaaacaactctattatctggtgactttgggtaatgtgaatcagtgcctgaggacctttgctgtgtccttggtacagaaccatccacttgacctaactacctcccctggnccnggtctcgctcttctcttctttgttaagccaacaactatcaccctctcctactcttcttctcccctgccccctggagggcactgtgtttggttgtgcaaatgtatttactatgcgtgtttccagcagttggcattaaagtgcctttttctaataaaatcagtttattaagacaa

SEQ ID NO: 268799 - DNA, 408 bp, Homo Sapiens
ttcgggactcgagcccctgaaagtgaggcccaaaggactggaagttctggtggtcagataactcattccagactggataaaaagcccagagtgtaaatgtgaaaaccctgaattgtagtcaatggctaaatattgagccacatgcaaggcaactggggtaggtaatgaggaaaccaaaaaatgccactgctgtttccaacgagtacaacaagatggtaataaccaatattcattgagctcttcacatggcaggcagtattctgagtccttgacagtcacttaacccaatcatcacaaccaccatacaagggaaatatggaaattccatgtctttgttgcaggataagttactaagacagtgatttctgaaatattttatgcatacaatgaacagtaaatggtttgagt

SEQ ID NO: 268800 - DNA, 444 bp, Homo Sapiens
  misc_feature (18)..(18): n is a, c, g, or t
  misc_feature (28)..(28): n is a, c, g, or t
  misc_feature (33)..(33): n is a, c, g, or t
ctgaacccccggccgggnccatccaganggggnccaccctgtgaacgggcacccagcggcccgattccccgggaagagttccccggagggtgttggcctgtttttgttagcctcagtttttttcctgggctcccacccattccctaactccaggtagacaagatagatgtcacacacaacaattttaaagtattttgcttagtgcattttgtttatgattgcagtgtttgtttcttatttaataggctttttacttcattctattaaattttagtgtttagaagaggcgggtactgtcactgtgtaaaatatgtaatattttatatgttataccatgtcatatatacttgcaatatcagaccttgcattcaatatacaatgcaattgactctttgcagacctgcatttttcagtgaacaataaaaagattgtctggcaaaaaaa

SEQ ID NO: 268801 - DNA, 381 bp, Homo Sapiens
tttttgtggatggggacttgtgaatttttctaaaggtgctatttaacatgggaggagagcgtgtgcggctccagcccagcccgctgctcactttccaccctctctccacctgcctctggcttctcaggcctctgctctccgacctctctcctctgaaaccctcctccacagctgcagcccatcctcccggctccctcctagtctgtcctgcgtcctctgtccccgggtttcagagacaacttcccaaagcacaaagcagtttttccccctaggggtgggaggaagcaaaagactctgtacctattttgtatgtgtataataatttgagatgtttttaattattttgattgctggaataaagcatgtggaaatgacccaaac

SEQ ID NO: 268802 - DNA, 439 bp, Homo Sapiens
ttccagggtggagaaatatttaataaaatcagagtcgagagaaagtcacttgcacaattcatctcctacattcactgctggccaggccaggggcacctggggttgaaatcaggctgacctccggacagccgttactagcgcactgtgtctcggggggaatctcagggtgacgctgaggccgagtccccaaaagccaaggaagccagccccacaggctggggaagccctgaaggccgggggagctgtggctgcactgcctctatcctgctgagtgtgctctgcccaggcctcactccttcaggagcttgtgcttgactgtgggtgctctcggagcagagatgggatgaagagggtgccggcggggtgcgggccccagctcctgcagctcatagtcatgggcccactcaatgttgcccacttctggatctggtactcctcc

SEQ ID NO: 268803 - DNA, 351 bp, Homo Sapiens
  misc_feature (19)..(19): n is a, c, g, or t
  misc_feature (29)..(29): n is a, c, g, or t
  misc_feature (46)..(56): n is a, c, g, or t
  misc_feature (59)..(59): n is a, c, g, or t
cgcacccccagccccgaancggaccagantgagacccctgcccccnnnnnnnnnnnganggccagccggggccagatttggccccgccaggggtatagttggccgaccctcaatcctagaagatagagttgttcccttagaactttgtaatattttggttagaaatatttcagttaactcccagttttttccctagctattcggtcagcagaaaaagtttgcttaaaacaaagggggtagtcctcttataacctgatatttgtcaacacagtataagctttctagttgttttcaaaattactgtaatggtttgtgtctgtatttgtatattatacctacaaacatacatat

SEQ ID NO: 268804 - DNA, 388 bp, Homo Sapiens
  misc_feature (316)..(324): n is a, c, g, or t
taaccaattctgatgtgttcagtagctgaaagatatgtatgtttgtaggtataatatacaaatacagacacaaaccattacagtaattttgaaaacaactagaaagcttatactgtgttgacaaatatcaggttataagaggactaccccctttgttttaagcaaactttttctgctgaccgaatagctaggaaaaaactggagttaactgaaatatttctaaccaaaatattacaaagttctaagaaacaactctatcttctagattgaggtcagccaactataccctgcaggccaaatctgcccagctgcctcnnnnnnnnngaggcagagtctcactctgtcgctcagggctagggtgcagtagcatgatctcgggcttaactgc

SEQ ID NO: 268805 - DNA, 276 bp, Homo Sapiens
  misc_feature (243)..(243): n is a, c, g, or t
  misc_feature (253)..(253): n is a, c, g, or t
cctttaataataaaaaagaaaaccaaaacctcctataatttataagctatgtttgactatctacattatatagaaaatatagactctgtttactttataacacacatctttttcccttgataaataactctttaaaatatctagtatacatgccttgacttcttatatatataagtttggttttatacatatacatacatatatactcatgtttgtaaaacacaataaatatatactcgacantgacagccanacaaatgccattttggttaaaaa

SEQ ID NO: 268806 - DNA, 487 bp, Homo Sapiens
ggtatcccagccatccagaggaatagaaaattataataaccatttccctgcctcccgtgcccaggaggaatacgtaaatcgaaacctgtttgaagacctgaaaaacatgaaggcaatcaactgggctcccacagaaatttcctacatccttgaactaagtcggtcttattctgtaggtgatacttgacaggtaacgactctctgacacgcccaaatgacggcagatctacagagaaagatgacacactgcattcacatggagagggatattctccacaatcacgtgcggcagagtgatgacagttgtgatgatggggatattctccattgctgaggtccttttccaagagataatataatgcccggttgctactccaccttcaatatttccaagagatgggcattgaagacaaaagcattcactagcactctctccagtctgtaagataactacagggaaaagtctttatattccttatgcaatggt

SEQ ID NO: 268807 - DNA, 668 bp, Homo Sapiens
  misc_feature (142)..(142): n is a, c, g, or t
  misc_feature (151)..(151): n is a, c, g, or t
tcggatgtgctattggccccaggactgaagctgcctcccttcaccctgggactgtggttccaaggatgagagcaggggttggagccatggccttctgggaacctatggagaaagggaatccaaggaagcagccaaggctctncgcagcttnccctgagctgcacctcttgctaaccccaccatcacactgccaccctgccctagggtctcactagtaccaagtgggtcagcacagggctgaggatggggctcctatccaccctggccagcacccagcttagtgctgggactagcccagaaacttgaatgggaccctgagagagccaggggtcccctgaggcccccctaggggctttctgtctgccccagggtgctccatggatctccctgtggcagcaggcatggagagtcagggctgccttcatggcagtaggctctaagtgggtgactcgcacaggccgagaaaagggtacagcctctaggtggggttcccaaagaacccttcaggctggactgagctgctctcccacagggtttctgtgcagctggattttctctgttgcatacatgcctggcatctgtctccccttgttcctgagtgacccacatggggctctgagcaggctgtatctggattctggcaataaaagtactctggatgctgtaaa

SEQ ID NO: 268808 - DNA, 456 bp, Homo Sapiens
  misc_feature (47)..(47): n is a, c, g, or t
taagaaggggcctcctattccacccttgccaagcaccccagcttaantgctgggaactaacccccaaaaaacttgaaatggggacccctgaaaaaagcccaggggttccccctgaaagcccccctaggggcttttctgtcctgcccccagggtgcctccatggatctccctgtggcagcaggcatggagagtcagggctgccttcatggcagtaggctctaagtgggtgaactgccacaggccgagaaaagggtacagcctctaggtggggttcccaaagaacccttcaggctggactgagctgctctcccacagggtttctgtgcagctggattttctctgttgcatacatgcctggcatctgtctccccttgttcctgagtggcccacatggggctctgagcaggctgtatctggattctggcaataaaagtactctggatgctgtaaaaaaat

SEQ ID NO: 268809 - DNA, 429 bp, Homo Sapiens
  misc_feature (61)..(61): n is a, c, g, or t
  misc_feature (80)..(80): n is a, c, g, or t
  misc_feature (225)..(225): n is a, c, g, or t
gccatatttccagccttgtgttaaaaatttaaagaggccttaagtggtttaaaatatgttnacttaaagaagtccacagnagcctaaatgtgtgaatagagcccacaaaaaactggcccaaaaaagaagtaaacaaatccttccattaaattattattattgttctgtttgagcatcttcctcagtggtctccaagtccgatgcctgttatgtactaggatgagntaggctgggccttgatgaactggagagcacgggcccaaactaaagggagcagttgctgctcagctccacttgcttgttgccatgtgaggaagtgggcccagtgtcctaggatcttttgacactttttggaaaagatgctggaaatctggattttaatttattcttatttatttatttaacttttagagacagggtattgaagct

SEQ ID NO: 268810 - DNA, 427 bp, Homo Sapiens
  misc_feature (407)..(407): n is a, c, g, or t
  misc_feature (413)..(413): n is a, c, g, or t
gtcattctgacccggggattcctcacagcgtctggcaggttggtcgtgaggggctggtgccttccagggtgcgagtgtcgggggaactgtatgcggcggcccccctcccggcgcccgttctcccctcttcatcgtttctctctcagactccgctgacctctttccttgctgcctgtgcccggggcccctctccctggtgtcgcatctccttcggcccctgcgctggagccccctacgtcagtcatttcccttcattgccccgccgggtggaaggccgtcctggggaatggggcttgcatccccttctttctggcaaccccaaatgactaaatatggggttcattctgggcgaccacggtggagatctggggcgttgggttccttccccgttgtttcccttttcctgnttcctncctgttgtttccct

SEQ ID NO: 268811 - DNA, 284 bp, Homo Sapiens
ctgggactcttgcgtaaccttcaaacaatcctccctgcctccagtctgcacacggcaggcttccgggatgacctctgaacagaacgcgtccccattcccacacctaccaagcatggcgtttcaaagtgtctccagctctgccctccccagggcccattttctggttcaacaatcatgccaagccaaccgccccatcctcgttccttgccccaaactctgcaggctggggctcatcatgcttgctcctaggtttcaccagccctgtttgccctcactggcagggg

SEQ ID NO: 268812 - DNA, 429 bp, Homo Sapiens
  misc_feature (401)..(401): n is a, c, g, or t
agacaattcctctgtcgggtgtggccaagtggggataaagagaagagcaacatctctaatgaccagctccatgctctgctctgtatctacctggagcacacagagagcattctgaaggccatagaggagattgctggtattggtgtcccagaactgatcaactctcctaaagatgcatcttcctccacattccctacactgaccaggcatacttttgttgttttcttccgtgtgatgatggctgaactagagaagacggtgaaaaaattgagcctggcacagcagcagactcgcagcagatttcatgaagagaaactcctctactgggaacatgggctgttcgagacttcagtatcctcattcaacttggattaaaggtattttgatagttcatcctgttnctggcatgtatgtttggaagggaaggat

SEQ ID NO: 268813 - DNA, 448 bp, Homo Sapiens
  misc_feature (345)..(345): n is a, c, g, or t
  misc_feature (392)..(392): n is a, c, g, or t
  misc_feature (409)..(409): n is a, c, g, or t
  misc_feature (414)..(414): n is a, c, g, or t
atagaatcacagatctgagagttgaaagaccagcactggtcactcgggcccaccctctccagtgccctaggggaacatgccagtgcagttccagtttgcctttgttaatagggccaaaaaaagtctgaggcttggcttccaaggagtattagagttcaacaaattctcattctcaataggcaggcgtgaaacactcttaacccttggctcactccaccagcacatgtgtttgaagccccttagtcttcactaacacactttctaaagaagtagaaggaagttgtgatattcagcactgaagggtggtgaggaaaaaaatggatgggacccaaacaccaatggganggaagattcatgggaaagtatttgactcccagaacattaacaagtgnactgtgctttttccctnttatnatttcccccttatcgccacccccacaggcttctt

SEQ ID NO: 268814 - DNA, 458 bp, Homo Sapiens
  misc_feature (322)..(322): n is a, c, g, or t
  misc_feature (383)..(383): n is a, c, g, or t
  misc_feature (405)..(405): n is a, c, g, or t
  misc_feature (411)..(411): n is a, c, g, or t
attgcttataagcatagcatagtgtagtgattaggaattggaagacctgattttaatgtagttccatcagtaactagctctgatctttagtacattctctctgttgctcctttacctataaacttggaataagttttttccaattatctcatttggttttgaggtaaaatgagactatatatgaaagtgctttgaaaagtacagaagcatcaatttgaagacattgggtggggggtgtttaatgaaattgataaaataccatgacatttgggtgggtgaagttcattgccaaggtctccctttatctctttttcattcaggnatttaaatacttagttattatcttaggagaaagccaaagttaacataacccattaactcantatttgtctttcctttgacctnccgttnacttttgatatataagtaaattttgtgttttgagtttgatagtaagc

SEQ ID NO: 268815 - DNA, 719 bp, Homo Sapiens
ggaaaagtttcaaacttgctatgtatgagggttctcatagagcaaccgattaaaaatctaagcaaatatttgaacattttatctgaactcatcacaatttcaccctgaaataatgtgagaacaatgggaaactgtagcttgctccttcccaccctctctgagcatctttgggatcttgttgctcaaaactcttctgtgacttcatcttccccaccatttgtgcccatctcaagcctcagcaagaaaccatgtggaacatgaagcttaatgacttgacagtgtactagtgttaaactctcatacctctgttacaaagcgagaaacgccacaccccggactggccttttcttcccccttcacggcccctcgcttctccctgcaggagctcgggggcgaaacctgtgtatggatttcagtgtatgacttcagatcatgctccaacttgccaggtgtgagctaatgttgtcggacaccttactataagcaaatgttattcagtgcgttcaatgtatattgacttccatactggtttttccaaaaaccaaaggtagctttgaaaaaccatgtctggaaatgtttggagcgttaagctgattgaccttctgaccttggggctttgagtagtatataattcataactgcgttaattgtattgttaaagtgtttgggagttttttgcgcttgttatgtggaaataaagtgtttgatttaaaatttta

SEQ ID NO: 268816 - DNA, 578 bp, Homo Sapiens
tatctgagtgttcaaaatatttccaagcctgagtattgtctattggtatagatttttagaaatcaataattgattatttatttgcacttattacaatgcctgaaaaagtgcaccacatggatgttaagtagaaattcaagaaagtaagatgtcttcagcaactcagtaaaaccttacgccaccttttggtttgtaaaaggttttttatacatttcaaacaggttgcacaaaagttaaaataatggggtcttttataaatccaaagtactgtgaaaacattttacatattttttaaatcttctgactaatgctaaaacgtaatctaattaaatttcatacagttactgcagtaagcattaggaagtgaatatgatatacaaaatagtttataaagactctatagtttctataatttattttactggcaaatgtcatgcaacaataataaattattgtaaactttgtggcttttggtctgtgatgcttggtctcaaaggaaaaaataagatggtaaatgttgatatttacaaacttttctaaagatgtgtctctaacaataaaagttaattttagagtaa

SEQ ID NO: 268817 - DNA, 422 bp, Homo Sapiens
  misc_feature (17)..(17): n is a, c, g, or t
aacagtccacagatggntaaaaccacaaagaaataaaggcctgtaagtaagagtttatggaatgatccatagccaggaaccacaaaggaaggaaataccatattaacctacctcctaggaggtccttggaaagccttccataaaggagatggtctttagtcctgattcctgggcggttggagcagcagtttgccatcgggtgaaaagaaagcaagggcattccctggcagagggaacagcctgagcaaagccatgcagagaatgaagacctacagaagaaaatgctaatttgaaaaaagatgcataaagcagtctatgttttagtctagtctttttaaacttacagaaatttattactatgtgtgtccatctaacttggcttattttctttatttggggatcaagggaatgccagaatatat

SEQ ID NO: 268818 - DNA, 487 bp, Homo Sapiens
  misc_feature (474)..(474): n is a, c, g, or t
atacaaagaaacatccatattgcaatttctgtttacaattgcacacagaagtacagtgtacgtaagaaatacatgtctgcatataacaaggtatgtacattggcaagtgatgtctccaatgttgaggtggtcgagcctcctagccttgattggcagttgaaaaaaatatatttatttcaatttgtggtaaaagtttattgagagccaagtttgcctgcaagtgaagaaaatgcagcaacgaaggaacagggaacacggggcacataataatattctaaggactttgtgccattaagttaaaaatatctgttcataagaaaattggggttccttttccacctcccacccccaaattgggaattttcagggcttttaaaatttaaggtaattccaccgggtctgaggggttggtccccttggcctttttttcttccaccgttactgtggggggttagtttgggggtggtggccttntaggggttccctt

SEQ ID NO: 268819 - DNA, 416 bp, Homo Sapiens
ggcaacagaccctgtctctgaaaaaagggaaaaagaccttgtgagctgtctacgtgtactctatgtctcaggagactcatatcctgtaatttttctaaatggcgtctccatgtggtctttcatgaatgtttgtctggtattctctatccttttactttcaacttttctttaccttctactgaaattatgtcttttgtaaacagcccatgattatttatttagttatttatttttacccccctgcactatttgtcttgtaattggagtgtctgagtccattatgtttaatgtaattattgacctcattgggtttaagtctgtccattgtcatttgctgccttctaatattatctctttcttgctcaactatttttcttatgttaccttctttagatgaataaaaacctttgcattat

SEQ ID NO: 268820 - DNA, 416 bp, Homo Sapiens
  misc_feature (390)..(390): n is a, c, g, or t
  misc_feature (400)..(400): n is a, c, g, or t
cgtatcagtcatacaactccctatgttgttgtgtatgtgttctgagtacacactgaatttatgagaatgatttatttccggtctggccagctctgaaagagacacatgggggattcggaactttatggcacaggcactggtgcatctgctctctttgtccagtcacacttgggatgcttaattttcctgatattatacatgcaaatcacttacttttcatagaatttaccattcatcaaatgactttcaacaataacaatgggtctgacattctttcatgtcgtactgaggatttcaggatatttattaggagaaactataaggacaggattttcctaatatttttgaagtatggggttcccctggaataggttggggattaaccatccntttaaaaaantagggaaaggggtaac

SEQ ID NO: 268821 - DNA, 349 bp, Homo Sapiens
  misc_feature (88)..(88): n is a, c, g, or t
  misc_feature (240)..(240): n is a, c, g, or t
cccttgaaaatggcctttgccaattggtaattaaattcctgtggcatcggtagttggcaagacctaatcctgcaaaataagaataatncccagaaaagtgaggcaaactagaaacattaacttctattaatttattcatcaagtattttaggatggctaaataatttgataatgtgctgaaagatcattaaggttatatcaaattttagtaacaaataaattatttaaaattatttgccnggattcttaaaaatgacaaaaactaagaaaactaagtcacatatgctggtaaaattcaaatgttgatgtatcctaaaagagaatagtaataaagtcctaacagcaactt

SEQ ID NO: 268822 - DNA, 382 bp, Homo Sapiens
aaaaggctcacatattatttgagtaaacacacttacctttgtactttaggtaaaatgaagtaaaatcaactcagttctcttaaactgtgttcattaagtaaaacacctttattaattatttaaaatccagtcaattctcaaatcccacttagaagacagaatccatctactgctcctcctccctttagctggctttctctgtgggcattaaaatgcttttagggtcagggcaccgtgggctcatgcctggtaatctcaggcactttgggaagggccgagggctgggcggaggatcagggagtttgaggaccagcctggggccaacatggggtggaaacccccatcggcttacttaaaaattaccaaaaatgaggccgggggg

SEQ ID NO: 268823 - DNA, 418 bp, Homo Sapiens
  misc_feature (156)..(157): n is a, c, g, or t
  misc_feature (339)..(339): n is a, c, g, or t
  misc_feature (401)..(401): n is a, c, g, or t
gactctgactattattaggtttaattcattaacctagaataatcaattatttgaaaataagagatccgcaagcttctgggtcaatagctaaatcgcattatctctttgtgggtttagaaaactttaattgaatggaaaacttccatattctatttnnctctgttatgtttctaaatcacaggatttatcctgtctttttctcttaaaactccggaatgaggacaatgttaaggtttaaatgaggaaataaagaacagggactgatgtgttaccttgagtggggtggggattataagggtgaggcagagcaagaggttaggcaacttttactttatacancatccgcattgtttaacttctaatgaggcatatatgtgatttaacattggcttttttaaagnttttaaataaatgggga

SEQ ID NO: 268824 - DNA, 453 bp, Homo Sapiens
  misc_feature (19)..(19): n is a, c, g, or t
  misc_feature (48)..(48): n is a, c, g, or t
  misc_feature (70)..(70): n is a, c, g, or t
cttgcctagaatctgtctncctgcaccccctgccccctttttgtgatnccaagacccccctgtttaaagnactcatggattcccttagaaagtaggttggagaatttaagtgccaataaagcaaaccctagtaaatgacaaatgagttattgaacatgggttagaatctgacgatttgcaggtgattttcccacttagcatgttcttgtgtccatgggagatgcaaccaaggacccttgggagatggctcctgtgactgtgatgttggctggcgaggagtgcattgtgacaatggtaagagtgaggcctccagtatttataatctgctctaagctttgcttctcagcagctacatttttctttctaaaatataaatgacacctttttttacttcttctggcaataaacatgattctttcttgcagcaaaaagtttgtaaaataaagaaaagca

SEQ ID NO: 268825 - DNA, 451 bp, Homo Sapiens
  misc_feature (376)..(376): n is a, c, g, or t
  misc_feature (419)..(419): n is a, c, g, or t
aaaaaaacttgttccccgttgtcccccttgccctcagggcccccccaaactctcctgaccgtgagggccactggtcaagttccgccccccgtggtaggcagacgccgcggggaaattcggaccccaggaagccccagccccggctgtgcccatcttgtgtatgggcagatatgacctgacagccccctccagtgcccacagggtacgcacacgcagagccccgcctgtgcacacgcgtgtcttcgtgcactccccgtgcggtacaggggcacttcgtaacccagggaaagggcggggggcatatttgcaagcgcgctcggtgcgggcaggctcgcattgcacccagggagctggagttgagctgttcctctaaatnaaaacccttcggaaaggagaccaaaaaaagcagaaataatgcnaaaaataataaatgaaatgaactgcgaaataa

SEQ ID NO: 268826 - DNA, 454 bp, Homo Sapiens
gcaaattctcaaaagagtaaagtttatgaaaagaaagtggcaggcaaacacaactcttgactgccctcccaccctcctacctgttcagtactcatctgattcagaagcatcacttcttggataactagcactggaaaaatgaaatcatctgtgtaagtgaagggactcatttttctttgtttcagcccatgtaaataaataatacagtattaacattttcgtgctgcttcccattagcttgtagattgagccatactctggctgcctctttgccttcctaggggcattttctttaacttccagaatagtgattttaaaagtaaaaataaaaataaaccttacttacaagcataacagattgtatttaactttatcacatatgatagagatatatatgctgtaaaatgagggaaaggaactttctaataaaccaatgatttgtggaaacttaaaa

SEQ ID NO: 268827 - DNA, 496 bp, Homo Sapiens
  misc_feature (380)..(380): n is a, c, g, or t
  misc_feature (414)..(414): n is a, c, g, or t
  misc_feature (437)..(437): n is a, c, g, or t
  misc_feature (461)..(461): n is a, c, g, or t
  misc_feature (481)..(481): n is a, c, g, or t
gtttcaacaagactgttcaatatattgatgtgttggtgctactttgtaagcattcaggagattgatgaaggaacaaactttgttataaaaatgagtcacctaaagagagaaaaaagataaatgaatccctactaccactaatttcacagctattttttaaaaggaaaatttctaaaagaatacttctacgatagaaatgatagaacttcttccgttattaaccttgtagccttccatctcggcctaaggatttctatcttctgaatccttaattatttcaggcatggagtgagtagggaagcaggcaatttctagaaaaccaggtaaatatttattttgagtatttaaaaaatccagattttacttacttaccccactanggggaattagggaacttgagtagatggatattangggccatttggtttaggtaggcncataggattttttagccaggtacncctggttaacctggccacanttttaggtaataccg

SEQ ID NO: 268828 - DNA, 479 bp, Homo Sapiens
  misc_feature (394)..(394): n is a, c, g, or t
  misc_feature (406)..(406): n is a, c, g, or t
  misc_feature (436)..(436): n is a, c, g, or t
ggtcaggaaagagcaagaacttatcgtttctgtgaatttgagaattatgataatatttttcatgccagatcaaatcaaaccaccttttatagaaaaggagccaaagcggtgactgtgagctttagtcacgatcattttcctctaagcccatacaaacctttctcagaaactgcacaaaggagatgaactgaaaattatcccagacacaggaagaaggcaaaccctggaaaaggaagcaaatgagctatacctttgatgggctcagctagcccacccaactcattcaagaaagaggggaagtgcataatcagaaataaatgccaatactcacaacgagaagtctgctgaggaagagcagagcaccagagttttcaaatccttgtaggaagggctngttttaaccctntgactggctacccagtctcttagaataatnggcaacagctcgagttcttaacacagcgaatctccctgttggg

SEQ ID NO: 268829 - DNA, 281 bp, Homo Sapiens
aaagaaacacacatgccatatatacacatactaatccctatgtaaatatatgcatacaaaatttacagaaggatatacacaaagctgtggaggttgattcaggaaggatgtaacaaatttactattatatagccttctgtactatagttttgttttcccatatgcatgtacccagttatatattgtccttttaatttaaacatctagtaaaaaataataatttcaatgagaccagaaattactaagcaaaggaaatggcaaggtagttctacttttgttgg

SEQ ID NO: 268830 - DNA, 474 bp, Homo Sapiens
  misc_feature (26)..(26): n is a, c, g, or t
  misc_feature (31)..(31): n is a, c, g, or t
  misc_feature (66)..(66): n is a, c, g, or t
aaaatacggttattgcccttgatggnaaacntccggatacaattaaaaaccccaagtacccaaatnaaattgaccttaagacaaagactaagtaaatcacatgagccctctacaagcagagagtttttctccagctggtagcagaagccagagatttgaagcataggaagtattcaacacattattgctggcctgaaaatggaaggggccacataacgagggaaaccggtggcctctagaagcagggagcagtcccctgctgacagacagcaagccaagacctcagttctacaattgcaagacactcaattctgctaaggacaaaaatgagcttggaagtgaactctgagcttcaggtgagaacacggccaaacaacaccttgatttcagcttaaacaaagaatgcagccactccatgccagaattctgacctgtagaaatttgagctaataaatagatgttttaatagcttaa

SEQ ID NO: 268831 - DNA, 505 bp, Homo Sapiens
  misc_feature (391)..(391): n is a, c, g, or t
  misc_feature (408)..(408): n is a, c, g, or t
  misc_feature (430)..(430): n is a, c, g, or t
actagacgacctccactaccacttaatatgtgtatttctgtagcttcaaattagggcacccactctcatcctctggatcctttcctgggactaagagcctagccaggcttactgaatagtgtcacaaaaggtgaattagaataggactgaagggtacaaggctattgtaggcctagtctgaacattgataaccctacaacctttactaaatcacttaacctcccagtttactcatcagtaaaataaggggattggactaatttatagtgttagtcccttcctgctcgaaaaaagtttgtgattctaaggtcacaggactcttttgggaccccagagagatgttaaaacaaatgggtcatcccttcagtaccatggagagtggcagtggggntaccacaggaaggccantgggggccacctcagtaccatngattagagctatggaggtggctagagggggctggtttgccattttaagcatcggaggttacaacacaggaaaggt

SEQ ID NO: 268832 - DNA, 413 bp, Homo Sapiens
  misc_feature (21)..(21): n is a, c, g, or t
gtaccccatacaacccatttnggtttttactttccagtatagtattccaaaaattacatgagattgtaattattatcctcaccttatttcacattatcaacactttattaaaaaataggctttatgttagatgattttgccccaactgtagactaatgtaaatgttctgagcatgttgaaggtagtgtaaaccaaaaataaaattctaagcacctctcccccaaccccccaactatctcaatggactttctcagccagggcgcttttaaaatgtaacctgagagactgattcaggccataaggggaagtgggtgttggacatgcctcattatacctctctggcattaacgtcaacacagaccttaaagtctaataagaaacatgtaccctaaaacttaaagtataataataat

SEQ ID NO: 268833 - DNA, 187 bp, Homo Sapiens
  misc_feature (154)..(154): n is a, c, g, or t
tgacacatgtgcccagcctgggaatgttttaacaagttaaatgttcaacacatttgaagtaaaaaataacatttcaggaacattaaaaactcataaacttataaaaatacaagtgttaaggcatacattgccattctaatataaattagggggnaaaaagtggaaacctttttaaaggggaaccctt

SEQ ID NO: 268834 - DNA, 378 bp, Homo Sapiens
  misc_feature (45)..(100): n is a, c, g, or t
agggtgggggaatatgggaaatctgctcagtgttgctgtgaaccnnnnnnnnnnnnnnnnnnnnnnnnnnnnnnnnnnnnnnnnnnnnnnnnnnnnnnnntgctcacagctcagttgtgatactagtaatgcaatttttatgcaaaattatgcttttgaagaaatcagaattctccaattttttggtgattatttaaattttcctcatttttatatggtttcccttaaaatgtttcacttttttccccatttatattaggatgggcatgtatgcttaacacttgtatttttataagtttatgagtttttaatgttctgaaatgttattttttacttcaaatgtgttgaacatttaacttgttaaaacattccaggctg

SEQ ID NO: 268835 - DNA, 555 bp, Homo Sapiens
  misc_feature (384)..(406): n is a, c, g, or t
agcctccgatggggagattgaaactaaactaattaaggtaaaaaactaattttcacaggagaaaaaaatatatttaaaaattcaacaaaagtccatttgtcctgctactcctttggtgacacacaggtagtgtcaactggaacatcagtaggtatttgatataacctttttgttagcagaaaattagtcactgcttaggttttaagtcctgcccaaactgggacctaagtatgcctttaaataggtatagattccttcggtttccttagaattcctagatcccatgatgtactttaattttttaatgactgtatatttagttttaaccactacttaaagtaatctaagcaaagaattcctattgctctccatcagttcaagatnnnnnnnnnnnnnnnnnnnnnnncgaaacctatgttaaaatttgacccgtcaaaattactcagtattgagctgcctaaagccgttttccagaaagagacttgcctgactatagaagaattcccgctttgatcatgagggtcagtgaataatcaggaaagtaaaagataaatc

SEQ ID NO: 268836 - DNA, 438 bp, Homo Sapiens
  misc_feature (36)..(36): n is a, c, g, or t
  misc_feature (50)..(50): n is a, c, g, or t
  misc_feature (61)..(61): n is a, c, g, or t
  misc_feature (99)..(99): n is a, c, g, or t
attaacgggcatgagcccaagaagcccgggcccaangtcccatagttttnatacaaatatntttacttcactttgtccttagacacctttcccatatcnaatttcctattagttctccttcattctttttacagtttccgagttcaatttattattatctgttgaaaaagccttttgttgttagttgctagaatatttaatttaattacatcacatttacttccaaaaaaaatgtaggagctaaaaactcactggaaagcaactattaataagttggaaacttgtgcactactatatgtaggttatttagttaaaccactccccaaaatgctttaagaaattctgcccctgcccccgcagcactattccttaaaggaaacattgttcttttaattgtggaatcttaagtagaaaactttcaagtaagacaatgatttc

SEQ ID NO: 268837 - DNA, 409 bp, Homo Sapiens
gatgtgaaggaaaaatacagaccaagaatatatcttcagaaaattctaatctgtgctgggtagttaggggaaggctaagaggtttgagataatctctgagcaggtacaggagacaaagaaatggatagggatggattggtatggaaaggtattgcaggccaacagcattatgtaaatcttggtcaagagccagcataatggatttgaggaagtggaaagaagggaggttagtgtggcaggaggactgcctggggagccaggtctcagaagaggctagagagtgaggtaagggttttactcgaacttcatgtcctgggctagagactcatgtttaattccaagccaaacagttttccagattccatgccagttttctacttcacctgttttttttgttaactgtgggttt

SEQ ID NO: 268838 - DNA, 469 bp, Homo Sapiens
  misc_feature (411)..(411): n is a, c, g, or t
  misc_feature (421)..(421): n is a, c, g, or t
aattaagacaatagtatctctttatagaatctcccatagagtcaaaaaagactataagtgagagtgctttgtaaactatagagcattatataatttaattataagtatttctataaagattacagagtattttgatgcccattttattcttagcttagctcctataacccctctgaatcgtccattgccccacagttccttgcttgccttcaacaaactcaaataggacattttttaaatgatttgtcctcttaactctaagcgaactaaattatgcctgtgtattattgggctggggcaattgagttacctgaccatttccatggaagtcacagtgctaacctaatggcaatgtgacaggctttttcctgtaggcacattcttaaaaatttggattattctggggtaggnaaatttttcnttgagggggcttcaccggggttgcaccggggctgttttggtatcccgt

SEQ ID NO: 268839 - DNA, 424 bp, Homo Sapiens
  misc_feature (406)..(406): n is a, c, g, or t
gtcttgttaacattaatatctgtagaaacatttttattgtcagtataaaaattaacaggttttattaaatactttctccaattttgtaacacataagatcagtgtaatctgcattcatcttgcacggctattgcaaagtgagtgggtgtttccaaagcaaaacacaatactttagtacagaaggaacaacggcgatattttgtctgatgtaggtatgaggctggatcttttgggtgaggtcctgccagaattagatgaaagcaatcccttaaaaagatgggacgtatccccaaaactatcaggcaggaacaactctgtggttccaatttttctatggatgggggacttgaaggatcccaaacagggcgtctcccaacggccaaaggggtctgggaggccctttatncaaaattccactggaagg

SEQ ID NO: 268840 - DNA, 449 bp, Homo Sapiens
  misc_feature (37)..(37): n is a, c, g, or t
  misc_feature (58)..(58): n is a, c, g, or t
  misc_feature (88)..(88): n is a, c, g, or t
  misc_feature (100)..(100): n is a, c, g, or t
  misc_feature (105)..(105): n is a, c, g, or t
  misc_feature (198)..(198): n is a, c, g, or t
gggcggtcggcggctaggccacaccccacataccttngggaaaaatccccccacaaanggcgctgaaaccccgggaaaaaggcatccngctcaataccangtaangcaataatttactcaattaactaaaaagagagcaggcaaaattcaattcaaaagagaacccaaaacattgatgtagaaatataaaagttaaanttttttgttactggttatcatttatcaaagtttatcttattattatttccatcctagtttaacccctacttaatgcttttaactacctgtgcaggtcaattgtaccttaatgaaactaatgtttcctcaaacacgggtgagatatgctacgtgaaaaatactacattctagatgtttctgccttcctaccctaacccgtatctaataccacatagcagagagatagacaagctgctcttttatgacaacat

SEQ ID NO: 268841 - DNA, 436 bp, Homo Sapiens
  misc_feature (16)..(16): n is a, c, g, or t
  misc_feature (72)..(72): n is a, c, g, or t
cggaacaattagtgancctgaacagtaagtaagtcttacgttgtagaacatgtttccccagtcctgaggtgnttgaatatgatccctccacaaaaaaatattactttaaataagaataaaataataccaggtcttccaattagtaatccacaatgcatgtttttaaagactctgagaaaactttcaaaagaatttgcttataagtctaaatagaacaagtagggataggagtaagagaaaaccttactcttttgcaccaattgcaatttgtgacagttttcatagtgataggagaaaggtagagatggggaggagtctgccgtaaagatatatatttaactttattttactcattgttttccaagattatttgaccatagaattcttttttaaatcaaacttagtaacatacaaagggatgctagtattcccaaaa

SEQ ID NO: 268842 - DNA, 191 bp, Homo Sapiens
acctcagttgcaacttacgcttggcatcttcagaatgcttttctagcattaagagatgtaaatgataaaggaattattgtatgaaatattacaaagcgtagactatgcattgttattcattataatattttttgctgtcataatcgcctcataaagacaggtttcaaccattaaaatatgttcttccttaa

SEQ ID NO: 268843 - DNA, 367 bp, Homo Sapiens
ataaaccaccgcgcctggccctttgtttcttaaagagtaccttaagcctaaaaaagtgctaatctctcttgcctctttcataagcagaaagctagccattttaagattacactatcattttggagacttctgagaagactccaaagaggctatcaaaactgaagccagcagcccttgggattacttctgccaatccaactgtatgctgccaagaccatccaggctaaggcgacacgcactatgccaattccaggctcttggctctgctttcactaggctgccaattccttcttccctactgtttgaggcatttctcgaaagggcgcgtttcccgtcatttattaaactcggagttttgccagttaag

SEQ ID NO: 268844 - DNA, 342 bp, Homo Sapiens
  misc_feature (51)..(51): n is a, c, g, or t
ttttaagaatgaggggtgggcccctccacaatacaaaagtggggtgggtcnagagaaatgaagagtttcaaagacatctgtctcccctccacagctgcattcacaacagccttaagcataaagaacccaaagctcacaacccttttcccttagaaacagggatgttatgactttcaaaaaaggcccttaatagagacctctctaattaggagttgataacatactgaaatgtttcttaatttaacaaatcaaagataaaataatgcattggaataattagaggaaaaagtccaactgttttgagcacttaagaaacatcaacatccataaaactcatctact

SEQ ID NO: 268845 - DNA, 510 bp, Homo Sapiens
  misc_feature (178)..(187): n is a, c, g, or t
ggagttcacactgtgtgccccggacccggcaagtttgacagcaccccaaactggcccagactgttctgtaggttaagtccattgatcatgtacttggatatcacagcaacattgaaatgctaaaaagtttttaaacactctcaaatttctaattcaccatgtcacagactggtgaacnnnnnnnnnngttgttcactgaccagcacaagtctgcagatcatctttgagtagcactgttttggggccctcggtctctctgaagaccctagcagaactgatacctacctgtatctcttgttctctcctatttgagtttcacttccagagaacttgttcttcagcaagaatgtgtcactagtaaggacatctctagcatttctctagccttccttttctgctgctcaaaaataatcgttacaaagcttaggtttaagctgtatatgaaatatttatgcgactctcaaactttaaaggagttgctcctttgttccaaaattaaatgtgttagat

SEQ ID NO: 268846 - DNA, 1039 bp, Homo Sapiens
  misc_feature (43)..(43): n is a, c, g, or t
cacccagtctgtgacatggtgaaatagaaattgagagtgtttnaaaaactttttaggcatttccaatgttgctgtgatatccaagtaccatgatcaatggacttaaccctacagaacagtctggccagtttgggtgctgtcaaaccttccgggtcggcaagcacacagtgtgaactccatacctgtcatggccaataggaatgcatattgataagtgaaggactggaaaacaaaaaacctggtcctttaccatacatagtttgagaaagactgccctagagtaccataactccaccacaagtcctggaataattccaaaagtttttggaacaaagtgtgacctgaggtcaacctgctcacattcaatcaaaatcaaaataaaaatgagtgccttgggaacaaagataaagtggactagggcatctatttagattcctggagtaagccctggctaggctagcagaagtgagaatctgtaaaagaaaactggtaggacagaaggcacaaggttcatagagaagggctcttttgttcttccctcctcctctctatccttgtccagtttttggctggagctttaaggagaaaatagtgacactgaagccccatgactatatcacaagtatacctgtattttttccatctctggcagaacagagacgttttacattcagatctgggctcttccatgctctggtaaggtataggagttggaatttcccaaatagcctgagaccttgagaacatttccttcctcaccaataccataaaacatgtaaggtcttcaaggggtgaaaacttttaacctcggggcaagtgacatgtcagaagctcaaagcgactcataatgcatgtgaatttgctttggagagacttatcttctgagtgaaccaggacagccagctgagctgaccagagtacctaccaacatatgtcagccaaggtccgtagacccactgggagccacagaaaaaaagccacgtcagcttaaagaaaaataatttagaaaacataacaatatattactaacattaataac

SEQ ID NO: 268847 - DNA, 596 bp, Homo Sapiens
  misc_feature (29)..(29): n is a, c, g, or t
  misc_feature (41)..(41): n is a, c, g, or t
  misc_feature (50)..(50): n is a, c, g, or t
  misc_feature (58)..(58): n is a, c, g, or t
  misc_feature (67)..(67): n is a, c, g, or t
  misc_feature (81)..(81): n is a, c, g, or t
  misc_feature (89)..(89): n is a, c, g, or t
  misc_feature (201)..(201): n is a, c, g, or t
  misc_feature (585)..(585): n is a, c, g, or t
accaaggggcttaaaaaagccttcccttnaaaaaatacagnaacagcccnaaatcaanagcaacttnccccaatccaaacnccccggcnccttccaaaaggttcgaaaatccggaatcccaaagaaaggtgccggaaccacccaataatggtgtccttgaaatccctcctcaaggctggggcatggttccctcctagggantcaaacatccatcaaaggtcacttctcaaactcacccaatcatccaggggagattctgaaccctgctgtagatgcctgtctccgttctcattggcaggactactctccgacccattactgcttcctgattgctctttttcattcaacaaagctgtggcatacgctaacgtgtcctgagctgaaatggttcgctgaaaggtttttccagttgatgtttcattagagacattactctgtggtgtccagtaatgttctgacatcttcttctgtagccactgcacagcccagctccagtggtgggaattctccttgaagtactccttagctgcaggacacttttgagcaagagtgacaagaaatttgacacactggtagcagcgactnctgtgccgaat

SEQ ID NO: 268848 - DNA, 713 bp, Homo Sapiens
gttgagggggttctggtgactgtgatgaaggcctcactctcaggcctccggtcccactgaaggtcagatgaaaggtagtcttccctggcggttgctgctgccactgaatgggccctaactttgtcgtcttgtgtttgaatcttctgcaggacacgttagcgtatgccacagctttgttgaatgaaaaagagcaatcaggaagcagtaatgggtcggagagtagtcctgccaatgagaacggagacaggcatctacagcaggtataacggtcagcatgtccttgtgtgcaaagggcagccttgctcttaagctttccaaaaagaatttccacagctgagggaaaacaagatgcttcctctggaatgtgagtccaaagagttaccagcgctgccctctagtgatctcagctcagcatatgcactaaccgtgtgtttacagggctgagtagtgctgcagtgtgaagtgaatggaaggcctcgaggtgtttgtggctggccaccctgatcagcctgcaggtagtcccgatgaagccagggcacagggggattcgttccagcttgttcactttattctgccttgccaggttactgaaagtccctcgtttgctctcaccagccttcctggaaatgtggactcttgaaagaaaagctcccgtgctcttgaagtatacctgcttgccaggggagtccaagaaaattttgacatgtattttt

SEQ ID NO: 268849 - DNA, 486 bp, Homo Sapiens
  misc_feature (16)..(16): n is a, c, g, or t
  misc_feature (42)..(42): n is a, c, g, or t
  misc_feature (45)..(45): n is a, c, g, or t
  misc_feature (72)..(72): n is a, c, g, or t
gggaacaagcctgagngggctgcccctaaaagggaaggcccnggnactcctgaaaaaacctcaaatacattnaaaggaaccttgtgtaatacccatagatataaacatattatgcattgctttgtataatgcacctcttgcagaatgactatcagatattttccagtgtttaagagtttcttccttctctgaaatgtggaaggcttatcatggcctaagtaaccttccagccaatgagaggtaggaaattattacatatcctgagccataattattccaactgcaaattttataaaacaaaagtaaatatcttctggtatgtgaggttttagctgcaacaaggctctcctccagtgccgtgccacctggatggtatagcttaggatctgtgcagacaagagaatgtcaagtttctctccagcccagctcaaatggacaaagaggtcattttatattttatcacctaagaatttgatttgaaaagag

SEQ ID NO: 268850 - DNA, 595 bp, Homo Sapiens
  misc_feature (191)..(191): n is a, c, g, or t
ctgtttgaaaatatttccaatgagaagaaaacaaaaaataatcccctgacactgtattgtaaaaaaaagtctgtgcctattttccttttatcttccctaggcgcagagatcttatcagaatgtttttgggtcaaggtttccctttggaaactttacagggtgatgtgtcctcagccacctttcggttttcntcccggtcccgggtttcaagtactgtctggggaataaatccaagatatccaactgtggctgtgtatgcctaaaatctctaagtaaatttcagctccctggccctggaatggaactctgggtatctgggaatgggagacagaggacaatctgaggttggagtgtagcctctcaagggagcaggtggatgccctggggctgagaggaatctcctggtatacccttcctttggaaagctaaccctttgaggcattaagattgtgttcactcaacccgacttccatttctcagaggtacattgctggtcagccaatcagatgctggtattgagaggaaaactcagaaataatttctgccccctggattctctaagatttgtgaaagaaaaaatagtattccagaagac

SEQ ID NO: 268851 - DNA, 625 bp, Homo Sapiens
acaaagcattggctcggcattttaaaaaagatttgttttctgtttgtaaagatttcccaagagaagaaagcaaagaataatcccctgacactgtattgtaaaaaatgttctgtgcctcctttccttttattgcctctagccacagaaaccttatcagaatatttttgggtcagggtttccctttggaaactttataaggtaatgtgtcctcagccacccttcagttttttccctggttctggggtttcagtactgtctggggataaatcaagatatccactgtggctgtgtatgctacaatgtctaagtaaatttcagctcctggcctggaatgaaacttcgcatatctggggaatgggagacaggacagcctgaagttggagtgtagcctctcaagggagcaggtggatgccctgaggctgagaggagtctcctggggtactcttcctttgaaaagcaaacccttagagaagttaagattgtcttcaagcaacccgggttccatttctcgaagacacattgctggtcagccaatcagatggtggtaatgagggaaaaacaaataattactgccacctggattctccaagaattatgaaagagaaaatagtatcccaaaagacaa

SEQ ID NO: 268852 - DNA, 507 bp, Homo Sapiens
  misc_feature (381)..(394): n is a, c, g, or t
ggcacgagctggggttggttgaagacaatcttaacttctcaaagggtttgcttttcaaaggaagagtacacccaggatattcctctcagccccagggcattcacctgctcccttgagaggctacactccaacctcaggttgtcctctgtctcccattcccagataaccagagttcattccaggccaggagctgaaatttaccagagattctagcatacacagccacagtggatattttgatttatcctcagaaagtactgaaacccaggaccaaggaaaaaactgaagagtgactaaggacacattaccttataaagtttccaaagggaaaccttgacccaaaaatattctgataagatctctgtacctagggaagatttnnnnnnnnnnnnnnggcacagagattttttacaatacagcatcaggggatgagtctttggtttcttctcatgggaaatatttacaaacagataacaaatcttttttaaaatgccatccatgctttgt

SEQ ID NO: 268853 - DNA, 504 bp, Homo Sapiens
  misc_feature (27)..(27): n is a, c, g, or t
  misc_feature (36)..(36): n is a, c, g, or t
  misc_feature (53)..(53): n is a, c, g, or t
  misc_feature (63)..(63): n is a, c, g, or t
  misc_feature (90)..(90): n is a, c, g, or t
  misc_feature (103)..(401): n is a, c, g, or t
tccaatgatctccctactgcaggatanagaagcagnaaagcccagtggtatcnattccagagnctaaaaggccctcagaacaaaggtggnggtgggaggcgannnnnnnnnnnnnnnnnnnnnnnnnnnnnnnnnnnnnnnnnnnnnnnnnnnnnnnnnnnnnnnnnnnnnnnnnnnnnnnnnnnnnnnnnnnnnnnnnnnnnnnnnnnnnnnnnnnnnnnnnnnnnnnnnnnnnnnnnnnnnnnnnnnnnnnnnnnnnnnnnnnnnnnnnnnnnnnnnnnnnnnnnnnnnnnnnnnnnnnnnnnnnnnnnnnnnnnnnnnnnnnnnnnnnnnnnnnnnnnnnnnnnnnnnnnnnnnnnnnnnnnnnnnnnnnnnnnnnnnnnnnnnnnnnnnnnnnnnnnttatgccacaggaaacctagaacagaatcataattaattacattgtgcctattagagagaaggtcttgactgccacaagatcattctttaacctttctcccag

SEQ ID NO: 268854 - DNA, 644 bp, Homo Sapiens
  misc_feature (26)..(26): n is a, c, g, or t
  misc_feature (52)..(52): n is a, c, g, or t
  misc_feature (65)..(65): n is a, c, g, or t
  misc_feature (211)..(211): n is a, c, g, or t
  misc_feature (372)..(372): n is a, c, g, or t
acgggatttcaccatgttaaccaggntggtctcaatctgctgacctcgtganccgcccgcctggnctcccacagtgctgggattacaggtgtgagccaccacacccggccgaggtgttttaatttttctttctttcttacataggtttttaaattagttttgacaagttcacaaaagaatcttgttgatatctttatttgcattaaattcnaatatatcagtttgggggagaacttatatctatatgatgatgtcttcctatccaggaaacttcatctctctctctcttcattgtttagatctccttaatgcttttcagtaacatttctaattgtctttataagagtcttgcatatctttggtgtgtttatntcctaagtgtccttgtattgtttttttaactcttggaagtaatatatcttttaagtgacattttcccgtgttggtggtatgtagagatacacttgatttttgtatagtaatcttagaagatctacttactagattctaattaaagctgataatttactatgaatctttgttatctgtgaagataatctaatcatctgcaaatagtggtagttctaattctttctaatccttacaccttttgtttttctcattttattttgtcagaacttcca

SEQ ID NO: 268855 - DNA, 489 bp, Homo Sapiens
  misc_feature (74)..(74): n is a, c, g, or t
agaatagttccactgaggttttaaagccaagccaacatcgttatttttcccaagggtttaatttagtgagaggnccagccattagtgtgaagtggcaatgcttttgcccctatcgtggaatttacacatcagaatgtgcaggatccaagtctgaaagtgttgcccacccgtcacacaacatgggctttgtttgcttattccatgaagcagcagctatagaccttaccatggaaacatgaagagaccctgcacccctttccttaaggattgctgcaagagttacctgttgagcaggattgactggtgatgtttcattctgaccttgtcccaagctctccatctctagatctggggactgactgttgagctgatggggaaagaaaagctctcacacaaaccggaagccaaatgtcccctatctcttgaatgatcaagtcacttttgacaacatccaggtgaatataaaaacttaataaagctgtggaaagg

SEQ ID NO: 268856 - DNA, 432 bp, Homo Sapiens
  misc_feature (365)..(365): n is a, c, g, or t
  misc_feature (411)..(411): n is a, c, g, or t
  misc_feature (416)..(416): n is a, c, g, or t
aaattgctacatgcaaactatgtggctctgatattagacactgcagctccagattataaatgactctttgaagtggttggcatgaacctattctcaagaaacaataactaaatgaacttaaaaaatccagctcctatttaaacctgagatctagaccctggacccacagtgacgccacacaggcactctgtggttcagcctgaaacaccaccacatcttaccacatcttccctgcaacagtgttcacctctatactctactcaacaacattcccatacctatctgtgtcacacagagtacaaagcatttttgcatctagttgttactttctctttgcctcctcttaatcaaattgacagaaactnaaagcacattccaaaggcatcaagcagagctggctaaaattgaaanggggncagtgggagaagcatg

SEQ ID NO: 268857 - DNA, 449 bp, Homo Sapiens
  misc_feature (31)..(31): n is a, c, g, or t
aatatgtccagatagggtgggcagcaggaanccaaggacatcccatgcgggcccggtatggtggagcatggggaggcttgtgcaggggaatgtggaagatcccgttagatggatgcaatggagctggttagtgagagtctgtgttaatggacttcatcctccagactacatcaagtctaaatcctctgaaagaatttaacgtgcactacatttggtgccactcacagaattttgagcagggctgacttatctaaaattagaatgcaagtagattgaactaaatttctaagaaatcagttaggaagacgcaaaagtagaaaactatagtattctagtaacaaataatccaggactggacttgaagggaaggagtcagggtaaagaagtagtgtagaaaatgttttgaaaatcccaagattccacatgtattccagaacttgaagtataat

SEQ ID NO: 268858 - DNA, 495 bp, Homo Sapiens
  misc_feature (12)..(12): n is a, c, g, or t
  misc_feature (37)..(37): n is a, c, g, or t
  misc_feature (54)..(54): n is a, c, g, or t
  misc_feature (59)..(59): n is a, c, g, or t
  misc_feature (136)..(136): n is a, c, g, or t
gaggccaccccngatatgtccagatagggtggcccancaggagccagggaccanccccngcgggcccccggtatggtggagccatggggagggccctgtgccaggggaatggtgggaaagatcccccccgtagatnggatgccaatgggagcctggttaggtgagagtcctgtgttaaatgggaccttcatccctcccagacctacatcaagtcctaaatccctctgaaagaatttaaccgtgcacctacatttggtgcccactcacagaattttgagcagggctgaccttatcctaaaattagaatgcaagtagattgaactaaatttctaagaaatcagttaggaagacgcaaaagtagaaaactatagtattctagtaacaaataatccaggactggacttgaagggaaggagtcagggtaaagaagtagtgtagaaaatgttttgaaaatcccaagattccacatgtattccagaacttgaagtataataa

SEQ ID NO: 268859 - DNA, 878 bp, Homo Sapiens
gcttacgtctaccgcctaccagtgcgtcccccgcggactgtcattccccgaggcttgcttgactgttcagcttctctctcccgcttgtcccagagatccaactccattcttccggtcttgtcatttcagaaacctcgcaagaagctcgcccttgtcgtctcccagcggccttcttagctcccagcttgtttgatgggggtgcctctttttctttccagggtatagctgtccagcgacaccatcatgcattcatttctccaacaaacattttcatgggctcttgctctatactggggatgtagtggtaaatgaaatggacgaggccctgccctcgtggaacttacagtctggcaaaggaaacagacaataaaattctcagttgtctaaggaggcagagatgcatggggagaggatcagagtagggatgcggaacagcgaagtggtcaggagtgtgcgtgccaaaaggcaggagacctgtgggacgtgggggcagctggggccggaacttgcgctggaggaacaccccttgcctgctggggcgagaagaggaccctttccttgggtgaaattcccccatattgttaaaaggacaattaaagaaatgaaagagaggtcaccctgggtgaataggcaacttagatgggcctccctgtgttcctgtcatgcctccaattctgcgtcccaggtgtccggaacacatttttttctgcctttgaaaccttccagtacctctggcagagatataccataccctccttgttacctgcgtgcggaatcttaactcatcgttgtgctacatctgcaccttctgcctttgtgccttgttttgtgttttccctctccggggagaatataataaacttagctgagtccgttct

SEQ ID NO: 268860 - DNA, 478 bp, Homo Sapiens
  misc_feature (40)..(40): n is a, c, g, or t
  misc_feature (65)..(65): n is a, c, g, or t
  misc_feature (85)..(85): n is a, c, g, or t
  misc_feature (91)..(91): n is a, c, g, or t
aacccaacccgtggggaactgtgagcccattaaccccctnccctttaaaaaattccccgggcctngggtatacctttattagccngaatgngaacagacctaatacatgtggtttaccaataacataataacccttaattatgattgatagcatatactcagacattagaatggtagacatcctatatgattttaaaacaccatattaatattattccattaaaatataaccctatggaagattaaacatcactttggcaatcctctgtaacctaaacatgtcaaataatcctgtttaccctctctcttggatgctctaggggtcctctagcatccaaaagctaggggtcaggaaagacaatttttgaagctgaagtttgattttgggaaatatgttaaatatatatgttagaggttcaaaagcatgtgatattatggaatagaattccagattaccgtaagttcttttgccaaaatg

SEQ ID NO: 268861 - DNA, 657 bp, Homo Sapiens
  misc_feature (28)..(28): n is a, c, g, or t
  misc_feature (116)..(116): n is a, c, g, or t
  misc_feature (132)..(132): n is a, c, g, or t
  misc_feature (218)..(218): n is a, c, g, or t
  misc_feature (363)..(363): n is a, c, g, or t
tgatttatgacatccctccttgggtggnattgagaactgtattgactgcatgagcacatatattcccttataaaactcctttggctttagcacatattgccctactgtagaaaatncccctaccccacaganccagcctgggaatggaatgtgtgtctgccttctcccaaggcatcatatggctttcttaaatggatggccaaacaggagagagaaangggttcttaaaagagtaacaactgaaaccagttcctgagattcttctttcagcccagctcagcctcctatccacaggactcaagactctcagttcttctagacaaagtccaatattgttcttttaataaagccaaagatttatgnaaaggtgtccaggtctttaaaacctatacaagcacaaagtacaaaggagaaaggtgtagctgggaaaaactcatgaaagagacagtatctgccgaagtccttgaggcaaaggatattgaatacctccaaaagaaaggcttcagtaaaagccaaggaagcttcacactcgtcaagactggccctggcagacagggaaggatggccttgaacactgcgatggaggaaaatgctccctggacgatttttttcctcactccagccagcatatttcagctgcttttgctctgtgccgaa

SEQ ID NO: 268862 - DNA, 474 bp, Homo Sapiens
gaatattttccaatcccgcagttggctaaatgccagaaagtgtggaaccccacagatacagagagcccaactgtacgtgttatccccttccctaactttattcccattgcccgagagaaactcagactggttattcctattcactgacaaaattatttctcttttattttcttcttcagagaatagcttttaactcttggggctagattccattcaattcaataaacaagcagtaagtgccaactatgtgtccactaggtggtgggaagagaatgagataagaaataaaacatctttagatataaactgaaataatggtagtgaatgaataagaggcctgggggcatttttaggggggcttggcagggagctctgtttcttttgaagagctcttactttgttcagtagttaatttaaatatcctttgttcaatatgtgactttagttcaaaattctatgtgagaggccttttcg

SEQ ID NO: 268863 - DNA, 537 bp, Homo Sapiens
  misc_feature (415)..(415): n is a, c, g, or t
  misc_feature (430)..(430): n is a, c, g, or t
  misc_feature (458)..(458): n is a, c, g, or t
  misc_feature (473)..(473): n is a, c, g, or t
  misc_feature (482)..(482): n is a, c, g, or t
  misc_feature (515)..(515): n is a, c, g, or t
ataaacttcccaaatgtctgcaaaaacataaaaagctagttatgggtttttctgtaattttcaaataatttcttacagctaactttttcctttcgagggtttgtttcctttctcattctacagcccagtggccatgggctctttgggttcactgggccattcatgggccattggattcgctgtaacacctacatgtccttctccattttctttagctgatgactgggagaatatattagttttcttatgactcaccctttttttgatctcctgttctattgtcctactgtccccagtatattttagataaagcataaggaatggatatagaaaaggaacaccaaaatggaggattagggattggattctgattccaacttttctagtagttggaacatgtctttgggacatcagnttttttttatgtgtncaatgagggaagttaaccgggtaaaatnccttaaacacccttnattctcaanttcagtcattgttttatttctttcatggtatcnctatgcatttcaaaataattgg

SEQ ID NO: 268864 - DNA, 497 bp, Homo Sapiens
  misc_feature (23)..(23): n is a, c, g, or t
  misc_feature (31)..(31): n is a, c, g, or t
  misc_feature (63)..(63): n is a, c, g, or t
  misc_feature (84)..(179): n is a, c, g, or t
caaatttaataaaacccatcagnatctcgtnagacttactactatgagaaacagtaatagggnaaaattggccccccatgaatnnnnnnnnnnnnnnnnnnnnnnnnnnnnnnnnnnnnnnnnnnnnnnnnnnnnnnnnnnnnnnnnnnnnnnnnnnnnnnnnnnnnnnnnnnnnnnnntgctacagaaataaacaaatttctttgtcccatagtgtttttgaggtaactaccctggacattttgctattcacagacaattgttgtctagctttgatccttttcaaaagatggcttataatcagatatagtactttgacaggtgctcttaaaggcaggtttctgatatctttggagattgggacactggaatagagagaaacatacaggactcatgaagagctgaaaggttcatgaatatcaagtagaacaagagttaacagaatggactgaactaacagaaaactgaagtaatctttttaacctttctgtgccgaa

SEQ ID NO: 268865 - DNA, 394 bp, Homo Sapiens
ctgaacatgatgcaaaagccatcactctctgaactgtgatagcattttcccaagcccacacataaatctggtagtaaaaggtaaaaaccctaattgtcctaagggggtttatgcacccatctgtaactaataagcagcttaggcaactcatgggcaaccctaggtagcccaggctaaaagaaaagatgaaaaatagatctgagtagtgatatgagacactgcacactacaggggaaacagactttacagaattagctcagccaagtcacgaaacagataatcagccaaccaaccaacaacaatgccctggggggacacatattcagaactgctataatatattgtctaaaatattcagccaacaaaaaattgaaacataaacaaacaaacaaac

SEQ ID NO: 268866 - DNA, 446 bp, Homo Sapiens
cctagtcttatggaaagcaaatatacaatgattttcagtaggcttctggaatagaaacagtggtttgaagaccccactgccacctttatggactggcccctttgagtctgaatccccggcctctgtcacctgagacccaacccctagctgggccaactccagtgaatccacccatttttcttcttcagaaggcctttcctgtgtgagacccacatattttaaccttttgctcctatcccatttttaaagaattagagaataaaccagggcctgtttcttttcccctgaaatccctgcctctggcttcctaaacccatcatctaagggtgacagagcagtgctgggaataggcatctcctttcactttcccaaaactgccacagatagctgccactggcatgctctttgattcctggaagcaaacgtgggactgtcggaggaaaggg

SEQ ID NO: 268867 - DNA, 481 bp, Homo Sapiens
caataaataggcagtcacacgagcaggaatataatcccccctctccatccagagcttcaccatgctctgagcagtttgcagtcacatgccagtgactggctatctgctggttgttgaacctattctgtacaagagaaaacagatgtctgctcttactgccaagtccccgttcttgcattttaggaaccattccacacgcacggggaggtttttgttaatttctttcggatgatgactgagtgctttacgctgtgcaggacttccgatcctggcttttctactcacgtgaacgttagtagctgtttatcactctgacggccaatgtgagatctagttttctacttgttatggaagcccttgaacccttccatgcctagggacaaaggaggcctgttgaccctatttttatgtttggtcacctataattgaaagaataagtgtttttttcacacatagcattgtaaataataaaccagttatg

SEQ ID NO: 268868 - DNA, 473 bp, Homo Sapiens
  misc_feature (27)..(27): n is a, c, g, or t
ctgccccaccctgccccctccacttcntgccctctgttccatcttcccccttcccaaaggccacagcctttattccaggcccagggatgtaggagggggaaggaggaaacaggaagcccagagagggcaaagggcctacctcggggcgcgaaccatgccccagactattatctcagggctttctgggcactgcacttcagcgtggcccacctgcccatgccctgaggccagttggcgaggggtggctcctgagggtttttataccctttgtttgctaatgtttaattttgcatcataatttctacattgtccctgagtgtcagaactataatttattccatttctctctgtgtctgtgccaagaaacgcaggctctgggcctgccccttgcccaggaggccttgccagcctgtgtgcttgtgggaacaccttgtacctgagcttacaggtaccaataaagaggctttattttt

SEQ ID NO: 268869 - DNA, 330 bp, Homo Sapiens
gtgtgagccaccgcgtctggccccacattttctttattcagtcatctattgatgaacacttaggttgcttccaaatcttggctattgtgaacagtgctgcaacaaacatgggagtgcagatatctctttgatatactggtttctcttcttttggggtatatacccagcagtggggattgctgggatcatatgggtaactctgtttttaggttttttgagggaacctccaaacaggaataggtttatttcctaattaaaaatacaggaccatattaccaagggtaggttatggtttaaggcttccctacaggtttttcaccctacctaata

SEQ ID NO: 268870 - DNA, 235 bp, Homo Sapiens
  misc_feature (84)..(84): n is a, c, g, or t
  misc_feature (159)..(159): n is a, c, g, or t
  misc_feature (215)..(215): n is a, c, g, or t
  misc_feature (220)..(220): n is a, c, g, or t
taatgcctcagcctcctaaagctctgggactacaggcatgagctatcatgcccagccagtactaaataatttttaacaaaagantaaatcattattttttatataaggtttctgtaaggggggctacaggatttattatacttttctgacatccaaagntttcaaatttggttatatttttccggatatatgaagggcccaaaaatactttttantaacnttataaaatattaaa

SEQ ID NO: 268871 - DNA, 545 bp, Homo Sapiens
  misc_feature (294)..(294): n is a, c, g, or t
  misc_feature (312)..(312): n is a, c, g, or t
taagagataaaattattttattggttcaaataaactgaaaaaaatagacatacaaatcacttagttgtaattttaaagaattcctcaaactaaacttgaatttaagcataagcttatgcttacagattactatttgctagcttactaattattatttgaattaagcagtaagaactaaaatttaagtttcttaggttttacagattgatttgaaaggcatgctgtcttgctaatattgaaataaatttatttcttaaaaattattattttactggagttatgtcagaagcaggngctgtggttcttgagggnaaggacaagtttcttctcagaatcatcaaaatgaagctctcactgttctgcccttcagaggttgggttgggcggttgttgtgctgcatggggacagcgttatcaccttcaacatttgatagaaggctgcggaattgtgccagctgctctgagctgacactgatgctctccttacagatgatccaagttacactctcataaagaggaggatgagtcagagagccagggtaggtc

SEQ ID NO: 268872 - DNA, 528 bp, Homo Sapiens
  misc_feature (403)..(403): n is a, c, g, or t
  misc_feature (424)..(424): n is a, c, g, or t
  misc_feature (437)..(437): n is a, c, g, or t
  misc_feature (476)..(476): n is a, c, g, or t
  misc_feature (517)..(517): n is a, c, g, or t
gtgaatcctgagggttagagcatccaccaggtgccctaggtaagggccagccactctgggaggcagcccggggcactcactgtcctctcagtagtaaatgaaatcactcaggccatgtctgctacccagagagcctgagtgtcctcaaatgcttgttctgcctctccatccactcctgcagacacctaagtggctgcatccccaaaccgctgaactttgcttctctttctcccaaccccccaattcccaccccacatcccaaaactgctctgcccccctattccccatctcagctgagggtactatcatccaccctgtggccacatccaaggaatgtgtgtatcacccggggctctgaggatggacatcagctctttcttaagtcaacagaatgttcggggtnttgttcttaaaagtcttcatntggacaagggagntcttttaagggttttaattccctttaaagggttttattncccttcatgatggggttttcagtgttcattctgtctttttntttggggatga

SEQ ID NO: 268873 - DNA, 335 bp, Homo Sapiens
aactaattcccccagaacctcccaggaggctccgagcagggcggcccttagtcattcccccacagaggagcgcccagtcccgccctcgacttcacccctcacttaatcccacagcagcccttggggtaggataacattgttccccatcgtacagatcagaaagtgaggcctcagggaaggtaagtggggtgccccaaagcccacgtgcttgatatgtggccggataggaactcaaagtctgtctgcttcaaagcttatgttctttcccagggacccccaagaccccagaaggcagggtagaaaattcaaatagcagtaagcgggctgggcacagg

SEQ ID NO: 268874 - DNA, 396 bp, Homo Sapiens
  misc_feature (51)..(51): n is a, c, g, or t
  misc_feature (97)..(97): n is a, c, g, or t
  misc_feature (113)..(113): n is a, c, g, or t
cctgtggtttggaatgtgcccctcccaagggtttaataggttgaaaatttnaaccccccaaagcaatggagttaaggtagaacctttaagaagtganctaggtccatgaaagnctctgccctcatgaatagattaatgttgttattgtgggagtggattagttattgcaggagtgggttactgataaaggaatgagttcagttcccctcccttgtccctctctcaccctctcactttctgccatggaatgatgcagcaagaaagccctcaccagataccagcaccttcccagaccctggcactgtagaaataaattacttttctttataaattactcagtcttgggtattctgtcatagcagcatgaaacagattaagataaatgattaattttta

SEQ ID NO: 268875 - DNA, 390 bp, Homo Sapiens
  misc_feature (38)..(38): n is a, c, g, or t
  misc_feature (53)..(53): n is a, c, g, or t
tgcccccgggaggtccccggtcggagagggacataganctgtgaccccctganaactgtgaaagcccaccccgggctacagaaacccacagtctcccccagcaattattacaattccttgaaattcccttggggattttttacctgcccctttcaaagcaccttaagtgtttagatcctaacgtgttcccagtgtctgtctgaggtgacttaaaaaatcagaacaaaacttctattatccagagtcatgggagagtacaccctttcccaggaataatgttttgggaaacactgaaatgaaatcttcccagtattataaattgtgtatttaaaaaaaagaaacttttctgaatgcctactggcggtgtataccaggcagtgtgccagttta

SEQ ID NO: 268876 - DNA, 764 bp, Homo Sapiens
  misc_feature (36)..(36): n is a, c, g, or t
  misc_feature (47)..(48): n is a, c, g, or t
gagcggcaggacctgccaaggcctgggggagcccgncagcctgctgnnttctactgtacaaacagttggggagggggcgctgtctctgttaacttgaaattccccgatcagtaaacatgccaatttaaagtgtaattaactcaggccggaaaaaattcagatttggactgcttttcacagttgagcggctgctctgcctgggataaacacatttcaagagtctcagtccccgctttgccaccatctcctcctctgatctcctttcctgcttcaaaagactccagaatcttctcggttctcagagaaggctgaatccacctatgacctagtgggagcaccctgtgccgaaaactgtttaccttctggtccccggagccatgggtcacgacctgggcctcatgtaggcccgcatcctcagcagaccccaatctgcggcttctcccacctcactggggaagaaggagagccctggggatgtggagaagccaccccccaccccgccacatcccccacatcttacagaatctcgattgaatccccgggggcacatccctcagcaggacagcaacagtctttgccgcggcctggggagggctgtgctggggatgagcgccgagtggccgtggactaagtgaaggaaatgaccatgctcttctcccagctggatggcgaggccgggcaggaaccgcggaattcctgctcttcgttttccaacactttgctgtcaagctatttgaataataaatacacattataaaaatgta

SEQ ID NO: 268877 - DNA, 397 bp, Homo Sapiens
tttgaaaataataactgaaacctttatctggaagtgggggaatgggggtgtggaactgattcatagggctgcttcaggatacacagctgagaccaaagtcttcaggtttgtttctggcttcatggcatttctccctccagattcctgggtgggcaggactgctcccagactttagttgacagggactggaggtaggttttgggactggagctgggttttaggactgcttcaagattcacagtgggaataaagtcagccagcatgcctacaggggcacatatagtgtgttttttggcaggtcccagggttaggaaaaactgcttctgggacttcagtttcatgggactgggagccagattatagtgccacgtcaagatccaccattaaataaatattg

SEQ ID NO: 268878 - DNA, 502 bp, Homo Sapiens
  misc_feature (24)..(24): n is a, c, g, or t
  misc_feature (41)..(41): n is a, c, g, or t
  misc_feature (52)..(52): n is a, c, g, or t
  misc_feature (76)..(76): n is a, c, g, or t
  misc_feature (86)..(86): n is a, c, g, or t
  misc_feature (129)..(129): n is a, c, g, or t
  misc_feature (203)..(203): n is a, c, g, or t
aaggccccggaaatcccctggggngaattaaaagggattangggggtatttngggccccatacccctggaattttncccccccacngacaaaggccacatttaaaatttgggaccccttataggccccncctgaaggaccatatggatgggaaattccctgacctagaaaatgcctgccaaagtcattaaattttatttaganaaataccataaaataccataaggtatacctagatataagatgtacccagcctacctgaaacaacagatgatgcctcacatatagagcaaaatgtggtctttggtggaaaaggaaatcaattttggatttgtgctatccacaattctttgatatgaactattgcttgttattaataatgtaaacaaaataggtaggaggtcctgaaagggagtcctccttaaaaggtttctggcttagtttcctttcttttgaggatttttaacatataagccaaacgaaatccaaggattaaactgaaa

SEQ ID NO: 268879 - DNA, 398 bp, Homo Sapiens
gtccccctaggaaaagactcctaaagacaacgtttagcatgccaggatattaaggtgtgtcgttacaatcaaccatctgaagaagggaggggaattgagggcaaggaattgaacagagagagaaattaaggtgacatgcaggtcccattacagacttgcataacccctggggagctcagaacccaaaatgccccttcagagttgttccaagttgggtctagatggcttggcctttaatctaccacactgttctttgagtatgggcaccaaagtggctgaggcaatctctgatgggactgacagctgaaggatgtctgctgagagcactcccaagggctgaggcagttaagtcctttattgaaggtgcaactgagtagtgcatcactagtgtctaccac

SEQ ID NO: 268880 - DNA, 484 bp, Homo Sapiens
  misc_feature (30)..(30): n is a, c, g, or t
  misc_feature (76)..(76): n is a, c, g, or t
  misc_feature (302)..(302): n is a, c, g, or t
  misc_feature (352)..(352): n is a, c, g, or t
  misc_feature (381)..(381): n is a, c, g, or t
  misc_feature (407)..(407): n is a, c, g, or t
  misc_feature (418)..(418): n is a, c, g, or t
  misc_feature (429)..(429): n is a, c, g, or t
aattagaatggcatgtgctgcaaggagatngtatgggagccaatcatttggctagtaaaggagcccagccaactgncgagcagcttcactcatcacagctttgttgttctcaacttgttgaatatcatgcattcattcattaattcaaccagtatttattgagcacctaatatgtgccaggcactgccactgcaatcttataaatggagttttaaatttgcaaatgtattttatttgtaattgttatttttatgtgtggaaaacagaatggattgctagtgttggtgagtaaaaacaaaaanaaacaaatgacaaatgaatgtgatagctcatattttagaaatggcctttntaaatcaccttggttccctatcagtaganctaggtaaggcagcaccaatctctanatatagaaganatttccccaanatgtaaaatgccagacatgtcccagcccgaactcccccatcccatggcctggagg

SEQ ID NO: 268881 - DNA, 367 bp, Homo Sapiens
  misc_feature (313)..(313): n is a, c, g, or t
  misc_feature (336)..(336): n is a, c, g, or t
aagagagctagcaccatgagcttcaataccctggacaggctcttcctgggtatcaaggccccacactctgggcaggcacccaattccccagctcatcttccacctctcgccctggctcccagcacccctctccccaggaccctctaaggagacatcttccctgtcaggcccctccactgtctcccagttttgtggcttctcaccctttcgtgtctcagcctctggatacctccctacccacgcccacccgcccccgcaccccggcatcacggcagtctgtgcactgggaaccatggacgccacatgcgttctntctgctcaacaggagcgacaggnagccccagggagggcaggggtggcctgggtt

SEQ ID NO: 268882 - DNA, 506 bp, Homo Sapiens
  misc_feature (311)..(311): n is a, c, g, or t
  misc_feature (338)..(338): n is a, c, g, or t
  misc_feature (351)..(351): n is a, c, g, or t
  misc_feature (384)..(384): n is a, c, g, or t
  misc_feature (413)..(413): n is a, c, g, or t
  misc_feature (438)..(438): n is a, c, g, or t
  misc_feature (453)..(453): n is a, c, g, or t
  misc_feature (476)..(476): n is a, c, g, or t
cagctaggctgcccttagtccccagcaagagggtcccttcccaaccccacgttagagggctctgcatattccaaacacacacaaataactgaactgaagaattcatggttgcctctgtgtcttgagttcctgcatcaggtctgcacagcatgggctgtgaaccctaaacttctgctcttctgggttaacacagaatggggccccagggaaagtgctcttgacatacctcttgggcctgtatcctcaaaacaaaaggacaacttgcatcttgaggtggccatttaaggtgttttgggggtgtgtttgctggntgatgttgggggggtggggattctggnttttgaatgtggntggaggagggatcttgaagggtagggaaggcanttagggaccaccaaaaggaggggacaaanggattaacttgttccaatctttttnttccccagacaggcngtgtttccagtaggattttttgnattaggggagtattaatttccccagagggc

SEQ ID NO: 268883 - DNA, 848 bp, Homo Sapiens
ggcacgaggattgacttaacccttcaggtattgttacttgaataagtcaagtgcctagcctcacccacctatgatctgtcctttcccagcctcgctgtagtcctggtcaaggagatctaggtctactccattcctcctggcccacctggggcattcactggcagcagctgtacttcagtggagcaggtggttctcagctgcttgttagtatactgcatgtgacactgttcccacatacaaggctgacttctgaggattggagcaggctctggcggggaccagagctctgcgtagctgctgctgccaccaagaagtgttagcagaagcagtagcagccaactggccctcctgactttggcccagagcacatgcgtggcttgctgaacccaggctcaggtttatccccaaggccccagctttgagaagggggaaggcccctggtaagttattgatgcccccatatttcagctactgctctctttccaaggccttgcatggaaaggcctagccattgtctgaggcagcaatctttggcatctacaggtggcagcagcctttcaccagggctccatctgtgaagagtctcagccatgactttgagctgagcttgggagaagtaaagcaactgttaaggccagcccttgcccctcagacctgccatgaaaggaatgagccctagactgactcctgcagcacccccgggacaggctgggaccagctgtttgtctccaggtgtcagagtccctcctcctcctccaacctctccaacctactttgtttggaaataccgagctacacttcaaaatgtattcaagggatttccaataaatttttttctgtactttaca

SEQ ID NO: 268884 - DNA, 400 bp, Homo Sapiens
  misc_feature (305)..(305): n is a, c, g, or t
  misc_feature (363)..(363): n is a, c, g, or t
gtcaacctactcaccaaaaaatttgcactttgactcatattggcctattttaacatttcaaaatcatttaaagaaaaatatgactttttctgtcataattcccagtcttagtctctatctttgatcaaaaagaggatagggcaatacattaaattgacaaggcatataacagccactgaatctttctgttcatgagaagaaatcccagatacaccataaatgagatgcaaaccagcagtaagaatgatggcaaggtttctgtatttccatcagaaattgtgggaaaagggcctaaaaccaggaanagacaaggccattaaaaaaatgtatttgaggccgggtgcggtgggctgacacctgtantcccaggcactttggggatcacagggcttaaggcact

SEQ ID NO: 268885 - DNA, 547 bp, Homo Sapiens
caattcccagcctctagaaatctttaaagtgattttccaaggaaaagtattggtacgaatattgttggcatagtttgaattgttcatgcattctgttctcactcataagtgggagttgaacaatgagaacacatggagacagggaggggaacaacacaggccagggcctgttgggttgagattgggtgctgaaaggagagcatcaaagtagctcatgcatgcggggcttaaaacctaggtgataagttgacaggtgcagcaaatctcccatggcacacgtatacctatgtaacaagcctgtacattctgcacatctgcccatgtatcccggaacttaaagtgaaaaaaaattgctcatgcattcaaaggtaatataattttattaaaaaaataactgagtatgataggttgcacctgtaattgcagctactcaggactcaggaagctaaggagggaggcttgcttgagtccaggagttcgaggatacagtacagtgagctataatcccaacaccctcagcaacagaatgaaaccttatttcaacaat

SEQ ID NO: 268886 - DNA, 414 bp, Homo Sapiens
tggcactgcagtgccgtcctctctcttctaggttcaaccagtgctatggggtgctgggtgtgctggaccacctccatgggactgacaccatgttcaagcagaccaaggcctacgagagacatgtcctcctgctgggcttcaccccgctctctgagagcatcccagactccccaaagaggatggagtgagagacagcctaagtgtcatcctggctgtccctcagccatgggatgcagacacggcttcctgattgcacctaacaatttgcctcttcggccacacgccctaatgatggcaccaccagggtagagggaaggtcggcttcccggaaaagcagggccaaggatgaggctttcttcaaactactgcccttgatgtccctcaatgggatcaggagttagcttaagagcacaa

SEQ ID NO: 268887 - DNA, 393 bp, Homo Sapiens
  misc_feature (13)..(13): n is a, c, g, or t
  misc_feature (27)..(27): n is a, c, g, or t
  misc_feature (32)..(32): n is a, c, g, or t
  misc_feature (52)..(52): n is a, c, g, or t
  misc_feature (75)..(75): n is a, c, g, or t
  misc_feature (94)..(94): n is a, c, g, or t
gcccaaaaaggtnccctgaattgcaanattcnggctatagatactaatactnggggttggaaatagaccccaatnggtcatcttgtcccatccnctccgcctcaggcaggactaatgatatatgtttgtcttattcttcccctagaactcccaggggtcaaaatactgtatattcctccactcatccatccatccatccatccgtcatttattgaaacatgagtaggacagtggacctctcctttaacaactcatggtatagtcttttcagagtttccaatccctaaccagcaagagtaatttctaatgtctaaactaaatgtctaatctaatccagtgtctaatttctaacatctaatctaatgtcttcatttcgtaaataaagagaaggat

SEQ ID NO: 268888 - DNA, 409 bp, Homo Sapiens
cctggtacactgcaactgatacccaaagagatcagcactggaaaaagccccaatggtgcccaccccggtctttaatccccactgttttcccactgccaacaggctctgactaacctgcagctccccacagccggcatttatccctgcagtgccccatgatgcacggtgctacacctaccactgtgtctgcagcaacaacacctgccacccagcgttccgttcgctgcaccaactacaggcaatcagctgaaattctgaacagcagagttatggagtatcagaatctttccatggaaacctccatatggcctttctatatatattctcgtatgtcttattctaccaacacaacaataagcgtgttgcagtcaatgtattaagcaaagcaaacctgccagccagcaaattc

SEQ ID NO: 268889 - DNA, 608 bp, Homo Sapiens
  misc_feature (140)..(140): n is a, c, g, or t
acgaggttggacaccaactttagtcttgggctgcaacagcccagctgaggcgaagtggactccaggcagggaatgggttgcccaattctggtccctttcctttgctcagccccctctgttctgctgattgtagggatgtncagggctgggagttggcactccccccgagtggggaggtgacagcttgtcacagtagccaggcttgggtgggttcagcactagctcgggacggtgtgtcacacgtctatagtaaaccagttctctgggaggggaaaaaagccctgatttattgcatttgggcagcttctgtggtgtaaattctcccagcagtgtcccatgtcatgctgccagcatcactgaatgcactgaactcagagttgggaagagatgcacataatcgctctcccggcacacctcatgcctcttccctgcctccccaattcccctggctgcacttccttgccttctatggggttgaaatattgaagtctcaactgtctctgttcacaagagccaccaaaagttaggggacttcagtcctagcccccagatggccgccctgaagctctctgggctcctcagcaataaagcactttattttcaaaaaa

SEQ ID NO: 268890 - DNA, 457 bp, Homo Sapiens
  misc_feature (422)..(422): n is a, c, g, or t
  misc_feature (447)..(447): n is a, c, g, or t
caaaataatatgaacagtgcactaagcttggcctattgccaaacacaatctctctcttccttggaactaattaaatgagaaaggatataggaaagtcatggaaacaaaagtataggaactgccaaattgtactagcttcataaagtatggtgcctgcagtcttagatatatttatgtttatgtttaaatacagatatatttaaaaggctacagcaacatctacccgctccttacagcctggtccagtgaggggtattccctcctctcaaagtccacctccaggcttcttgttctacttcaggtacctgattctctaggtgcagttttgaagtagttgaccatgtttgaagtgggtagatgatttttctaggtaattattcttagctgcctgattattttaaagttaataatgtgtaaggccncaaaaggggctttaaaaacaacccnaaactaccgg

SEQ ID NO: 268891 - DNA, 407 bp, Homo Sapiens
gttccccagccccgggaggtcagcatgaggggtaatgctttgccagaaagggctgtggccttactaatgagttctgctctttcctcaagttcgcagcttactgatttccatactcgagaataacgtttgaagaaaaggatggtgtttttggaaaaccagcattgacaccactctatcttccctacttatttaataccttttagtgccatgttaggatgacgcgtcatagcttggcactgcatgaactaaaaaccaaatatgcaaattgttcacttattttttaccctttccaattacattagcaaactttgggggctcaaatgcaaggtggttttggatgtgcaaccagttgccaaaaacagatggaggaagtgaaaccaagaaacagcgaagcaaacggactcaga

SEQ ID NO: 268892 - DNA, 503 bp, Homo Sapiens
  misc_feature (12)..(12): n is a, c, g, or t
  misc_feature (86)..(86): n is a, c, g, or t
caccaacccaantaatataactgaagactaacctttgggggttggccggctgggctggtttaagatgccacaattggtccatgccnggatgatgcccatagaacaacttagaggagtgtgcattagagcttgggaaaaaaatcacttcaggtagagaacaatacccttcctttagtgcagtaaaacagggaccaaaaaaaccatacacggattgtatagctcggttacaggagtctcttaaaaaggtaaccacagattcgactgctcaggatatagtgctgcacttatcagctttcaacaatgctaatcccgactgccaggcagctctgcgacctatcagagggaaagcacacttagttgattataccaaggcctgtgatggtatcagaagtaatctgcataaagcgactctgctagcacaagcaatggcaggactaaaagtgaataaaggaaatactccatttcctggagcttgttttaactgtgggaagcatggtcatact

SEQ ID NO: 268893 - DNA, 823 bp, Homo Sapiens
  misc_feature (776)..(776): n is a, c, g, or t
  misc_feature (782)..(782): n is a, c, g, or t
  misc_feature (788)..(788): n is a, c, g, or t
  misc_feature (804)..(804): n is a, c, g, or t
tcagctgttaataaatatgtgggtaaatatctgtttggggctctcagctctgaagactgtgagacccccaatttcccacttcacacctctatatttctgtgtgtgtgtctttaattcctctagcaccactgggttagagtctctctgactgacctggtcttggcaagtggtgtccatttgtgggggctcatatccaggtcgaagggtcaccagagcaatggttggaatgggaaactagctggaggacacccgagtactcttaaagcaatccctgtcgtgcgtaagaacggggagctcggaagtgtcagggtaacaatgggacaggtatgggggtctggttcatttcaccttggaactttttcacactgggtaattgaggaggaacaagagtatagcgaagtaacagaagaggttacagagcatgtttatttgccagctaaagctaaagcagcaaaggaaggagagattcatccctacccttctgcaccccctccttattattttgatgaagatgaccccccacatctttcttttcctggaggacactgggcaaaaagtaattgccccagtgactgttcgagcagcgcctcatgtgacagctcttagttctattcaggcaggaattcagcaagctagacaagagggtgatttagaggcttggcagttccctgttagaatacaccccccagatcaacagggaaatattatagctacatttgagcctttcccttttaaattactcaaagaatttaaacaagctgttaatcagtatgggnccgggntctccntttgtaatggggactntttaaaggatgttgccgtt

SEQ ID NO: 268894 - DNA, 491 bp, Homo Sapiens
tctcccagcaaactgcagtggcagaaaggaggttcagaggctaggaaagtgggcctccccttgcaactcagagctgctgcactcaggagggccccatccaatcccgggcccctgcagggaaaagcgctgggtgtgtgtcagaggcgcagggtgggtggggctgccagccaggaccctggcctgcagcctgatccaaaccaaagactgtagaaccctggggtgtggctaacggcccctccagcacccatagccaggtcttcctggcccttgaggctgggctggcggacaggcacctacctcttccttaagctgaagctcccacactgtcttccagggctgaggagatgctctccttttctactgaccatcttgatacttatttatacgagaggcagttgctggacggggtagtactgggaagcaggaggcagaattgctctgctgagcctcctacccatgacaacaccccaataaacagaacattcagtgcc

SEQ ID NO: 268895 - DNA, 785 bp, Homo Sapiens
ggacaggaatagagaagggggaagaaagattccaaatcccaaaccattatttttcattttagcagagcccgccaaaacaacactgcagttttcctgaatgagctttgtttttttgcttaaaggatgtcagacagttctttctccaaccgcttctgaacctgacaccacattgacaaaaaccagtcccaagaattccttgaaaggagataaagatcctggagaagagagtgaggctgtggatggcaagctctcgatatttatccacaagcgggaagaccagtcatcccatgaagtcctccagccattgctaaggtgaccataatgattgtgatagctacacatcctcaagcaccacccatgtcacaggcactgtgctaagtaagccctgtacatgtatcgactgcctcggccctctttacacccctttcaggtagacactgtcactgtgattcctgtggtgacacagaaagaaactgaggcagagctgaaatgcagatgtagtcttctctgaccatagaacccaagctctgaaccacaacttggtactgtctctctaagtgcaactgagagctaaagccatgtggacgatgtattattgtctatgggaagcctccagtgtgacttgggctttgagaaggaataatgccatttgatttttagttgttggcatccttcagctgttggtaaatttaggtaaactccaactcattgactgtgagttggagaaacaagagacacttttttaaatctttaattagttgaagtatgaaatggtgtgattactc

SEQ ID NO: 268896 - DNA, 296 bp, Homo Sapiens
  misc_feature (25)..(25): n is a, c, g, or t
  misc_feature (187)..(187): n is a, c, g, or t
  misc_feature (195)..(195): n is a, c, g, or t
  misc_feature (208)..(208): n is a, c, g, or t
  misc_feature (227)..(227): n is a, c, g, or t
aagttaattgtaaaagagcctcagnaggtccttcaggagggattccagaagaaggcattgcgatcacaggaggtgccagctgcattgggacaagatgtggaggtggaagacagtgatattgatgatcctgaccctctgtaagcctaggctaatgtgtatgtttaagaaaaaagtttaaaaagtaaanaaataaanaatgttaaaaggnaaagcttatagaataaggntatagagaaaaaatattttttgtagagctgtacaatgtggttttgtgttttaagcccagtggttattac

SEQ ID NO: 268897 - DNA, 503 bp, Homo Sapiens
  misc_feature (407)..(407): n is a, c, g, or t
  misc_feature (447)..(447): n is a, c, g, or t
  misc_feature (453)..(453): n is a, c, g, or t
  misc_feature (459)..(459): n is a, c, g, or t
  misc_feature (472)..(472): n is a, c, g, or t
acacatttatctgaaacaaatttctcaaagtagtacatatacatacagcctactccaatatattaccgtctattctgtttcatttttaaaaaatatgctgaatacattaaattgattacatggtagctaatgcatctaaacctgcaaattgaaaaaccatgttatgtgtgagtattgaggttggctaggatgatgtttaagaattaaagtggggataaattgtactagtaagcaaaatctttgatgaatgagagggaatgactgatctggacgcaagtgggatgatcagcaacaaggagggggaggatacaaaagaaacagtatttacaggacgagtaagggagtaggtatttgtgaaaggcctaaaggggattccgggggatgttctcttgtcttctttctgtccnatagtcctagccagcatcttgctgaggcttacctggggancaaagnccctgnccccccaggaccnggggaggattctgtgtccattttctgggggc

SEQ ID NO: 268898 - DNA, 366 bp, Homo Sapiens
  misc_feature (30)..(30): n is a, c, g, or t
ccctagcaagcatccttgctgaggccttancccgggatcaaagacccatgaacccccccagaaacccaggcagaattcctgtgtacatttttcctgggagcaggccccatgagtaggactggtcaggtgagtcagtgtccctagggggagagttaaggcagaagtggactagtccctcaacttctgaaaaaaattatttggtcataccaaactcttgtcatgatttgttggcagaatttgtcttgtttttgcctactcaaattttcaaactaatttctcctattttaaaatgaaaatccatatttgctcttattttagcaaggaactagcttcatctgagcagaataaaaatcatataaataatga

SEQ ID NO: 268899 - DNA, 448 bp, Homo Sapiens
  misc_feature (291)..(345): n is a, c, g, or t
  misc_feature (384)..(384): n is a, c, g, or t
  misc_feature (404)..(404): n is a, c, g, or t
acattttctttccaaagttggttattaaccacagaattatagcaggtattcataacttaagtttgaaaatcaatagcgtctgcaaatggattaacagattagagaatcaacagcatcggaaaataggttaatgcatattgcttctaacaagtgcatgaagaaatagaagaagctatgtagctttcagttctgacagaaaagggtgaaggagggtatcatttcaagaaaaatagctatcacgcaatggttatctctgaaaatatttgtattaagatgtgtatacatggccannnnnnnnnnnnnnnnnnnnnnnnnnnnnnnnnnnnnnnnnnnnnnnnnnnnnnncgaggtcagggagatccaagaccatcctgggccaacatnggtgaaaccttcattcttcnacttaaaaattaccaaaattgagccggggttttggtgggcccct

SEQ ID NO: 268900 - DNA, 388 bp, Homo Sapiens
  misc_feature (11)..(11): n is a, c, g, or t
  misc_feature (58)..(58): n is a, c, g, or t
agccctaccanaattatccttcctagtgggaagtttgttttaggtgtgtaccccaacngacatttccagtttttcctgtttgaaagtcccaatgtattagtgactctgtggcctgcctctcttcaccctgccccttgtggcctgtcctacaattcctaaatggattttgaactcaatgtcgtcgcttctggtttcctgcatataccaatagcattacctatgactttttttcctgagctattttcactgagctgagctaatgaactaaaactgagttatgtttaatatttgtatcaaatacataaaaggaatactgctttttccttttgtggctcaaaggtagctgcattttaaaatatttgtgaaaataaaaacttttttattagaa

SEQ ID NO: 268901 - DNA, 439 bp, Homo Sapiens
  misc_feature (318)..(318): n is a, c, g, or t
  misc_feature (409)..(409): n is a, c, g, or t
  misc_feature (429)..(429): n is a, c, g, or t
ttatcaactttgaagatacatttatcacatttgtagattttcaaacaatattggcaggcatttagaaaaacaacaaatgagactcttgcaagacaatctaaattatacgctgataacattgcttcatgaagaggacatttgaaccatctgagtttctgccttaggttataactccaaaatggacgaacccccaatagtttatagcaggcagccccaagccacaaacaaatgtgtcagtgcagacctgagacctgggagtgagtccccctcccccagggacatgagtgaatcctctaaggacccctcttcctccaggcncctccatccaggtcatcagggagacaaggaaagggtccacacaggcactgaggcccaactatcttcactgtcctcacctccatggggcagngcccgggggaaaggcacccntgaggcttct

SEQ ID NO: 268902 - DNA, 336 bp, Homo Sapiens
ttagtagagacagggtttcaccatgttgccaggtaggtctggaactcctgggctcaagggatctaccggcttcatccttccaaagtgccgggattacaggcgtgacaaccacacccagctagaggtggtaactttttattgttattgcttttgccctggaatattttatcatcagcatgtatagcatttgcactaaaaaaattaattttctacaaagccatacaatggaactcaaacaagcagtcctttgaaatcattatggtgtggtttaaattaaggtttcttagccatggcattgcgagcacatggggctggatccttcttgcgcctcgtgcc

SEQ ID NO: 268903 - DNA, 378 bp, Homo Sapiens
  misc_feature (13)..(13): n is a, c, g, or t
  misc_feature (229)..(229): n is a, c, g, or t
gggaagattaacntggcccctgcataagaatgacacacaaattcatgaagcattccaatgttttttcaatggtctatttttttaaatggcatacttttctggtaaatgcagaaaagccggaaattcaacaatttgaattttatattttagaaattataagtaaatcatatagaagtctttctgcatagaaactctttgatataggagaatgaaaactaatgcaaaagantagcagacataactagctatttatctcagggcaagtcactgaatttctttgaagcccaaacttcttatctttaaaagtaggagtgacactatctgtcctacctttttcacagaattgtgaagatcaaatgagacaaacttagtaaatgt

SEQ ID NO: 268904 - DNA, 457 bp, Homo Sapiens
  misc_feature (24)..(24): n is a, c, g, or t
  misc_feature (53)..(53): n is a, c, g, or t
  misc_feature (67)..(67): n is a, c, g, or t
  misc_feature (370)..(370): n is a, c, g, or t
tgccatagccccagaaggatgccngaagaagacagagaattagggtgtcaggnccctaggcattccnaactgccttcccaatccttgggaaaataaagaagacacaaggacattgttcaaatcccacccccagttccccatagccttttctcctagctcatttccaactctctcacatttgtagacatcttctgaacgtcaatgtgctttaaagacaggctggacgtcaaatcatcctcaatccctctgtcagcaagggacagcaggcattgtggcacccagaatgagtaacacggctgtgctctcttagaaagttgacattgagtgtgaatggaggactctggccctctggactatatgttttcttcanactgccaggcagagagagcaagacaacttgtgaataatcattcgctcacataaatgcaataaacgttaataatgatcacgattaaaa

SEQ ID NO: 268905 - DNA, 406 bp, Homo Sapiens
  misc_feature (21)..(21): n is a, c, g, or t
  misc_feature (62)..(62): n is a, c, g, or t
cccaggactgagggagccaanaggagtcctataggcaggctactgtgcggaagcatcccccnagctgctccccatcttgctggaatttcttgggcggcttctccacctgtatctcaagacagaaacccgggggcctgtgtctgtggccgctcccatccccggagccctggctgctgctcgccccaccctcgcttatctgtagattcaaagcgatgttctcttctgtgctcttagaagtagggagttcagcagtaacagccaggtgaagcgaacctgctgggtgatttgtttgcgctctgttttatggggcattcctgcgagatgtgtcagcttctgtgtgaaatgcagccacagctcatgtgtaccaaagtagaaaaccaaatcacagagaaataaaaacatgctt

SEQ ID NO: 268906 - DNA, 428 bp, Homo Sapiens
atataaagaaaatctatgtaagttgaggttcagaaatgcatatattttttacttacaaatattcatctgaccaaaattcaacataacctttatggaacacttaacaattgttttgtttttaaaataacatttcattcaaactgtatataattcagtaaagttttttatacagcaagcaatgcttaaaccctggaaaatctgtagaaaagagattttcacacaaaataagaaaagaaaaatctgaggtatccctcacacacacacatccattcattctggcccatgtacgtgcacatacacacgcatgcctgtgtgttcacacagacatattcattctcactcacaaagtgggctggcagcatagggcaaaaattgtaggtccaaaggaaaatgattgattgttctaataaagagtccgagtagctcag

SEQ ID NO: 268907 - DNA, 726 bp, Homo Sapiens
  misc_feature (595)..(630): n is a, c, g, or t
gcttcacatcgttaatgtcttattcagtcactacccaaggggctgaccttcaagattctaatccatgaaagcttaaaatagtaaacaaatttgaatatagtttaacatacataataaattttatttctagaagaggaggatcagcccttagacatgaaaagtaaaaatagtttattcccagatttccctttgtgcattagtatattcaaccgagtctatccaagtaacaggacaaaaaaagctggcagttgttgctgcgctgtgaagtcttattaggtgagtcagctaattatatgggcactaccattaaatacagcagggcactgccctgctttgttaggcttgccaaggaaaataaggatttaaagcagcatactacctctttgctatataatgacattttcttcttaaaaatgattttgcaccaattcctgatttatccaccaattattttttaatttatggttgaatgtatttaaacctgaattcagagataaaactagtaaatagctccccaaaataaccccaaatatatttaatatattagctttactctctcctccactgccaaacctttaaaaactgaaataaattnnnnnnnnnnnnnnnnnnnnnnnnnnnnnnnnnnnnaaggtgattgccaagactaaagaaacagctagaagggcaaaagacaagaaaatcagtaagatagtaacagattatccaaagtagagcacggctcaa

SEQ ID NO: 268908 - DNA, 266 bp, Homo Sapiens
tgtcctaattcctaagagaagaacaggaaaatcctaaattattgctctttctccctgtagactccagagagtgaatcctacagggtactataggaggtagggtattacaggaaagtacctagagagagagaaatgaagatattaagattgacgctctcaaataatttgggatgaaagaccagacttcaaaaactatgcctttaagctcttgcatattttatgaaaagtttgaaggttacacaactgcctagacttgtattttaaaa

SEQ ID NO: 268909 - DNA, 717 bp, Homo Sapiens
  misc_feature (11)..(11): n is a, c, g, or t
  misc_feature (30)..(30): n is a, c, g, or t
  misc_feature (46)..(46): n is a, c, g, or t
  misc_feature (57)..(57): n is a, c, g, or t
  misc_feature (397)..(397): n is a, c, g, or t
  misc_feature (546)..(546): n is a, c, g, or t
  misc_feature (580)..(580): n is a, c, g, or t
  misc_feature (638)..(638): n is a, c, g, or t
  misc_feature (646)..(646): n is a, c, g, or t
tgggcaccctncagacggcattcccgtttnagctgcatcccatgtncgtcgatgggnaaagtatttgtagcactgcccttggaatttgtgccagccatagtcacatgtctcggtatcttgcttcacaaagtgcacccaacataacttggaaggcagaggcaccctgaatgtgttaaaacccatcaacacaagtggctccattacgacagggattagagtgacattcatcaaaatcaagttcacaactggtcctccgctgtatcctggacacaggtgcatacgtaggaagtttcagtaggataacaggtgcctccgttaaggcacgggttcattttgcagcgatcaggtcctggtaaatagattgccgtgccttccactgaactcttcattaatgccnaatcaggaaatctgtttcattagaagtctccagaagggaaaatggtggtgttgcaacctcagtattaaattccacagggtttactgttgcctgatcattggaatcaagaattctcgctgccacttgctgttctgatgctgctatcgtgnaatcctgccctctgattaaagctgcttgagtttnagggtttatttctggagaagaagaaagcgtgggcctctcagaagtctgtggacttacnaaggcacnacacctgcctcgaccccataggtggcagaagcagaagtagagtgtggccactgtgtagcaccttctaattc

SEQ ID NO: 268910 - DNA, 353 bp, Homo Sapiens
  misc_feature (249)..(249): n is a, c, g, or t
agaggctggggtccccactgtgagatctgccctttccaggggactgtggctttcaagaaactctgtccccatggccgaggattcatgaccaatggagcagatatcgatgaatgcaaggttattcacgatgtttgccgaaatggggaatgtgtcaatgacagaggatcatatcattgcatttgtaaaactgggtacactccagatataactgggacttcctgtgtagatctgaacgagtgcaaccagggntcccaaaccctgcaattttatctgcaaaaacacagaagggagttaccagtgttcatgcccgaaaggcttacatttttgcaagaggatgggaagggagctgcaaa

SEQ ID NO: 268911 - DNA, 593 bp, Homo Sapiens
  misc_feature (35)..(35): n is a, c, g, or t
  misc_feature (142)..(142): n is a, c, g, or t
atgaatttgaagaatctaagcctactaaactgctnttgcaaaaacagctccctgcagtcaaaggtgacttgtgcaaatagaaggaatcaaatgaggctggttcctgtacttccttaaacaaggaggtgggatgctcgtcagncccaggggcactcccatcatgcccaggtactgctgcagtgccatctttgccttgtcacaaaggtttgaatctggtgactgactcagtttgtgtagaatatctacgatgcccatgtctcgtaatttatcctggcgttcttgtgaaccttcctcttcattccatatgaggtttgatatacaaaacatggctgcaagctgcagtttaacatgtgaatggcccatgtaatacttgattttctgtaggatatcatcattggtcataataagatcttttgctgttgtcccatccgctatgttggctaagatgcacagtgtctgctctttgacctcaatgttatgttccccttctagaataagagtgacggcttgcataatttgctttccatgagtactcattattttatctatatgaggacgagtggagaggagatttctaagaagtcccaatgtct

SEQ ID NO: 268912 - DNA, 649 bp, Homo Sapiens
  misc_feature (122)..(164): n is a, c, g, or t
  misc_feature (487)..(487): n is a, c, g, or t
  misc_feature (494)..(494): n is a, c, g, or t
  misc_feature (580)..(581): n is a, c, g, or t
  misc_feature (602)..(602): n is a, c, g, or t
tttcaattagcaataatcgcgcctcggatagacctcattggctacgatactgccactgctgcaaagcttctgtattttatattaaacataatgaacactttcccccttgtaaaagatctaannnnnnnnnnnnnnnnnnnnnnnnnnnnnnnnnnnnnnnnnnnatttgggggcagaatgtcaggccagagcaatagccggctggcacactaagcttcacaggacactttaagaaccaggattaaatgagatcctgcatttatataggtggaaaggctggagggtgaagggtggggaccatgacatttattgagcctctaccaaataccagagagtttataaagtttataggacggttcacaaataccttcatttcataaccccctcctcccacccaaacaaacccttaaaggcagctatcagtgctttacttccacagctgtagaaaggaagtatagacgaaagaggactgtcgctatgaccctgnctggggnacagcagagctggcagggaacatgcaggcttgcagctgcccaagcctgacacttgtccagttctccagggggtggggagaagaggnntggggagggtgtggaggaggncagtgcagaaggaacggaagatcaggatggataggctggggactctg

SEQ ID NO: 268913 - DNA, 391 bp, Homo Sapiens
  misc_feature (313)..(313): n is a, c, g, or t
  misc_feature (330)..(330): n is a, c, g, or t
agccctgtctcccagctcgactgtctgaacagagacaattatatccgttcctgtaaattgctacccgatggctgcactctcatagtgggaggggaagccagtactttgtccatttgggacctggcggctccaaccccgcgcatcaaggcggactgaacgtcctcggcccccgcctgctacgccctggccatcagccccgattccaaggtctgcttctcatgctgcagcgacggcaacatcgctgtgtggggatcttgcacaaccagacactagttgagggcaatttccaggggccacacagacgggagccagntgtattttgacattttntaattgatgggcaccaagtttttgggacgggttgtttttgggacaaacacagttcaggttc

SEQ ID NO: 268914 - DNA, 400 bp, Homo Sapiens
  misc_feature (192)..(192): n is a, c, g, or t
  misc_feature (216)..(216): n is a, c, g, or t
  misc_feature (224)..(224): n is a, c, g, or t
  misc_feature (313)..(313): n is a, c, g, or t
  misc_feature (370)..(370): n is a, c, g, or t
tgatgattgtataaaagagatgtagattataggttgagaactactgttagatagaattatgctttatttttaaaaaatttatgcctctaaatagttttgttaaacactgaatatctaccttgtaatgtatgacatatccaaaattgcattaagtgtatatcttaattatatttaaccatgtataattgccanattatatgtgtgtctctttatttncctatttnttaaaattcaatagatggaagatgtcttgaaagcattacaaatgaagctgtgggaggccgaatccaaatttgtcctttcgccacttgtnaaaagctgaactctagtctgtgtcctccattctgcccccgcccttcctccccttatntgttaaatgaagcaacatagtgagacgtcg

SEQ ID NO: 268915 - DNA, 346 bp, Homo Sapiens
  misc_feature (83)..(83): n is a, c, g, or t
gggttggggcctaagggctcctccttcctgtcctaccttttttaaacatttgaaagatggtccagctcccctctggcaaaganctctgcccacgttgaattccttcttgtgtggctaactctaacaggtaaacaggcccagggcagaggtgcactctctgactgctcaaagacactcagggtagtgtctcttctaggactacaggccaatgtcaaaatcagccagacatctctaaatcttttacatcatcattattaaataggcagcagcagaaatcagcatataccagctctcaaaagtatgtggaagaaactaccctctctattaaccctttgtaaaaccatga

SEQ ID NO: 268916 - DNA, 457 bp, Homo Sapiens
accaagtctggatatttctccagtatggcacccggatcttcttcctttcgggaacccacctacaggcctgccttgggttctgtcagatactgggcttcctgaagctgtctttgtcctatttacattcataaaagtgagtctgattgtgtcttcctttaagcgcttatccagttacttttgatctgtgaaggcttccttgaccacccaagccccaagctaaacttgtttgcttggctattaggtccactcagttggaacttaaactactcattttcatcactttgtttcaaaattcatgattatctgacattactggggcaaacagggaactgttaggataaggttaagggattaacattttttttccttttaaaaaatgtttaattcatcttagggtgggaacttttttaagggcaggtggacaaaactttactttaggcttatttaaattggggtt

SEQ ID NO: 268917 - DNA, 571 bp, Homo Sapiens
  misc_feature (15)..(15): n is a, c, g, or t
  misc_feature (104)..(104): n is a, c, g, or t
  misc_feature (151)..(151): n is a, c, g, or t
cctgccaaaaccacnggccacgatctaccaagaagcctcgcgcactaactgacttcaggcttggcggacatcttccccaggcgggaggacaagggagtgggctnagatgcgtcaacgagctcgcagcctgcacagcctactgatccaaaanaaccccggctgggctggtcctcaaccccgttggctccctgtggagcaagcaatccggcgactgctggaaagcgagggttcgaggcgcagattcgtcgcgcgatctccggcgcgtcggaacctgtttcgcagcctctcgcagaggcccctcggctccgaaaatgtctctggaaagaagacccgcggatgggtttgggttggctcacccgcagcggctcaggctttgtctcctagattggcgcccatgcccttctctatcaggagcctccggtagtttgtcaaactagacggttgcctctgataactcaagtgaagtgacccaggcctggagcgccaagtacaaagcggggacgacacttgcacctcccggcaagccagagcacagtgaggttcaaaagaagggacaagtgaataaattcct

SEQ ID NO: 268918 - DNA, 596 bp, Homo Sapiens
  misc_feature (307)..(307): n is a, c, g, or t
accaacaatatcccagaactcaaatattatgataagacagttcgtggggccacagagaagtaaaaaatcaccaagaagacagtaagagaatcaaacttccatattcatgatatccttttccccagtgtgcctgacaccaagtgtgtggaaaatttccccccaacctcacagttcctacagtggaaaaagtgagactgaggtgaacaaccagcttctcccacaatcttgagttttctggtgagaaatctttccctgcctcaatgcacaagaagtgtttgagagtacccagaagggagaatatgccctngaggaaagccagagacaaagtggtgaggtagaaataccatccttatctctggaaactctgctctatatcttggccaaaggagacgccaaatcaaagtggctgtttagcagcaccacacagtaagagtttcatctcacaggtcccccgggtaaaaacccctggctggccttcccacactactgggatatcctctttgggacctctcccattcaggatgggtggcactctgatcatttactaaaaccagtgctaacctggcttaaggcaccaaccatctagtactgaaaag

SEQ ID NO: 268919 - DNA, 497 bp, Homo Sapiens
  misc_feature (37)..(37): n is a, c, g, or t
  misc_feature (69)..(69): n is a, c, g, or t
  misc_feature (142)..(142): n is a, c, g, or t
  misc_feature (380)..(380): n is a, c, g, or t
accagccatacttaactctctgtgctgtggaagcaancaggaatcaaagagctgccctccttgtcaccnacctatgtgccaactgttgtaactaggctcagagatgtgcacccatgggctctgaaagaaagcagatacctcnaccctgctacacataccaggatttgaactcagatctgtcctgataggaatgtgaaagcacggactcttactgctaacttttgtgtatcgtaaccagccagatcctcttggttatttgtttaccacttgtattattaatgccattatccctgaatcccccttgccaccccaccctccctggagtgtggctgaggaggcctccatctcatgtatcatctggataggagcctgctggtcanagcctcctctgtctgcccttcaccccagtggccactcagcttcctacccagacctctgccagaagatcccctcaggactgcaacaggcttgtgcaacaataaatgttggcttggaaa

SEQ ID NO: 268920 - DNA, 596 bp, Homo Sapiens
cattattaactttattttagaagataatcaccccaaatgggttcagaccacaaattccaagttcctgcaagacttgtgtggattgtggttgctgtgagtctgtgagatgtggatctgtctcgcacaagcgccacctagtgccagcctgggactctggtggtaatctatcccacatttcagcactcaaagtctgtgtggtccgtgtagggtcggatccatacatgtagagctcaagggtaagcccaagagttcatgagcaactttcaggggttgctctcccgaagcccttcctcattgtaacctgcccagtagtgtctgggtccctgggctctaccttttcagccctccagccagcttgggtggttgaggcttgatttaccctactctctggtgcacttgactgaaccacgtcagagctaagcagcgagaagccagagagaaaaagcatgaaggtttccccaacctctggggacctcagactctctggttggaaaggaagtttgcctggcctgatgactttaattatctgccatttctcactagggccacaaaatttcttgaggtctggggcacagagaagaaaaaattttagaaga

SEQ ID NO: 268921 - DNA, 420 bp, Homo Sapiens
  misc_feature (36)..(36): n is a, c, g, or t
  misc_feature (386)..(386): n is a, c, g, or t
cccacttgaacagatgaagccactgagacttggagnagcaggtaggcttagtccgagacctaacattcgctggtggctgccttctcatttcccagaggcttcagagtccctcagtccttgggttgcaccgtcctcccaccagactgacccaggggccagtccacttcggtggggaaccactaagataggtgtgctctccaaacaaaaactccagaataacccactttaaaaagctgataactaagcgtaaagagagaatagggtagtgagctgcatcttcagtcaaatgcctgagtggtaatgcttaacccaaaggaacttgacagcaatggtgaaatttcagggactaccgtggtgttggtgctggtgaccttcacagggcagancctttctgccctcgaggtcacaccagtgttgttt

SEQ ID NO: 268922 - DNA, 861 bp, Homo Sapiens
  misc_feature (443)..(443): n is a, c, g, or t
tacaggcgtgagccctatgcccggcccgtaagtcagtttttgaaatataaaagtggtataggctagatgtgacaaaaaacagtcaaatgatacaagagcttataaagtcatatggcaagttcctccccaccaatcatgcagtgaagtgagggtcatgtgtgtccttggaagaatcacctccagttcttgcagggggatgttttcctaaaactttctgagcattgctcttctctgctcaagccacttcaatacacctcaggcagcaaagtcttcagcttttgagccgtggtctctgaggggtgttggatgtggaacgaaattcaaatcggtacaatgatggactgtgggcaagtgcgatgaaggaacgaacctgcagggcgcagaaagacgtgtcctgggggccctgccttgggtttggaagacaggcaggcatccctgaggcntgatggggagatgaaccccgaagccagagtgcttatccgtcagatctctgcttcatgtttggagtttgctcacttaacacatcagaagtggctttgttccgtatggcagcaagttctgcagaagcctcatttgggtggggggagttttattaaaacagtttatcatggagaattccaactatacaaaagtagagcaaacagtaaaatggactctcatctatccatcaccaacccatgaccaatgtcttcagctgtcagagatttatcttatagctccttgattcctcctcctctctctacctgtctgaactgtgtgaagcacatcctggccataagatcagttaacttcttagtatttcagtatgtttctctcaacgttgtaaatgccactattacacctaaagaaatcaacaatatc

SEQ ID NO: 268923 - DNA, 505 bp, Homo Sapiens
  misc_feature (73)..(73): n is a, c, g, or t
  misc_feature (120)..(120): n is a, c, g, or t
  misc_feature (128)..(128): n is a, c, g, or t
  misc_feature (152)..(152): n is a, c, g, or t
  misc_feature (212)..(212): n is a, c, g, or t
  misc_feature (220)..(220): n is a, c, g, or t
ataagacctttgtgattttactgatttaccatgagtggccactaaattacatgattttataaggcttgacacnggaaggaatacactgaggtatatggtaaacaaaagggcatatgaatnactagagnaaatgttaaattgataactaaggnacactttcggatgtgaatccataaatctaccactgtggctagaacagcctatatgtacantggattcntgaaagacactgatcagttgctggtaaaagtagagaaggccctgggcttctgccagtccccctggtacttcccacaccacttcagagaaaaagcatcatgacacaagcacagtagatggtagaggcccccagcactgagtcaggtgaagctacatggttcgctgtttagttacgtttccagtacttggtttaatttcacagtgagggagtcggttggtgatctctaagaaatccccaagcacctggtgttgggaaagtccctcaaataaagaagtgttcttttct

SEQ ID NO: 268924 - DNA, 703 bp, Homo Sapiens
  misc_feature (26)..(26): n is a, c, g, or t
  misc_feature (61)..(62): n is a, c, g, or t
  misc_feature (474)..(474): n is a, c, g, or t
  misc_feature (641)..(641): n is a, c, g, or t
atccgccagcggagacagaggcggcnctggagtttgcacagactcagctggcggcagggcnnggagagccgagagtgcctcacagagatggagcgtaccctggcactgctggcctttgacagtcccgaggagtcgcccttcggagacctcctccacaccatgcagaggcagaaggtgtggagtgaagttaaccaagctgtgctagattatgaaaatcgcgagtcaacacccaaactggcaaaattacttgaaactactactttgggctcagaacgagctggaccagaagaaagtaaaatatcccaaaatgacagacctcagcaagggtgtgattgaggagcccaagtagcgcctgcttcgcgtgggtggatccaacaccagccctgcgtccgtgggacttgcctcagatcagcctgcgactgcaagattcttactgcagtagagaactctttttctcccttgtacttttttttngacctgggcatctttttatagggaaaaatggcctttgtaggcagtggaaaacttgcaaggaaagctgcccgtctctttggcagtctgatgcagatcctgcactcctggcactcgctgaagaatctggaaggttgcggtttgctcttccagtgttcgggggcctctgnttgctgaaggattcggtctaccacggagggctgtgctgttaggctgcatcccactcaaaatt

SEQ ID NO: 268925 - DNA, 407 bp, Homo Sapiens
  misc_feature (178)..(210): n is a, c, g, or t
attaaatgcaagaagaagaacattacaaaatcccaactatagtgcttagaaaccctttgacagcaactgatagcaactcaaatataattagtatatacaaaaaagataatttatggattcatatgtctgggagtattcctggatttctggatccaaggattcaaacaatgttcccagnnnnnnnnnnnnnnnnnnnnnnnnnnnnnnnnnctgtccctatctctcagcttgcttgtctttcctctgcttaattcttggctgggtcagggggtcaaagaacagcttgcttaacaaccccaaggcaaatagagcttcttttctgaaaaccagcaggaaagtcacggaaaggactctcttgggaaggatggtgggggtcatgtggaatgacttactgaagaaggggatga

SEQ ID NO: 268926 - DNA, 522 bp, Homo Sapiens
  misc_feature (32)..(32): n is a, c, g, or t
  misc_feature (89)..(89): n is a, c, g, or t
  misc_feature (101)..(101): n is a, c, g, or t
  misc_feature (115)..(115): n is a, c, g, or t
  misc_feature (121)..(121): n is a, c, g, or t
  misc_feature (127)..(127): n is a, c, g, or t
  misc_feature (400)..(400): n is a, c, g, or t
  misc_feature (403)..(403): n is a, c, g, or t
aaaaacctccctcaaaacttcgggtggttggnaaagaaggccctttttgaacattcaaggaaacgggtggccaaccttgccgtcaaggncaatgaactcgncatgcctacccggncacggntaggcnacgggcatacaccgaacactagtgggtctccgatccctctgaaccatgccatgtcaaaccggggcaggcaccctgaaaatccccgttttggagaggaatttgttacatttcaggatggatgcctcccacgtaaaaccttggaatgagttccctgatggaggcaatcttgaaaaaccaatttaggcatgtttccttggccgtgtcatttgcattctctggagaaaagtgatctggtaagaacgctgcggctatccacacacatggaaaagaatngcntcgtacacgagctttccaaatgtatcaagtatgtcggtgataaggacaaatttgcttgggtagaactgaataacactggtgtctgaaagaagctttgaacactggatgactatttttag

SEQ ID NO: 268927 - DNA, 532 bp, Homo Sapiens
gagatgtggggccacttccattcccacccgggcacaggtcaggcacgggcatacaccgacactagtgggtctccgatccctctgatcatgcatgtcaaccggggcaggcactctgaaattcccgtttgggagaggaatttgttacatttcaggatggatgcctccacgtaaaatcttggaatgagttccctgatggaggcaatcttgaaaaaccaatttaggcatgtttccttggccgtgtcatttgcattctctggagaaaagtgatctggtaagacgctgcggctatccacacacatggaaaagatgcgctcgtacacgagctcttcctggatgaacatttttaggagccttcactttctggtctgaggcccaggcatccttcagcgattggttgagctcctctatgcggttcacgtaatcctgctgagtcaagttcaacagctccttttgggaaccctcctcaaagtcatccagctcctccagccgggtccgcaccttctctgacattgccaatgtggcagtcccagct

SEQ ID NO: 268928 - DNA, 389 bp, Homo Sapiens
  misc_feature (47)..(171): n is a, c, g, or t
gagagtggtctgggaacaccggcggcacaagcatttagaactgctgnnnnnnnnnnnnnnnnnnnnnnnnnnnnnnnnnnnnnnnnnnnnnnnnnnnnnnnnnnnnnnnnnnnnnnnnnnnnnnnnnnnnnnnnnnnnnnnnnnnnnnnnnnnnnnnnnnnnnnnnnnnnnaccctgatttatgaatatgctaactaaccagatcctaagccaatacctaatcctagaggatttcgatgattatccaccatcatctagaaatgcatttgtttattcctaatttttgttttctatgtgttcattttctgtctacttcaacacgtttttcttctcttcatttttcatcacatggaaggggcaatttttttaaaaaaggtactcttggggac

SEQ ID NO: 268929 - DNA, 322 bp, Homo Sapiens
  misc_feature (233)..(233): n is a, c, g, or t
  misc_feature (305)..(305): n is a, c, g, or t
tctagaagaaacaatatttatgacaactctagccaacttataagatgaatactattaaacacctgtcaggatgttagaaaagaaattcaaacacagaataagcgctcagattatattcaaggtaattattattacacagttaaaagataataccccatctatgacagcggtcccaaaagtcaatctatgtttacaagcaactataaaaaacaatgagttaaagagcagatgantgggaaatcaggggtagagggtattacttaatgcccaaaagggaggaaaataattttaaatactggataaantatttccctagggttgc

SEQ ID NO: 268930 - DNA, 352 bp, Homo Sapiens
  misc_feature (49)..(49): n is a, c, g, or t
  misc_feature (325)..(325): n is a, c, g, or t
  misc_feature (340)..(340): n is a, c, g, or t
gcccaagaatctacctgcctggatccattaacaccagtgccagcgtatntgccattggggccaaaggacacacaggctcagaccactgctgccaccactggggcctgaagactggcccacctggtatttcaatttctggcaaaacttaaccagtctgcactaaaaaccacactctaatctaccaacgaaaccagataccaatgactctatgggccaaaagaaatgatagagactatgctactgcttggcattccagaaccaaagccaagtgtcctctccaaccatcaccatagatacatcttcaggggaaatgtttcttccactnacaaaccaaattttnaaaaattggggg

SEQ ID NO: 268931 - DNA, 296 bp, Homo Sapiens
  misc_feature (47)..(47): n is a, c, g, or t
  misc_feature (136)..(136): n is a, c, g, or t
  misc_feature (147)..(147): n is a, c, g, or t
  misc_feature (195)..(195): n is a, c, g, or t
  misc_feature (231)..(231): n is a, c, g, or t
  misc_feature (243)..(243): n is a, c, g, or t
aaaagatcttcaaaacatcttcaagttctgggattcttctgcttganctagtctattgttgaagctttcaaaggtattttgtatttcattaaatgaattctgtagttccagaatttagctctattttatgataccnatctctttggnagattcctcattcatttcctcaattattttcctgtttctttgtattgnctttcagaattctcttttctctcactgaggcttccntaggtatcaggnatgttgggaccatttttccgggggttttgaggaattcccttttgaatggggga

SEQ ID NO: 268932 - DNA, 444 bp, Homo Sapiens
ctgcattaatggtaaatggtctagaagttttcgtttccactgaggcttccgccactcgcttttttaaacttcctgctatggtttggatatggtttgtcctcaccaaaactcatgctgaggcctgagtccccagtttgattgtgttggtaggtggtgcctttaagaggtgattaggtcattgagatggattaaaggctttctcatgaggctcagttagttctggaatggattcgctcttgcaggaatggatgaattctcacaagagtgggttgttatgaagtgaggatgcttcttgtgttctgttctctttgccctcctcagttcaccatctgctttccaccatgagttgaagcagcatgaggccctcatcagatgggctccctgatcttggactcctcagcctttggactcataagccaaaataaatctgttttctttataaaa

SEQ ID NO: 268933 - DNA, 686 bp, Homo Sapiens
  misc_feature (26)..(26): n is a, c, g, or t
  misc_feature (197)..(197): n is a, c, g, or t
aaatgtcctggatgcgagcgtcagcnttccagagctcggggcgggtgaggtcccctttggaaaccctttcctggccatcgaggtcggggggctgccgtctgtgggcaggaggacccgaggggcagccaggaaaggcgatctcttcactgtgaaaagttgcccgggtgcagcgccttttccttctaccatgggaaatncaggctgggcccttggggtgagcctgcgaggctctggtgctgtccccgacccccaccaccaccagaatgcagttccagcttaggaagccacaaacaagccacccaggaggaacaaaacaccgccagcgtggattttccaaatttccctggaaagtaagtctcgctcttgccaaagaaaagtctggcttggagagtctctggagcccaggatgccagcatgtgccaatgactgtcaccttcatctcttcaaaagaaaagccatagccgaggactgtcccgcgacccccgtggactgcgtctaggtcatgtgattctgttttcatttctcatcccatccaatttgtccttttctcctgtcattttcttcctctgtggtcccttcaaagttgttataatttgtactgaacttcaaaatgtgtcccgttctccccagaccactctagccacagtatattgcaataaaattacttcttatatttgcagaaaaaa

SEQ ID NO: 268934 - DNA, 332 bp, Homo Sapiens
  misc_feature (298)..(298): n is a, c, g, or t
  misc_feature (316)..(316): n is a, c, g, or t
cagccctattcaccacattttaaagttatcctctctcctgtccatactagctataaaacttgtcacattccaaaaaacaagaaggtgtgttaaagatctctaagtggagaactattatgtaaatagtatataagaagtttgcaaattatagataccgtaagagccattctacattcaggttcaagttcacccacagtgccctgacttttcagactcccttggtggagtctccggcgcttcatttctgcttacttttctccctcactagtgtttccaggggtcatctttcctaaacagngtgtctctagctcagggncttcaggctttctcaa

SEQ ID NO: 268935 - DNA, 461 bp, Homo Sapiens
  misc_feature (256)..(256): n is a, c, g, or t
  misc_feature (415)..(415): n is a, c, g, or t
  misc_feature (432)..(432): n is a, c, g, or t
gtagtagttgtcatggtttaaaagaaataaatttataattctatgggatgatagttaacaaggtaataatctaataaaagtaatatttacactttatgataaaataagtcattccttataatgaactcagaggatttaattcaattatcttcttagtttccctaactgtaatgcagaaagataacctctcacaatccattttgtgagccagggaattctgggaatcaaaaacaaaataataaatgtatgataaatncctcctgccttaatctcaggaccagtgggaggccagtttaaatctggggtataccagtccaggttggggtgttcgcttgttatgtaagagaaatccaagtgtagtggccttgaaaattagttattttcttcatgtatttgagggcttggaaggcccagnagggaccatggaaaggngtcctggtcccaaggttgccgtatctaac

SEQ ID NO: 268936 - DNA, 533 bp, Homo Sapiens
tagtggcattctacttattaagatgcaatgaaatgaagaaaggctttatgttcaaggacctttgccatagttcagctaattgtagttttatatagaaatgatcctgaacactctgaacttgacgtagttctgcggtgatattcctatctgccagtatttgtaccctccagaatggcagatcccctcagcaggaaccaaaggcatattgacggttcctctcagcgtatgcattaaaaaaggtacctccctgaaacttttgattcaataatgactaaacatactatgtacacaattactgtaaggctaattcacgtgccatacgccacctgaaagcctgagttatcttgctataagcttttcatggagcacttcctttccagaaactgatttgtaactcatttagagaatgtcctggcgtcggtttttagcatatgtggtatttaaacagagctagaatgtgatgtctgaagataatgctgcatttctgggtttcttgtgtggattttaaaataaattgtgcctacaaatataat

SEQ ID NO: 268937 - DNA, 502 bp, Homo Sapiens
  misc_feature (349)..(349): n is a, c, g, or t
  misc_feature (450)..(450): n is a, c, g, or t
ttgccttagaggttcaactacataaattatcacacgtatgttgttcgttagctgttgtcttcagtgtacactgggcaatagctataaaagcttagggaaatggccatatgatcgagtgattctgaagagaaaatgccttgttaggttgtattgggatagctactgtcaactattgaaataactgtcatcattttaatgagatttgatattgttttagcaaaatgtctgtcagttttggagctcagcacatttttttcctatctacagaagttaatggtaatcatattcttgacaagggcaaagtgaacctatgaggatttttttcaggaattatctttttaagatggancactggtaactcgtttaatcccccataacagttctaagagataactaccatttattgtcagatatgtatttagcacctgtattaggctgttctttctatanatatctgcgactgggtaattataatttataaaaaagatgttatttggcttat

SEQ ID NO: 268938 - DNA, 382 bp, Homo Sapiens
cccctgaaaccagtgtttggtgaccataatgcccaagggtaaacaagccctgatttaggcaccgcctttaaccccaggggcttcaccccatgaaattaataaaacttatcctgagtcacttgaaacttggttcccagaaaacacatttctggtttataatctccttttatgctcacctgacattaattatctatccttgatgatgtgtttaaactgagtagcagaaaacagaggccacactttctgggaaattttaaaggaagaaaccatttttaatgagatgaaaatatttaacgaatttaaaaagctaatgacaattttgagaaaaggtttgggatgtatattgctatgtaatttaataaactgattttatggatataat

SEQ ID NO: 268939 - DNA, 648 bp, Homo Sapiens
gaaatagaattatgttagagaaattattaaaagtttaatcccagtaggccagttggagaaatctgaaactaattggaaaaacttttatgctgtagtctcattagaatcattttaaaagcactgttcttgcattttccctagactacaagagagtgtccttggtcattttttttcctatcctgttgtgaagtttattgtctcagttatttgagggaaataacctcttaatatgtttattttcctgaactaaagttttcatgtagagaatacaattaaatgttttgtgttatgacccaaactggctggaagtagagttcagagagggagaagggacaagaatcagtgtgggcatcctcaggaaagtggcgcccagtgctgggctccagccttctccactggcatgatgggtcctcagattctcctctggataatgagggtgttgggcactgtgagctctgacttctggggaggataggccatcatggactccatacacaattttgatgggtatcagttctcataaaatacctgctacaatttatttattttgtagttgtttagaaaactgtgagcagttgggcattagtaaattgtagttatatcttaaagatcttgggaatcattgaaatatgagtttttttccctcac

SEQ ID NO: 268940 - DNA, 796 bp, Homo Sapiens
  misc_feature (591)..(591): n is a, c, g, or t
aacgcatactaggttactttcgtatccagaaagtttagatagaatgatttctatgtaagcttttactgtgtagtctgagtccatgaatattgattacaaaaaacacatctgtaggtgagttacaatacctcacttataattcaaaattcatgtgttagctcaatatttttcaaataatttttgcatgcaattttcaccttctttctgagtagtttcaggtattttgtatggttccagcagtcagttaggttgccattgtttggaagcacacatccacgtatctgcaccatgatgatatggcacgcccatacccctcatttcacattttgtcagaagtggcatagttatcactaactttgccagtagaaaatgtactcccaatttcccacggacttatcttgaataatctctccactgaaggcataacaggttttgaattctgttagaatagttgtttttactatcttttaattttattacaaatttcaaagttacgtaatacttttatttaaaaagtggaaacaaagcttttcctctcccttacccacatgttagtccagcagaaggggaaagcattggccccaggcaaanatcataaacgctttcaattaactaataataattgctggcatgttgccattaaatatccttgtctcattatctctggttgctttatcaaacccatagggtcactgaaggcccacttttgaggacaaaggactatttctcccccaaaagtccaaggggaaatattaaaaaatggaaattagtggtttagggataggaggtccattta

SEQ ID NO: 268941 - DNA, 423 bp, Homo Sapiens
attcggcacagcttgcctatccgtgtaattaatatgatctggctatctttgtctttgttccgaaacttcagctgcaaatgaaagtgtaagttaggtctgagtctgcactatagacctagctatcctaggttaaaggggataaaataggaatcaagaagcctggcccgcttgggtgcccagctcaagtgcattctgcaatccagtttatattaggcctccatgtgggtggctatcctttatcaagatcccccccagggaagggagggattattagtcacattatcaaactcccctccaacccctttctctgcttagaggtatgtgtaatgtgtagtagaaagaccgaatccccacccaaaagttcctttactggctactcatgtttttaaaccttctgttcttttaccctactccctaattatg

SEQ ID NO: 268942 - DNA, 363 bp, Homo Sapiens
  misc_feature (22)..(22): n is a, c, g, or t
  misc_feature (46)..(46): n is a, c, g, or t
  misc_feature (55)..(55): n is a, c, g, or t
  misc_feature (65)..(65): n is a, c, g, or t
  misc_feature (100)..(100): n is a, c, g, or t
  misc_feature (116)..(116): n is a, c, g, or t
aacccatgaactaccttaaccnaaagaacaaaaacctaacaatgtntcttggganccggggccanagtaagcctacatgacctgtaaatccccagtaacnttggaaaggcccaagnaaggtggatcacctgagctcaggtgaagtgagaactagaagatgggttgtgtttttatgaaatcgtccacatgacaacaccctgctgcatgtggctgcactatgtcccaatcaagggtaagccaacaggaaagggtactacaatcaggtccttcccatcaggagggatctttccctccttcatgtcaccttcccagacagagggccctttgatgcaccaacctagtgagggtgcggatactaatttc

SEQ ID NO: 268943 - DNA, 385 bp, Homo Sapiens
  misc_feature (333)..(333): n is a, c, g, or t
  misc_feature (360)..(360): n is a, c, g, or t
tgggctcaagcaatcctcccatttcagcatcacgagtatttgggacacaggcatatgccaccgtacccatctaatttttctattttttgtagagacaggatctcattatgttgcccagggcagttcttgaactcctgagctcaagtaatccggctgcatcagcctcctaaattggttttcttttacatcttcaactatttctctgtttcctccttgtttgttattgaaggtttctttgacaactctattattcgtctaggacttttttggcaatctcacctattaacaaagctttaatcatcacctccatggaaaatgacttctaatttcccnctttttaggttcagggatattctcttnccacattccaggtccctttagggtg

SEQ ID NO: 268944 - DNA, 650 bp, Homo Sapiens
  misc_feature (62)..(62): n is a, c, g, or t
  misc_feature (73)..(73): n is a, c, g, or t
  misc_feature (553)..(553): n is a, c, g, or t
  misc_feature (607)..(607): n is a, c, g, or t
  misc_feature (618)..(618): n is a, c, g, or t
gggaatttgttggggttcaattgctggcttaaacagaaaaacacagcgaatttccccttccnagttctccccnaattcaactgaaacaaggctagttcctgcacaaccccaggattcaaaggaaagacgaagggagcagaacttgtggcagcaacaggtaaacttcaagaaggaggcaggagccccaccctacagggctgggaggagcccagaggccccatctgtttctcctccaggagttgtcaaggcagcagaaaggagtcacccagccaaaggaggagatggctcagcggggctgcacccaaggccaagaggccctacccgtgtctaaaccctcctctcactcccctaagcctggtgaaagagtcagaagccccaggctcctttttctgtttcttaactcaacagctaaaaaatggctcccaggtagtgagtcaatgaaggtcagacatgttggtgtaaagtttctcctctgctcctgaaaacttcatcttcttggtgtctcatgtcctcattctcccctatatgacatgcaaaaacgatctatctttgnaaatccctatgggaagaagcatgtttattgaaactgtccttcagccttaaatanaaaaataaaantgaaactgctccagaaagcagctttctccaaa

SEQ ID NO: 268945 - DNA, 491 bp, Homo Sapiens
  misc_feature (142)..(142): n is a, c, g, or t
  misc_feature (442)..(442): n is a, c, g, or t
cccccagccctgccctggcgtccgtgctgctggccttgctgctgagcggtgctgcccgagctgcggagatcgtgggcgggcacgaggcgcacacagctcccggccctacatggcctccctgcagatgcgggggaacccgggncagccacttctgcggaggcaccttgatccaccccagcttcgtgctgacggccgcgcactgcctgcgggacataccccagcgcctgggtgaacgtggtgctcggaccccacaacgtgcggacgagggagcccacccagcagcacttcttcggtggctcaggtgtttctgaacaacttacgacgcggagaacaaactgaacgacattctcctcattccagctgagcagcccagccaacctcagtgcctccgtcgccacagtccagctgccacagcagggaccagccagttgccccacggganccagtgctggggccatggggttggggggcgcgtggggttgcccaggaac

SEQ ID NO: 268946 - DNA, 468 bp, Homo Sapiens
  misc_feature (48)..(48): n is a, c, g, or t
  misc_feature (60)..(60): n is a, c, g, or t
aaataatttgaaaatgaatgaaaggatttaatttgcctacaattttgntgggaacctgcncctccttgaaaaaattcccattttttcccaagagtggtgggaagtttccacatcctctgggacaggctgttagaaaagggcaatgaaaggggctgatgggtcaggctggcaaggaggagccaagcagagaacagcatggttctgaagacactggagagaaggttggaaagaatggctgatttttagtaactattgtgagtgaaatttgggggatagacagagatgaccaaagatttttagagagtttattgtgatagctgcagaaggcagtcaaatgagccagtcaaatgcctaggtagataggggtgggtccccagtgaaacatgaccttcaaatcaaagacagtttagagcctgaaagccaagctgtaagtcctgcataaatcaaggactgaattaaaaatctctt

SEQ ID NO: 268947 - DNA, 441 bp, Homo Sapiens
  misc_feature (200)..(213): n is a, c, g, or t
  misc_feature (235)..(346): n is a, c, g, or t
  misc_feature (366)..(366): n is a, c, g, or t
  misc_feature (369)..(384): n is a, c, g, or t
tatggttctgcacgtgggtccaatccaatccctaagaaatagtccttaagtcttatggtttagaatgtagagttactctatacaacagggctaacctgaattggatatctgcagcatgtgtgtggcttcatctctacgtggcatcatcctcaatcttctttcttcctgatatcaccacttggatattaagatagtaaacnnnnnnnnnnnnnngagacggagtttcactcttctnnnnnnnnnnnnnnnnnnnnnnnnnnnnnnnnnnnnnnnnnnnnnnnnnnnnnnnnnnnnnnnnnnnnnnnnnnnnnnnnnnnnnnnnnnnnnnnnnnnnnnnnnnnnnnnncgtgccaccacaccgggctnagnnnnnnnnnnnnnnnnattaggagactctgtcgcaattaaataaattaaattaattaaggcgggccgaaggta

SEQ ID NO: 268948 - DNA, 339 bp, Homo Sapiens
  misc_feature (162)..(193): n is a, c, g, or t
  misc_feature (207)..(207): n is a, c, g, or t
  misc_feature (291)..(291): n is a, c, g, or t
ggtcctcggttgaccacctaagaatggtgatagtggtttcggggcggtgaactggactttggctttggctttggctgggttggtcaggtgttgttttaagccctgggaagctgctccaaggtgcaaggttgatggttgatgcctatttaaagaagttctccnnnnnnnnnnnnnnnnnnnnnnnnnnnnnnnnggctacattaggcntggtgtgatggctcacacctgtcatctcagcactttgggaagctgaggtgggtggattgcttgagctcaggagttagagaccancctgggcaaaaaaaagacccccgcccccacagctctaccaaaaaatac

SEQ ID NO: 268949 - DNA, 331 bp, Homo Sapiens
  misc_feature (131)..(223): n is a, c, g, or t
  misc_feature (236)..(236): n is a, c, g, or t
  misc_feature (246)..(246): n is a, c, g, or t
  misc_feature (255)..(257): n is a, c, g, or t
  misc_feature (276)..(276): n is a, c, g, or t
  misc_feature (308)..(308): n is a, c, g, or t
ttccactagctttcctaataattacaaaggaaaagacacaatagtaacaacatgaatattgcttacctattataattatgatattcccaaacacatttaataacctcttcgttttctcttcaaatattcannnnnnnnnnnnnnnnnnnnnnnnnnnnnnnnnnnnnnnnnnnnnnnnnnnnnnnnnnnnnnnnnnnnnnnnnnnnnnnnnnnnnnnnnnnnntctgctatagcgncctgaactangaccaaaannnaaaaggcattcgttacatnggtccaccccactcctacccttctttataggngtcatttgagatgtttgagactg

SEQ ID NO: 268950 - DNA, 342 bp, Homo Sapiens
  misc_feature (55)..(55): n is a, c, g, or t
  misc_feature (163)..(163): n is a, c, g, or t
ctaaaagatccagctttcaaaataggtgtggtaaggctgacacagttaaaaatgnaaaactacaaataaacacatttacatcactgctgttgcaagtgccacaattgagatggatccaatcacttttctaaagaatcttcacaccattcaaacgtttctgttncaagtgaaaccaaccaataaaaacaaattcagagagaagacgtgttcatctcttaagccaacagcatcacctgtctgaagaccactctgcccgacaaagtagtccaacgtgttgctaaagttccatttggtataaaaatacagctttttttcaccatcaactctgcccaggcctttact

SEQ ID NO: 268951 - DNA, 542 bp, Homo Sapiens
  misc_feature (188)..(188): n is a, c, g, or t
gctttcatgatcagccgcgaaactgagaacgtcaagtccagcgaggagattgagagcgccttccgggccctcagctcagagggaaagccttacgtgaccaaggaggagctctaccagaacctgacccgggaacaagccgactactgcgtctcccaaatgaagccctacgtggaaggcaagggccgcgnagctccccaccgcgttcgactacgtggagttcacccggctcgcttttcgtgaactgagccactcccctgggtcacccacccctcgctgcttgccctgcgtcgccttgctgcatgtccgctcctctgtgtgctctcactttccactgtaaccttaagcctgcttagcttggaataagacttaggagaaaatggtgcttcactaacccgcttccggtccagtcacaatcatcatgtcactgtggggacccagatctgtgtcttgaagcagctgccctcattccgacttcagaaaatcgaagcagctggctcctccccttgttctctctcccaccctcccccaaatctgttttcatg

SEQ ID NO: 268952 - DNA, 466 bp, Homo Sapiens
  misc_feature (38)..(38): n is a, c, g, or t
cccagcggccccgaaaaagtccccggggtgaccgcccntgagttgggtgaaaaagacctgcactttcccgccatcctatggggagactccccgaggccttgccgacaggcccgaagcctacccttgaagttttcctgaggacctcagtgccaagtgccccacgggaaccccggttggtgagttggtggtgtgtatatacagttagaggtcagaatcaagattcccctacagtgattctgagcttttatcccaggattggcacctccctgtggactcccagtttcacaaggacagagaaacagtctgtaatgggagtgataaaaatgaaagaataaatttctagggattgtaacattttgtcctgtaaaaacacatcagaaacctagaagcaggagaatgaagtaaatggaatccatataaagaaaatgaggctggaagacggtgtatcagctttattcttattata

SEQ ID NO: 268953 - DNA, 406 bp, Homo Sapiens
  misc_feature (253)..(253): n is a, c, g, or t
gtatgctttgcagcatttcagctgctttggtggggacacagataaccccttcgcttccagctcttaaaattctttatctttttcttggcaaaaccagaattaagagtgtaagatagattccatgtgtgcttatataggtccctgcacagattggacttgaaccaaaattaagtccaaagaacatatgtttaggaccaacttcatggaagtggaagatcctgtgctcttgaacttattttaattcttataattngcacctatataaacaaaggctcctactgtattcttctcttcatcaaccttttgtgggtgatggggttgccttttcctacggggcatttgggaagggagtgatcaaataccgaaattgaactttctaaaacctacacataggctgcgtttaaaa

SEQ ID NO: 268954 - DNA, 435 bp, Homo Sapiens
  misc_feature (406)..(406): n is a, c, g, or t
atttgaaaacagttgagcacacagttgagcatccactaacacttgtggaagggaagggaagaaagcaggattgggcagagtaggaagtgaagctacctgcagtcccaatatcagtgtcagcctgggcagttcttgagttagaatggccatccagagttgtctagactgcacgtgagccatcccaggaaggacataacctcgcggaaagtggctttctgaagctgagacaattccctgaagtgctgacatctgaaagctgtctactgtcagcactcccagcaactggggacacccaagtctttcccttggaaatgagagttggggttatacccagagtatccacttacagacatgtattgaaggagacaataaaaccaaaacttcttgcaggctttgaatgatcccntttcagggcaagggacaatgcttgatgtt

SEQ ID NO: 268955 - DNA, 455 bp, Homo Sapiens
  misc_feature (64)..(80): n is a, c, g, or t
  misc_feature (163)..(163): n is a, c, g, or t
  misc_feature (186)..(186): n is a, c, g, or t
  misc_feature (252)..(252): n is a, c, g, or t
aaaggggatccctagatgttttggtgtggccccctgatggtgggtggtgggtagggaaagtatnnnnnnnnnnnnnnnnnttgaagttttcccttgccctaaaataaaaatccctgaatccctgagcaagcccctcctagatttccgattccctaattttccnggaaatgccaagggaccagaggnccccatacgattagcaaaataccagaatgtgtgtaacctacaatacagtttacctagttttttccncctaagtaaattggaagaaaaagtgagagaaaccccatagattaaaagatacttcaagacatgtgttagccaaatgcagtatatgtgggtctattgatttgaacaaaccaactgtttaaaaaaagtggtttttccctgtaaatttgggacattgactaaataatttgatattaaggaattatagtcattttctgagatgtaaa

SEQ ID NO: 268956 - DNA, 468 bp, Homo Sapiens
  misc_feature (11)..(11): n is a, c, g, or t
  misc_feature (90)..(90): n is a, c, g, or t
aaatttctgcnatcaacttgactgggctaaaggatgctcaaaaggcgggtaaaatccattgtgcttgtgaagggtgtttcccagaaagangatttgccctttgaatcagaagacagcaaagatttccttcagcaatgaaggaggcatccaccaaactgtcagggcccagagagaagaaaaagacaggaagggtgaatttgacctctctgactgggacatccatctctgcctatcctgggacctccacactcctggttctctggccttcagacttgatcagggactaacaccatcgcctcccacccccacctttgttctgaggcctttagcctctgaatgataccactggctttcctgcttctctatcctgcagtcggcagatcatgggacttcttcactccaaaattgtgtgagccaattcccataacagatagataaatttataaataaacacacaaatttcctaaa

SEQ ID NO: 268957 - DNA, 606 bp, Homo Sapiens
  misc_feature (568)..(568): n is a, c, g, or t
gtgaatggacacttaggttgattccaaatcttagctcttgtgaacagtgctgcagtaaacatgggagcagagatatctcattgatgtactgatttcttttcttttgggcatatacctagcagtgggattcctggatcatatgatagctctatttttagttttttcaggaacttccaaactgttctctttcagccatatgaagtgaaaaccatgctctgtaagtgctcacctgacttttagttcctgtgaaactgctgcttttgtgtggatagttgccaatcttagtcttcctgcggggggagtggggtatgatcggtggtgttctctattccaccatcttgctccacccatcctaaaaatgttttcttaggaaactcataacataatgaacaacgtaggttgataaagtatataaaaagataaactgtacaaacattaatcaaaacagagtgacactattaatatcaaatacagtagactccagagcaaagaaaattattagacaaaaggaacattatataatgataaaaggatcaatccaacaaaaatgcaatgatcgtaaatgtgntctagcaaacctcaaagtacacaaaccaaactgattga

SEQ ID NO: 268958 - DNA, 552 bp, Homo Sapiens
  misc_feature (45)..(45): n is a, c, g, or t
atttagcaggaaaggactatgggagaatactttactgtgagtcgnaaatgttagcacatttgactggtttgccctggaatccactgcacctttacactgcaccatgaaacctacactccctggtatcatagcgcgtcatcacctcaacaagtcagtcgtctccattgatatttgtacaaaaggtatacatggggaacacgtgttcattcattaagtccatcttgcgtgcagctatatccctgattggttatttttcctttccttctgaggttctcatgtcattttcttcatcggatgtgactaaaatttttctggtgtcttctgccctctctttaattttgcctcttgaggggtagcagatgtgtcagtgcattttattacttgctgaaacattcaggcttacatttcttaataagtttagtattttaaaagatttaattttctgaatgaggcatttgaattggaccagcaatgggacttttaaaaaattggatgtaaaaccattcaggggtgaatttttccttggtcagtggacagtgacgaacagagatt

SEQ ID NO: 268959 - DNA, 646 bp, Homo Sapiens
  misc_feature (483)..(483): n is a, c, g, or t
  misc_feature (536)..(536): n is a, c, g, or t
  misc_feature (552)..(552): n is a, c, g, or t
  misc_feature (581)..(581): n is a, c, g, or t
  misc_feature (602)..(602): n is a, c, g, or t
  misc_feature (621)..(621): n is a, c, g, or t
  misc_feature (630)..(630): n is a, c, g, or t
gtcttgctcaattcttgtaattaggttcttgttaatacagtcattccatggaattactttttaaaattcctgtgacaattaataataaataacgtgtcagcatttagtaagcatccactaagtgtacaatacttctacaataacacaagatacctgttcctcaaagacaatgcattctgccataatgttcattaaagagtttacagtaaaaataagattagggataaacttctcaaaaattgtacatctgtgtaactaaagcactaacaaaaacatgaatagtccttctagaggtaacttggatagcctaggcaggcaacttatcatgtggtgaaggccgcctcaggggttgttaaaaatgcacaggaaacaattgagtgcgattattgggcttctgaggcgctgagcaggagcagggtgggaaggagggaacttttgaggcacagggagggaaatggcaacccagttcaggggccccaggantccatggccaaatcttcagggggtattggcctcttcttggggggagggagctnccacttttgcaggggncttcccttttaatttttccccctaagggnaaggagctttgaaatgacttnaggactttttccctttccncccctaggngtttaccaattttact

SEQ ID NO: 268960 - DNA, 393 bp, Homo Sapiens
  misc_feature (43)..(43): n is a, c, g, or t
  misc_feature (125)..(125): n is a, c, g, or t
  misc_feature (140)..(140): n is a, c, g, or t
aaccataaccctccggaaaaaacatgccaggataaatttggcnggatggaaagcaagaaagaggggggatgccgcatgggcaaagaacttggcccttaccccccagattcctcctatatcctcanggttcccttttcccncttgactgtctttaccgagtgttttttatttggggaccctcgagccccagagatattaatggatatctgtattcaatatttgacaaaatctaatggaaaccatccatttactcatgataaggcttcatcactggatttctgtgtcttcactagaacaccattgtcatctcatattgatcaggtattttaatctagcacttacatattgttgataaatgaaagctgaattgttacttaataaattcactttgtt

SEQ ID NO: 268961 - DNA, 439 bp, Homo Sapiens
  misc_feature (15)..(15): n is a, c, g, or t
gtatcagacttacantaaagactgtatacccaacatcccacgcacccgagacccacctccccaaaggaggatgttattcctaagctctccccgcagaactgtgactaaaatcacttctgatactcccaccttagtgttttcaggaagtctagcaaaattaagcaacctatactcaaataaggtatgactctaaaagagacagagacagggcatggatgagcaggaattacttcggcagcgtgtacctgcagaacgcacactgctggtgtctgtagcctctttccaattaacagattacgagatgggtctaagccacacaacagggtgaaaaaggaatgtttcgaaaacagcattttaggaaataactataaaggatcaatatattggcagtgcggtgttttaaatattgtctttctaaaacaattcttctgtgccgaat

SEQ ID NO: 268962 - DNA, 528 bp, Homo Sapiens
  misc_feature (12)..(12): n is a, c, g, or t
  misc_feature (27)..(27): n is a, c, g, or t
  misc_feature (66)..(66): n is a, c, g, or t
  misc_feature (82)..(82): n is a, c, g, or t
  misc_feature (94)..(94): n is a, c, g, or t
  misc_feature (125)..(125): n is a, c, g, or t
  misc_feature (129)..(129): n is a, c, g, or t
  misc_feature (466)..(466): n is a, c, g, or t
  misc_feature (479)..(479): n is a, c, g, or t
  misc_feature (493)..(493): n is a, c, g, or t
aaaaatgtgcgngaaaaaggaataccntgtgtgggaaacgtgaagtcttaacgtgccacctaaagnaacaggacagtttagncatcgttacccnacctcccagagatcctcacggtggttaatgncagncctccgtgtgcctcagaacagtgtgaggtggatgaggcactggtggatgtttgcgtggcaaggatggtgggaccccaggcccacgttcttcccgttacctttctctggtgttaacagtttagcatcatttctgctgtttttatacaacaggcgctttttgctttttgtatggactcaagtgaaataaaaactagcaccgccgtaacttataaacatgaccccttttctatctgtagttagaaaggtacagatagtattaaaagggtagcttacttcagacactctgtctctggatctgaccaccgctcgggaggccagcacacgcagagctggcgtncttcatccccagnccgttggctggatnatcggcgaaggcgggagtttcaggttccatccatt

SEQ ID NO: 268963 - DNA, 402 bp, Homo Sapiens
atctctggaggtgggaacgatgctaactgtcctgttcttagtgcacgtaagactcacgctcccacacacggtattccttttcctgcacattatttgacgctatcctgaaaagaaaaccagcaagtgaaatcgaatctgtccgtagagggtgggaatcctgttcactctaagtcagcccttctcctctaatagaggttagctgtacttttagaatggcctaaattatttttctaagtaccaagaagttacatattcattcatgccaactattttaaatatttcattgcaagtaagtgatttttatcaggcaagtaatacgtaatgaacttcccctaaaaataacagcttcctaatagtgctttttctaagcagaaaataatgactgcaaaataatttttaaaa

SEQ ID NO: 268964 - DNA, 287 bp, Homo Sapiens
  misc_feature (223)..(223): n is a, c, g, or t
  misc_feature (240)..(240): n is a, c, g, or t
  misc_feature (246)..(246): n is a, c, g, or t
  misc_feature (251)..(251): n is a, c, g, or t
tgagaaatggaaggaatcctggcaatgtcacaaagcatgtcaaatataacatggacagagaatgcagtttggagaaaagtgaacgagaaaactgtttagcaaatgggactaattactagatcttatttaaaatttttttctcttaatccaatagaccatatggaaatcatgtggattcttaaacagcctggcagaggagcaaggtaaaacacagggaagagantctctatacagtgaaanttctantaggngacatttgaaatcatctttgtgaaaagtaaggaggg

SEQ ID NO: 268965 - DNA, 524 bp, Homo Sapiens
  misc_feature (31)..(31): n is a, c, g, or t
  misc_feature (40)..(40): n is a, c, g, or t
  misc_feature (56)..(56): n is a, c, g, or t
  misc_feature (73)..(73): n is a, c, g, or t
  misc_feature (150)..(150): n is a, c, g, or t
aaaacccgggggagggaaaaacctcgttgcnccccttgantgtgtttgaatcaacnagtacctcccctctaanataaatttattccccgctgccttcctctcaacaaagaccacccagtgatgaatcccagacttcataccttatttgtncaaagcagcacacctgtgaggattccctgtgaaagataaattttgatagggggagggagggctggaggaggagggaccctggcccaggaataaatcttaacatgttgcaccagactgtgaatgagcgcttgcctcacaaagcttgccgtcttgacaaggtatgataaattaccctctttgttgacaccttcattgggttatttatggctcattaattgaaccaaaaaggggccttgtagacccagcaggggcaccatacaatgctcctccaatggacccagctcaaagaaaagaacaaaggagggaagagtgggagcggggcacacaagtgtgtctgctccttggcttgagacactcttcaccaaacaattcaa

SEQ ID NO: 268966 - DNA, 493 bp, Homo Sapiens
  misc_feature (381)..(381): n is a, c, g, or t
  misc_feature (410)..(410): n is a, c, g, or t
  misc_feature (415)..(415): n is a, c, g, or t
  misc_feature (423)..(423): n is a, c, g, or t
  misc_feature (443)..(443): n is a, c, g, or t
agattaagggcttcattcggcgctttaacaaggagggtggcaccagcatattggacaacctcctgctgcgcatggaacagtatgccaataacttggagaagctggtggaggaacgcacacaggcctatctggaggaaaaacgcaaggctgaagctctgctctaccaaatcctaccccattcagtggcagagcagttaaaacggggagagactgtacaggctgaggcctttgacagtgttaccatctactttcagtgacattgttggcttcacagcattgtcagcagagagcacccccatggcaggtagtgacacttcttaattgacctgttattacctgctttgatgccataatttgacaactttgatgttctacaaggtnggagacgattggggatggtttacatggtngtatntgggcctnccggcgaaaatggtcaacgncctgcaccagaaattgctcgtattggccttagcctttattagatgcattt

SEQ ID NO: 268967 - DNA, 355 bp, Homo Sapiens
  misc_feature (264)..(264): n is a, c, g, or t
agatcttgccgttcttttgtcaaacttcttttgaaaaatgtctgttcatgtcctttgcccatgttttaatgggatgattattttatttttgtgtgtgtgaagttgtctgaattccttgtagattctggatattagtccccattggatgtatagtttgcaaatattttctcccactctgtaggttgtctgtttactctgttgattatttcttttgtgtagaagctttttagttcaactaagtcccgtctgtctattttttgtttnttgttgcctgtgcttttgaggttttagtcacaaagtctttggcctagtaccagtgtccaaaagagttttccctagttttctttttcgtaat

SEQ ID NO: 268968 - DNA, 110 bp, Homo Sapiens
agcaataaataatttttaaattaaagtatatacagtttttagccataatgccattgcacacttagtagactacagtatattgtaaacataactttatatgcactgcgaaa

SEQ ID NO: 268969 - DNA, 408 bp, Homo Sapiens
  misc_feature (374)..(374): n is a, c, g, or t
  misc_feature (392)..(392): n is a, c, g, or t
ttgtaaattgacaatttctaattatgtaaatttatggggtacaaagtgatgttataatatatgaatgcaatgtggaataattcaattaagctagtaacatacccattccctcaaatactaatattttttatgatgagagcatttgaaatttactcttttagcaattttaaaatctgcaatacaccattattaattttattcaccatgctgtgcaaggtttttctttagggaccgggggctccttgccctgacggctggtttatttaggtaacatttcattttcttagggaaggcaaataggaattaggaaatttgtcccctatggcatcacatcaagggtctaaggcacacatttccccaaaaggattattttncacatcccacaaaggggntttgtaacggttggca

SEQ ID NO: 268970 - DNA, 173 bp, Homo Sapiens
ggtagaattctggttacatgtgcctttatgtatatatttgtttttttagcccatcaaaatttacttttctcacaatattttgaagatatatggtgtttatattgttgaaaagttttgtgttctttgcattgtctcatggccgtggagttaatacaagatgcactgtaccataa

SEQ ID NO: 268971 - DNA, 403 bp, Homo Sapiens
  misc_feature (154)..(208): n is a, c, g, or t
ttagctaaaatgttttacttttttaactaaaagcaaagaatatacagtatacttgagttataccgaagttacaacttcatttaagaaaataggtttgacccaaaactcagtgcaagtggcaaagttgaccattactgtacagtatctgcaaggnnnnnnnnnnnnnnnnnnnnnnnnnnnnnnnnnnnnnnnnnnnnnnnnnnnnnnncctacaatgctcaaatgacaccacttggaggtgccaaaaccaaaccaaacgaaaaagaaatctgaaataaaaccttgggaaaaagcttccaacactgaattttgtccataaataagtacgaattgaaaattgaactgtgaagcaagaaaaatgaccatgttaacagttaccaaactagttctagcatcagagaca

SEQ ID NO: 268972 - DNA, 326 bp, Homo Sapiens
  misc_feature (159)..(159): n is a, c, g, or t
  misc_feature (190)..(190): n is a, c, g, or t
  misc_feature (202)..(202): n is a, c, g, or t
  misc_feature (237)..(237): n is a, c, g, or t
  misc_feature (259)..(259): n is a, c, g, or t
  misc_feature (311)..(311): n is a, c, g, or t
aaatatttcacattaatacaggctacattacgtagagccactatatgacaagaaatttactcaactttttccttttaagtatgtaaacaattatacatgtatttatcaccctaaaaggttgaaacatgtaatcaactaattctcttctgcatacaagtngtattctgtatgtttaggccaaaagcactangggtcatatgancttaagttcaaaatgggctaaactaaccagaggancataatcaggtgggataggggnatcaatttggttcttatacatgggggcaatcaaatttcccattggctaaggncctcggggggaaatt

SEQ ID NO: 268973 - DNA, 456 bp, Homo Sapiens
  misc_feature (45)..(45): n is a, c, g, or t
  misc_feature (62)..(62): n is a, c, g, or t
  misc_feature (86)..(86): n is a, c, g, or t
tacctcaaaaacccctccgtaaccttccccccggttattggaaanaccccttattacgaccnccccaccctttccctaaccccagncctgtttaccctactgcccgggttaatttcccccccaaactgccatgtcctggggaataacccttgtggttatgacagaattcccccaaaggaaagcaaacttggcaaggtgcaaagacctatgaagaccttagaacttaagagttcctatggagatcctcagaaatataaattagctactcaacatatctgttattctgccctgattgcactgtaaagcaaaaggagagaggccattatggggaaaaagatccaaaaggactcatctaaaacacaagttgggtagaggagataggtgagtactattatattatgttcatggaaaatgagttcatgggctttcctctaatttttattttaaaaataaatg

SEQ ID NO: 268974 - DNA, 419 bp, Homo Sapiens
tcctaatagcacgtattaccatcaaatattccccaccagtacttgtttgtttgtgtttggtttatctcctcctactagaatagggcctttgtttggttcacagtggcccatcctatgagctcagtaaatattcgaacatatttcctttaacacaaaaaataaaaggattctagaatctgtaagcctccagccccccgtaattctgtcagcagttaatagtgttgccactttaagtaaatatgattattatttatttttcccatgtaaagaatagtttacagtttttactactcttacttgatttaccttttccacactgaatttgtttagattttttggaaacagatttctcgtccattaagatgctttgaactaagtgttcttgaacatttaaccaaaactgtaggagttctctattt

SEQ ID NO: 268975 - DNA, 332 bp, Homo Sapiens
  misc_feature (98)..(98): n is a, c, g, or t
cagcattcgaagttgttactgagaaatggccagtctgagcaacgtggtgcatttctgcagttccgcacgggactttggtcagtgcgtgttttgggttntcagaatttgccttttccatgactctgactgcagacagcctccttctgggcagtctgttgctgttggcagcggccactcccgagtgcccttccaccctcgctggttcaactttgactgtaaatgtcatgaatgtagccactagaggtcatatcattgaaagatgtcatttcagaggaatggggaattcagacagtctttgtcagcccttgataaaatgtatttatttgtacctc

SEQ ID NO: 268976 - DNA, 567 bp, Homo Sapiens
  misc_feature (510)..(510): n is a, c, g, or t
cttatttgaaggggccacaaagtgcaaacagaataaaattctctgtcctcaaaactatgtgcaaacctgaactttccccagggacaggaacaagccttggcacccactaacctgtctttattgacagaatcgcctgcaggtctggcactggcagccaccacaggctctgtgcaaggcttcgaggcgccgaagagtttaggggtactggagtccagtggcagtagctgtggactgctatgagaagagagcatggtgcccgccagaggcccgagacggtgaatgctgttaaagaatgccgtggagaagtccctgtcatcaagtaagaacaaaagtcagccttgaaagtcaggtgccacatccagtactttatacattcaaataacttttttctaggtccaaaggcagtatgttttcatgatagaaaatctgcaaagttacagaaaagtaaaaagaaaattaaagccactttaatatactatatttaattggaatctaggatttacagggtcnatatggtactactaagaaaggaaaccatgctactaattgtcagatgccattgactgt

SEQ ID NO: 268977 - DNA, 162 bp, Homo Sapiens
tggcccccaccccatataccccggccgagggcggagaggaggaggaggccaggtcctggtggagcctttgcccagcccagtcctctctgcctcctcctggctgaagctgtttgtcaggattaccctcgggctaaagaggaaaaataaagatgttgagctacc

SEQ ID NO: 268978 - DNA, 486 bp, Homo Sapiens
  misc_feature (65)..(117): n is a, c, g, or t
  misc_feature (394)..(394): n is a, c, g, or t
ccgttccctagcacgctctctttctagttctctctctttttctctttcccgatcccgttcacgtnnnnnnnnnnnnnnnnnnnnnnnnnnnnnnnnnnnnnnnnnnnnnnnnnnnnnagccctttcatctctcctatcatccactctgtctactcttcgttcctctcttctttcatcacgctcaagctcgtcattccttccctgatgtcgaattggtgagcttggtctttgatctacaatgaaaatcaagttttgtcagtgattaatttgacagataacctattggtaagacagcatggtaaatcttaaattttatctgtgtataggggtcacactgggcaacaaattaacaaaccaaggtaagcatatttaattttaacttaatatccaaggnaacaatcggcccctagaccttaaattttttaaagataatttttaatttggccctctaacgaccatgtttcctgctccccgtcaacccccttc

SEQ ID NO: 268979 - DNA, 545 bp, Homo Sapiens
  misc_feature (17)..(17): n is a, c, g, or t
  misc_feature (45)..(45): n is a, c, g, or t
  misc_feature (96)..(96): n is a, c, g, or t
  misc_feature (104)..(104): n is a, c, g, or t
  misc_feature (122)..(122): n is a, c, g, or t
  misc_feature (141)..(141): n is a, c, g, or t
  misc_feature (149)..(149): n is a, c, g, or t
ttttccccacttattcnatcttatttcaaaatatttaatttctantacattctcacacatccaggaattactgggattctggaataaaatgcaccngcatctgngatatcattaggcagtgngcacatcttgtaaaccagngaaagttncactcccaaggtctatgagcaggtgcaatacaccttggctgctgaaacccacatctgcagagtcatcggaagctggactgtgagtgcttgaagcacaagtgtatgtgactaaaaccaaaggttttactctacaatattcctaaaaagtcaaaagtgtgatgaaatacacaacccaaataggtagtttaaaaagaaaaaattaaatgatcattatcctataagcaatgatttttggtttaaaaacctcagttgagtcaactgaaaaacattagaaataatgagtccagaaacatagctaatcataagataaatatgccaaagacccatggctttcttggaaacccacaaaaatatatttagaaagtatgagaaaaaaatccctattctcaaaagcaa

SEQ ID NO: 268980 - DNA, 387 bp, Homo Sapiens
  misc_feature (92)..(310): n is a, c, g, or t
  misc_feature (314)..(314): n is a, c, g, or t
  misc_feature (321)..(321): n is a, c, g, or t
  misc_feature (371)..(371): n is a, c, g, or t
tagaaatgacggctcaggagtcatgcagccaaaggcttcgagatcatgaacctccccaattgctcctgtagataatattattattgtaaaannnnnnnnnnnnnnnnnnnnnnnnnnnnnnnnnnnnnnnnnnnnnnnnnnnnnnnnnnnnnnnnnnnnnnnnnnnnnnnnnnnnnnnnnnnnnnnnnnnnnnnnnnnnnnnnnnnnnnnnnnnnnnnnnnnnnnnnnnnnnnnnnnnnnnnnnnnnnnnnnnnnnnnnnnnnnnnnnnnnnnnnnnnnnnnnnnnnnnnnnnnnnnnnnnnnnnnnnnnaccntagcctncaaatttttcaggggaggttgattttgagtaataataaaaaccctggttntcctgttttaaaaagt

SEQ ID NO: 268981 - DNA, 471 bp, Homo Sapiens
ggatgataaacagccccttccttgagaccaacccaactccttgcctggggacccagaaagcctttgtaaaactaaacacattggccacaagattagaaatgacggctcaggagtcatgccagcaaaggcctcgagatcatgaacctccccaattgctcctgtagataatattattattgtaaaacctaacatgggtgtttgaggtatttttcagaccctgccttctgatggatcagctggcaccacccagaccagtaaactggctcatctggtcttctggcccccacccaggaaccaactcagtgcaagaggatagcttcaactccttatgatttcatccccgacccaaccaatcagcattcccgcttcccgagccccctgcccgccaaactacctttaaaaaaccctagcctccaaattttcagggaggctgatttgagtaataataaaacccctgtctcctgtttaaaa

SEQ ID NO: 268982 - DNA, 293 bp, Homo Sapiens
atgtagttttcttttattctacacaatccaaattaaacagcttttggtgatgcaattgtacactttcttaagaatatatctaataccacattttagcagaaccaagcaatgactgacattattcattgggatctggccactaaataaaattcttttatgcataattgttatttctttgtctcttacaccaccatttcttctctaatattaaaacatctgaaaacccagtcagatattatgctaaaaatgaacttaagtgttatattggtagggtgttttccaacaccatcaac

SEQ ID NO: 268983 - DNA, 834 bp, Homo Sapiens
  misc_feature (546)..(546): n is a, c, g, or t
  misc_feature (646)..(646): n is a, c, g, or t
  misc_feature (656)..(656): n is a, c, g, or t
tagaactcgcttgaaagacaagaccaaaaacgaagaggacgtttccctagatggtgaaaacaagtggggcggaatcactgcagcgtcctgcacagaactctggaattgccactttgcagttgctgccttctagtgtgtattgttgaaagacagttttattgaggcataattggcatacaataagctgcatataaaaatgtgtacgtggatgacttttgacatacgtgtacacccgtgaagctatttccacaatcaagataatcaccatccccttcactctggaaagtttcccatgcccttggtaagcccaccctcctgcttcttgcctcccatccccaagtaacaactgtgctgctttctgtcactacaggttaatctgcactttctagaatgtatgtaaatagaatcacacagtatgtacttgtgttttgtctggcttcttgcttagctgagcataaggattgcgagtcatcatgttgcatgcattaatatgtattcgttttattccaagtagtatccattggttgatgcaccagttggtaccgntcacctgtgatggacatggaccagttggttgtgactattccaataagtggataacacatgtaaaacagaagaaaaaggcttattacggccgacgtatcgntagtgggtanttactgcatgcggcgtacaacgggatggcatgggtcacacaatcagtgggccgaccctggagtaaggccgccgctctccggcgcgagcgcgccgtccgtgggggtggcgagatcagcgcgggttctcttgcggcaaagagcggtctcgaaaggtgcggagtctgtgtccaccggagcg

SEQ ID NO: 268984 - DNA, 375 bp, Homo Sapiens
  misc_feature (43)..(43): n is a, c, g, or t
ttcccatgtacacacaaaatcaccataaacacagagtaaatgnaatgcatgctgcccaaatacccagttgagcagaaaattagtctgggataaaaaaacgttttaagaggatgccatgaactttttcaaagagacagccatttttgaaagcaactactgcgggtctgatctagggatactgtgatgtttccatttacatactatatatctactggtttttgataaagatcatattataatcaggccaacaggttggtaagtggaacatctaacatcaactcattaagcagaataattttaggatgtttctaggaagggttcaatacagtattctggatttcccttcctaatcactgattgaaaagacaagaatta

SEQ ID NO: 268985 - DNA, 234 bp, Homo Sapiens
  misc_feature (18)..(18): n is a, c, g, or t
  misc_feature (24)..(24): n is a, c, g, or t
  misc_feature (37)..(37): n is a, c, g, or t
aaattcaaatatttttgnaaattnagaatagcaaatnaagtgggaaaaaatggactgtaaaaaaagaaaggactattctgtgagaccaatttatgacagaggtgatttaacttataaatgcttcatcacacttctaccctaggcggggttgccaaaatcatgagcatgttaatgttagctggtgctttgtgtgctcagaagatatcactaaagaagccgaacacggtggtgcat

SEQ ID NO: 268986 - DNA, 339 bp, Homo Sapiens
  misc_feature (234)..(234): n is a, c, g, or t
cagtgatttttaattttagcattgtgattaacaccttctaaaattgccagaacttaataaataattgcttttcattattagtatgccatcaaatttagtagctgtttcaggctttaatgtgtcaagcctaaaatccagatttttgaggatcttctccctcttaaaagagtattcagttaactgccgtaggaaatacacatgtatacaagggcactgtatacatcagtctaaaanataaaaatatgtatacgttctggtgagtctagcacagcattgcccaatagaaataccaatggaggtcacaaatgtggcccatataggttaattggtaaattttct

SEQ ID NO: 268987 - DNA, 361 bp, Homo Sapiens
  misc_feature (33)..(33): n is a, c, g, or t
aagagctctgcctggggctggatgctttgcccnagaggagagtgaaagcccacaaaccagaacccaaggctggagaatgaaagttgcagcccaaacttctgcatatttttcaccaaacgacacaagttatttgtcagagactaatgggctcgttcctggctggcctataagggctgtgtgagatggtaataaagaggaagagatgtcaaatattaaaaggcaaagaatttcagtggctttgcagcagagaagtccattaaatcagagccttgagaaaggttgtgtggccaaatcatttttttcagagctcaagtaagaacccagctaggtgataaatgcttcccatcccattggtatatat

SEQ ID NO: 268988 - DNA, 541 bp, Homo Sapiens
  misc_feature (507)..(507): n is a, c, g, or t
ttaacttgttgcattcctcctagcatctagcagagtgccttacacaaagtagggactcatatatctatgagtgcccgcataaatgaagaaacgaagcgtacttacaatgcaaatattaacaggataagaaatatttagccaagtaccaccccttctgacacagcagaatacttacaagggatctgggccattccagatcaccatctttctttctgaaatgatatcccaatcactagggctctgttcagacagtgaccttgtaaagcccgaggagcaccctagagaagggaacacaggaggagcaggaaagggaacacgggaggaccaacgcccagatctcagcgtgggtcgccagaatggacccatattagtcatttgggggttgcagaaggagggggatgcaagcccattcccagggacggccttccacccggcggggcaattgaaggggaaatgacttgacgtaggggggctccagcgcagggggccgaggaggattgcgacacnggggagagggggccccggggacagggcagcaagg

SEQ ID NO: 268989 - DNA, 281 bp, Homo Sapiens
  misc_feature (17)..(17): n is a, c, g, or t
  misc_feature (38)..(38): n is a, c, g, or t
  misc_feature (50)..(50): n is a, c, g, or t
  misc_feature (72)..(72): n is a, c, g, or t
  misc_feature (94)..(94): n is a, c, g, or t
tctccggttccccaaantgacccttttgtccccctganaagccccgaggntttcccctgaagttacccttgnggaagcacgtttcccctgaagntcccaaatccctaggcatttgcccccattgacctttaaaaaccctggaggcagggcctatacagccctcctctggcctcctctgagatgcccaggcttaaagtcttacaagtagcaaatcctcaacaagtatttgttaaatgaatgctttaagcaatctgtggctgggtgcagtggctcacaccttt

SEQ ID NO: 268990 - DNA, 267 bp, Homo Sapiens
  misc_feature (162)..(162): n is a, c, g, or t
  misc_feature (251)..(251): n is a, c, g, or t
atgagccaccacccccaactacattgtgaagagttaagtagaatgcattcatttacttccttaaactcagccatgagaaaaaaagatatatgtgtgcaggcatgcatggtgtgtatgcactttaagatataagggaaagagaactatgccgacctgggcagntactgaaaaaaggaaatgattttctattcgttaaaaaaatttacatcaggcaaaaaataggcattgggttaaaaggttcttactaaggntacattccttgtagga

SEQ ID NO: 268991 - DNA, 440 bp, Homo Sapiens
  misc_feature (23)..(23): n is a, c, g, or t
  misc_feature (338)..(338): n is a, c, g, or t
  misc_feature (358)..(390): n is a, c, g, or t
acccctgagtatcctcgagttgnggcatttgttatagagttgacaattttctgcattatagcctctcattttccatgaattccatatctgaaacccattttagaagggagaagtcatccgaagtattttcctgagtgttgagaagaatgagttaaacccatttaaacacatttgaaacatacaaaaatagaaatgtgaaagcatttggtgaaagccaaagcacagagtcagaagctgccaccttagagaactgaaataaaaatagaagttcttacgcttttttgtggtacagatgctttcgacaatttaaagaaagctaaataaaaatgtagacatgntggcgcagtggctcatgctnnnnnnnnnnnnnnnnnnnnnnnnnnnnnnnnnaggattgcttgagtccgggagctcaaggcaaagctgcacaacataacaag

SEQ ID NO: 268992 - DNA, 470 bp, Homo Sapiens
  misc_feature (349)..(349): n is a, c, g, or t
  misc_feature (370)..(370): n is a, c, g, or t
  misc_feature (427)..(427): n is a, c, g, or t
  misc_feature (453)..(453): n is a, c, g, or t
ttaaacagactaatttatccattagttctatccaagatgtatctaaaaagataaaagccacataaaagggatcacagttcacggatgtttgctagttgtgtatcagtaagactgtcttctagcctacgagttaacctgaaatatgaatattcatagatttctgagggcacaaggattcattcatcacacacatggttataggagacaagtcatagtgtaggctatagaatactaggattgagaccaaagcctgtttaaatttcatgtctgagttccagccatgacagaggtaatggaatactgggactaggacttccctgcccatccaacttactatcggaactggggnaaaaaaactgttgggccagtngggaccaccagccaggtgccaggacgggctcccctgagggggataggccccccccantcacctgggggtgtcttgcttggggngtcccttttccctggac

SEQ ID NO: 268993 - DNA, 418 bp, Homo Sapiens
  misc_feature (408)..(408): n is a, c, g, or t
ttaaaacctgggtgctccaaaagaactgcttcatttttgatagccactggacaattgtttataattattttggagctgcaaacccctttgaatatctgataaaagctatgattcttttcccagagaaatacattgtacacaaatttttgcatacaatttcaatttgcatatacctcttgaaacctatctgtagatcctataatagtgatcaaatttcaatgagtatgtaactcacctgggattgcttgttaaaatatagatgacctattctcactgcccaaagtttggtgcattaagtctgggagttgggacttaggactctgtctaacttcctccctaactcccgactctttttctctttttttcaaaggaggacaggggtctttgttggggcttcaaggggatccntcccggccta

SEQ ID NO: 268994 - DNA, 399 bp, Homo Sapiens
  misc_feature (292)..(292): n is a, c, g, or t
  misc_feature (361)..(361): n is a, c, g, or t
ccaaaataaaggcaataaagagccactgattaccggtaagtactctctttagaccctctgcaaataatcgggaaatatttaagtaaactgtattttttcaaatgatattattctaaacagaaaatttgaaaataaaagaattattagcaataaaactatacattaatgtcaatatcattcttaatggcaattgcaatattgtacagtcacttggtaataaagacctactttagaacatttagaacacatactctgtaatagctgatctaaaacagaagtaggaataaccaanttcttaaacctcgggtatctttgtaaagtgtgggtattaaaatatcctgcatctaaatcatttgaaggngcttggaggtgcttggttaaaacggccgtgggcttcac

SEQ ID NO: 268995 - DNA, 583 bp, Homo Sapiens
ttaatagacagaagaatttaatacatgtgatgctttgccttccatttacactatcataaattacaaagtattgttcacttcacaaaataaaaccatttccagataattttttgacagtatcaagaagtacataaactacaacaaacaaatctgtacagttgggaggagggataatagcagggaagaggtcaaacctccctgtgccaatggagtccatctgcatagcccttgggactgtccaggtcaacagtcacacaatgatgctccacgtaaaatagtcattctcttctgctcactccaaagcaagactggtgagtttacacaaatcatctcaatcaaaggaaaagacattgcagttggattttttaaaaatctagatttacagtttttgatgttttaaatatttcacctatgttacaaaatatagaaatcttggtgtgaaaggctcatgctaagataaatataaccaagtgactggaactgtagtaataaaatcatattatccacacagagctacttttgtcaaggaggaacaaatatttggtaaaaaccaaccttattctcactttaaaaaatatgtttg

SEQ ID NO: 268996 - DNA, 504 bp, Homo Sapiens
  misc_feature (157)..(157): n is a, c, g, or t
  misc_feature (196)..(196): n is a, c, g, or t
  misc_feature (348)..(348): n is a, c, g, or t
  misc_feature (474)..(474): n is a, c, g, or t
cgagttgacctcggtcacaaaagcagttttactatcgaatcaatcgctgttattttttttaatgtaatttgtacatcttttttcaatctgtacatttgggctgtctgtatgtttttatagctggtttttaaaaagcataatatgcctatagctgatnaggaggcaacaggggctgtttaggtcactggccttatgnggaaagcaaagactggtacagttatttaacaggcatacacaagcagggaaaagataatccaatttagatctttaatgctttgggaaatgcgtgtaacagtactgcaataatcacagctctggggaaaaacaacgaaactttcccttgtggangaggagggattttcctggctctatataagcaacatatttttagacattaaaatatatataattttgcaggtaattgttgacttttttaactatattaagtgttaagctgacaactgtcaaagaagnccatgttgtaaaataatttgactaaataaa

SEQ ID NO: 268997 - DNA, 348 bp, Homo Sapiens
ggaagcaggaaccaatctgagaatgaggagaaaacaaggagaatgaccccccttagagcacccttattggttttatggcaccccctatttgccagagtaaaatggaagtaatacagtctttgtgcaaatttacattgaggaaaaagagccctaaggtcaacctgcaaattctagagttcctagtccgtttttctctattttcctttctgccatgctttaagtctgctgttatttttccactgagataaaaccactgtttgggtctaatagttttttgggtttttcttgcaagctggcaaatttgtatttatctcatggctaaagtactggagtaaaagttatagaatc

SEQ ID NO: 268998 - DNA, 489 bp, Homo Sapiens
tttctacatatttctgctcttctgaacaacttctgctacccactaaataaaaacacagaaataattagacaattgtctattataacatgacaaccctattaatcatttggtcttctaaaatgggatcatgcccatttagattttccttactatcagtttatttttataacattaacttttactttgttatttattattttatataatggtgagtttttaaattattgctcactgcctatttaatgtagctaataaagttatagaagcagatgatctgttaatttcctatctaataaatgcctttaattgttctcataatgaagaataagtaggtatccctccatgcccttctataataaatatctggaaaaaacattaaacaataggcaaatatatgttatgtgcatttctagaaatacataacacatatatatgtctgtatcttatattcaattgcaagtatataataaataaacctgcttccaaaca

SEQ ID NO: 268999 - DNA, 648 bp, Homo Sapiens
  misc_feature (55)..(55): n is a, c, g, or t
  misc_feature (117)..(117): n is a, c, g, or t
cctgaggggagtgggagggcccgagaatctgagggggcccggggaagctcggccngggctgccgtcttacatctcagtgtgacatgagtgtcagtaatagccaggccccactgggtncttgtgggcctgaggggctcgatctgggacaaggctgatgacaccttccacctccacccagttaaggagagtcactgggattcacatggaaagaaaccttatacactgtgtacagtgggggtcttcatccttgatggtaggggagctagcaaagcctttttctcccccttcaggctgcaggtgccaaccaaggcagtcttgggaggcatcctgcttctgtgctggttgggatgccttttcataccaccaaggctgcttgaaataggtgagaatgacacttctcacccccactgggaagatacatctatttcccccgctaggttgtcacttcccaggaggtagcgcccctcttctttcatctccataccccccacaacttcccacacagtagtgctgcttgcgagataaaaaccaaacttagaacttgtaacaacaggaaggttctaagcttgagctatgcaatagaaaaatttgcaagccacatttctaactttgcattccagcctgggcaatagagtgagacttcatctc

SEQ ID NO: 269000 - DNA, 294 bp, Homo Sapiens
  misc_feature (11)..(11): n is a, c, g, or t
  misc_feature (25)..(25): n is a, c, g, or t
  misc_feature (46)..(46): n is a, c, g, or t
  misc_feature (57)..(57): n is a, c, g, or t
tatacacatanaatattatatatanttggtctgtttgtagttttantactagatganttttccggttgtccttaaaaccccttcctgaggttcccttcacccctctctcttgccttccttccctttccctttcttcctgactagccccaagtcccttcatttgcatctgctatgcaatagtccctctcctttccttcttcttccctcagatttagctgatccttcctcccaccctggccttcctttcctctttcctcctcactctccccgtcatgctccctctgccccgccctc

SEQ ID NO: 269001 - DNA, 465 bp, Homo Sapiens
  misc_feature (121)..(121): n is a, c, g, or t
aaaaaatgtttcctacccaaacgcctgactgtggcccccaaacctgaaaaaaccccaaatgtcccatcccaccaaccccaaatggcccatcccacagtttgaagcctacagttgaagtcancagggtcgaatacctacctgaacagcaacgaatatgaaatgaaaatatcgctatgcacagcaacatggataaatttcacagacatgaggtcaagcaaaagaggtcagagtcctcatcatcaagagagaattcattgtatgattctcttcctacaaaaagtacagaaataagcaaaactgatccatggtgttagaagccaggggaacagttaacaggggagggatactggggaggggcatcctggagtgctggtctacctcatctgggtgttgatttcacgagtattgtcaagtttgtttccaagactccctgttggagatgtggaaataaaaaccacctaaaca

SEQ ID NO: 269002 - DNA, 457 bp, Homo Sapiens
  misc_feature (62)..(62): n is a, c, g, or t
  misc_feature (80)..(80): n is a, c, g, or t
aggccttggaggaaaaggaatggcaagttatgaaaggaaggctctctatacctggctccccnagtgttccgcccctgganctgagcatgaggagccaggctttggggagactttgcaatcacccccccaacctggtccattttccacaggtagctttcttgaactcaccttgacccctcctcagccagcagcccccacctccaggggcaaaggagctgaaagacagtcctgaactggggggagctgggatcacatcagccaggccctgtccctcacaggaagtgagatgaggtgataccatggatggtgactaaggccccaaagtccctgcctctctgcctccccagaaacctcacagccaggccagcccccagagcagagcctgtgtaaacatgcccaggaggggaggaggggttgctacatatgagaaacagttaaaaataaatttaaaaagcac

SEQ ID NO: 269003 - DNA, 468 bp, Homo Sapiens
  misc_feature (387)..(387): n is a, c, g, or t
  misc_feature (403)..(403): n is a, c, g, or t
  misc_feature (412)..(412): n is a, c, g, or t
  misc_feature (428)..(428): n is a, c, g, or t
  misc_feature (432)..(432): n is a, c, g, or t
aggagcattgcccgtcagacagcaactcagagaataaccagagaacaaccagattgaaacaatggaggatctttgtgtggcaaacacactctttgccctcaatttattcaagcatctggcaaaagcaagccccacccagaacctcttcctctccccatggagcatctcgtccaccatggccatggtctacatgggctccaggggcagcaccgaagaccagatggccaaggtgcttcagtttaatgaagtgggagccaatgcagttacccccatgactccagagaactttaccagctgtgggttcatgcagcagatccagaagggtagttatcctgatgcgattttgcaggcacaagctgcagataaaatccattcatcctttcgctntctcagctctgcaatnaatgcatcnacaggggattatttantggnaagtgttaataagctgtttggtgagaagtttgcgag

SEQ ID NO: 269004 - DNA, 483 bp, Homo Sapiens
  misc_feature (92)..(92): n is a, c, g, or t
attgtaaatgtcatctcagctggctcagttatatctctaatgtcccgggtagcagcacctccctctaaaaatatgtttacttcgctgtttcnacttggtattttgtgtatacgaaatggcagcttccggatttctagttggatttgtcttgccattgtttgtataacttgctggtcacccagggctatttgctttttcattgagaaatttggtaggggtgtctagttcagcttttatgttgatccatcctgacttattttagacattgaatttatctcaccacaagtaaaagaacatgtgtattgactgtctttgctaagtttcctaatttttcctaattatggcgaattatggatgtgaataagaatactgatgctgtacaaatatttttgtggaaatgtaccttgttaatgtgactatttaaataatatgaaaataagaatactcttgaagaaaaaattaaaatatttactctttggaaaa

SEQ ID NO: 269005 - DNA, 357 bp, Homo Sapiens
gaatgtccaagcccaacgttccttacctccagaagagagagaatcctgaggtgctcatgtggagaaacactggccccctgtttgcttctgattttaaccttgtggttgccgtgtctcctgtaacacagtgcagaggaacacctcctctaaattgtgatttctcagatggatgggccccgttggcagtattgtgtttaggactttgtaaccaagactgtctttgctaagtttcctaatttttcctaattatggcaattatggatgtgaataagaatactgatgctgtacaaatatttttgtggaaatgtaccttgttaatgtgactatttaaataatatgaaaataagaatactcttg

SEQ ID NO: 269006 - DNA, 481 bp, Homo Sapiens
  misc_feature (333)..(333): n is a, c, g, or t
ttcttttttcctcatatattccagacttgaaattgaagaagtagcaacctagaaataccaacaatgaccaaaataaaattccaataaagacctgcttttggtagccaaaagaccaggagaggggcagactagcaagacagaaactttcagacaattactgctctacatccaaacaccacaaaaaagactatagttctattctacccatgctagcaaagaatgagtgggaagacatttccacttctatggggttgtaatgaggcacttcaacatccctgacacagagattctagaaaaggccagtaggaagctgggaaccttcatctccaccangtaagtaataaagtcctactccctttggtgtcagtggacaaaatgtgggaagcttggattttcactctcacctggcagtcatgaggtgcttctctccatctgtccggggagctatccaaaaaggccgagcggagaagaggaacttttg

SEQ ID NO: 269007 - DNA, 604 bp, Homo Sapiens
  misc_feature (59)..(59): n is a, c, g, or t
  misc_feature (101)..(101): n is a, c, g, or t
aaaaaattctgggtaccttctccccagaattttgtgtttaatgccttacactgaaagtnctttacatcctgttgaaactcccagccccagcaaaatccccnggtggcaaccttgccatgggccctgctgcctctctgcaccctgtggccatgggcagaatggaccgagatgccctcacttctgaggaatacagcacactgaaggcccgatgtgttacaaagcaagagaaccattctacggggtacggtttagggttcacagtaacaaacaccaatcagctatcctattccactggcccagatctgcccttaattgcatgactgggtgaaccacacacaggctgatcacagacagactgatcttggtctcagaaacaatcctgtttgtctttcattttgggaggcatgtgggggatgtgggagaggcagtaaagaggtatgagagggtgaaccagaaggacagatcttaatacctctgtttcaaaggaggcagctgtggtgagatgaaagaacactgactggacaaggagtcagaaggcccaagttcaagccctaaccttaccttagtttaccagctatgtgatcttgagcaaaaatcccttcac

SEQ ID NO: 269008 - DNA, 627 bp, Homo Sapiens
gaaagttatacttaaataggaaattcatttttgagaaatagtaatttaggaagaagacctttatgacattttagatgtcactttgcttgatatatttgctccctctagtgagtattcctgcccttgtttgcaatattttacagatttaaggcaagaactagcagttcgggaaagacaacaggaagtaactagaaagtcggctcctagctctccaactctagactgtgaaaagatggactccgccgtccaagcatcactttctttgccagctacccctgttggcaaaggaacggagaacacttttccttcaccgaaaggtttgtaatgtcttttctttttgaggcgatgtgttagatgatcagcttacgggggtttgttgctgaaggcggttgctaaggtttaaagagtaattttagtttaaaagttggtgaagtctagtgctatgtgaaatagaagaaggaattgttttcctaggccactaatatataggaaacagtgaaatgatggttacatttaagatgagatttttaaaagttaaaggtttttaaggaaagtttattttttgatgatagcaatagattttgtgattacagccgtatgtttaggtagaaaattttaaaaacacag

SEQ ID NO: 269009 - DNA, 475 bp, Homo Sapiens
  misc_feature (20)..(20): n is a, c, g, or t
  misc_feature (41)..(41): n is a, c, g, or t
  misc_feature (48)..(48): n is a, c, g, or t
  misc_feature (53)..(53): n is a, c, g, or t
  misc_feature (76)..(76): n is a, c, g, or t
accgattcaactttataacnctagtttaaggcattcgcatntgaaccncctancctaataaaactataacaagtanaatactagtttatcagttcccaatggttttccatagaaacaaagttaaatttaaacttgccctaccttagggcaacctcagataatgaattgaactaaattcccagtcctacttcctgcctctgctcttgaaatcttttagaatcgctgaagaggctgacctatttggctctcttgagaatcaaatggatgtctcttgtacatggaagggatacagaagtaaaccacttgacctctcatgaccagttgcttaagcttctgccgttgcattaaagctgatagagcccagaaaaaaaactgtagctgtggtgaaggttatttaaaattaatgcaaagataggacacaaaggaaacacctgcttcgttaacatgcctagaaacaactataccttttctcact

SEQ ID NO: 269010 - DNA, 596 bp, Homo Sapiens
  misc_feature (45)..(45): n is a, c, g, or t
  misc_feature (63)..(63): n is a, c, g, or t
  misc_feature (416)..(416): n is a, c, g, or t
  misc_feature (423)..(423): n is a, c, g, or t
  misc_feature (476)..(476): n is a, c, g, or t
  misc_feature (498)..(507): n is a, c, g, or t
  misc_feature (527)..(527): n is a, c, g, or t
  misc_feature (567)..(567): n is a, c, g, or t
  misc_feature (572)..(572): n is a, c, g, or t
cttgatcaagaatgattggaaggcaaacaggtttacaaatcaatnctgtgacttttaaaaagntgacaatgttgtcagatttaaaccagtgtggctagtaaaaagcagctcactcaatgtgggtggctccctattcctttacgctccccctatccctaccccacaagcctttcgattataaaatactaccaatcttgttataagattactgtggagtagtcaagtactccccgggccttctgagctggtggaatattttatttcagactgaaaacagagagcactctccttgggaagggaaagcggacttggctggagtgagagatgggagcctcatgggtgtacaacttgagggtagttaacttcattcacttctcccaaggcactcgatcccagctttcacccactgggtgttngctttgnttggaactgtttcaagcctttttataggccttaccattaagtatttaggatangggtgtcctttttctgtttttnnnnnnnnnnagttttgttgtgtttttttnaaagtaagtgcttaagtattaaccttgggggtgtcccctntgtanggtttcgaagggggttttggggtc

SEQ ID NO: 269011 - DNA, 189 bp, Homo Sapiens
tgagcaccttgcacagccaaatcaagtcacttttaaaatacaaatttattatatgtctaagggacattatcgataaagtgaaaacacaacccacagaatggggaggaaaatatttggcaaaccatgtatctggataaggggtctaggaatccaggaatatattaaaggaactctttacaacttcaggta

SEQ ID NO: 269012 - DNA, 418 bp, Homo Sapiens
  misc_feature (130)..(130): n is a, c, g, or t
  misc_feature (367)..(367): n is a, c, g, or t
gtatatatttatgtacaacatgttgctttgaaatatgtaaatactgtggaatggctacattgagctaattaacatatgtattaagtaatacatatgtgaattacttatgtgaagtcacataacttttttnttgttggtgaggacacttaaaatctactctcttcacaattttcaagaatacaatacattgttactaactgtagtcaccatgttgtacaatagatctctcaattctttctatgtaatgggaaatgtatcccttgaccaacctcaccccctccctcaggcccccaccacaaataaaacacggtatcaaataggacaaaggccaaggcctaggccacggggttctttggcccctttgtcnggctggctgttctggtccttttcagactgtggggaggcacttgttcactta

SEQ ID NO: 269013 - DNA, 406 bp, Homo Sapiens
  misc_feature (66)..(66): n is a, c, g, or t
cagcccttttcccataaaacccaagaagtggtgaattttggccaaaatggtttcccttcccccttncccaaaccccacccagaacccttgccctttgggaaatatgcttggccttatacttttccaaatatagtaaaactttctttcaaagttaaactgaaaatactggtctttacatagtatttcttgaatcaaaattggcctattaatttctattaagcaatggtaggtttgccagattgaagggctgtgtcaactggctattttagaattaagtcagagcatccaaggatataggtcacagaagggaacattgtagccatgaaatgtgggagttgtagcaggcatgacacttgtctgaagacaccagagttggctctttctttactgtgtctttgagcaagcc

SEQ ID NO: 269014 - DNA, 231 bp, Homo Sapiens
  misc_feature (188)..(188): n is a, c, g, or t
  misc_feature (190)..(190): n is a, c, g, or t
  misc_feature (192)..(192): n is a, c, g, or t
aggttctgccggaatttgaaaagtgccttaccatgcgggatactatgaagtatgtctatggacaccatggaattcgaaaaggactctatcgtggtttatctcttaattacattcgctgtattccctctcaagcagtggcttttacaacatacgaacttatgaagcagttttttcacctcaactaaaanananattatggttggtttttcttaatacattctcagagggaga

SEQ ID NO: 269015 - DNA, 401 bp, Homo Sapiens
  misc_feature (34)..(34): n is a, c, g, or t
cccacagagaccaagttgctgtagttctcccagncatcaacatccctgtacaggagcctctgagccagggtccagttgctgcccattcctcttgggtgaagttcacagtcaggccctggaatgaaactggtatctgaaagaaaatgtttaatcttgggtgacccaaaattgagtgatatcaaatgtatggtaacataaactataagaagaccactgccatggctaatggaaagctatagagagatgtaattgtgggagggcagaaaattaaaaatctgtcactgtgttcattttttaaaatgaattttaaaaatgtgctgagcttataccatgtcctggagctattccaattgcctggattactaatcacataaaatactaatcttactctttaggagcct

SEQ ID NO: 269016 - DNA, 359 bp, Homo Sapiens
  misc_feature (47)..(47): n is a, c, g, or t
  misc_feature (55)..(55): n is a, c, g, or t
actataacactcctctaaatatacataagacaatattttagtgagtntaaagtanaatgactcttagatacaacatataaaattactaaatatacaagaaaaatgttaaactgaactttataaaaattaaaactctgcttatcaaaagtcattgttaagaaaataaaatgtcaaagcacatactggaaaaaatatttggaacacacatatctgataagaacttgcatctaggatatataaagaatgaccaaaaaaatctaattttaaaatggacaatagacttaaatgaacattttacaaaaaaggatatagttatggccaataagcagatgaaaaggtattccctattattaatcata

SEQ ID NO: 269017 - DNA, 366 bp, Homo Sapiens
caggtcaacccacaggcccatacaccagtcaactcaagcaggatttcatccaaaagggctagactgccctcaaattgtatacagaggctgaaaacacagactcttgtgcaaaaggacactgtctcttctgtttcccgctgaaaagccatcaaccaccaccactttcctggggaccagtggttggggctacacacaccaccgcactggctgaaagtcaccacttatggaagtttccaggtccatgagagaagtgtcaaggagtcactctggtaatgaacactgcagaattgacatgtgcctgctgagaaggaatcacagtgcaggactgtggagagtggtctgaagaaaaggatgtgggttatttgc

SEQ ID NO: 269018 - DNA, 616 bp, Homo Sapiens
atctcaaatctcccaaactgttgcaaagagaaagaagcagaagatggaagaaaattttgaagcacctgcctttctaaatatgaggaagaggaagagagttacttttggagaggacttaagcccggaagtgtttgatgaatctttgccagcaaatactccattgcgtaaaggaggaacacctgtttgtaaaaaagacttcagtggtctcagttccctgctgcttgagcagtcacctgttcctgagccattacctcaaccagattttgatgacaagggggagaatcttgaaaacatagaaccacttcaagtatcatttgccgttctcagttctcctaataaatcatcaatctctgagaccctttcaggcactgatacctttagttcttcaaataaccatgagaaaatatcctctcctaaagttggtagaataacaaggacttctaacagaagaaatcaattggtcagtgttgtagaagagagtgtttgcaacttattgaatacagaagttcagccttgtaaagaaaagaaaattaataggaggaagtctcaagaaacaaagtgtacaaagagagcacttcctaagaagagtcaggttttaaaaagttgcagaaaaaaa

SEQ ID NO: 269019 - DNA, 458 bp, Homo Sapiens
tttgcaaaaacaggataacaacgtcagatagcactttaatatactagaagaccaaatggaactaattttatttcatacatatattttacagtccagtagacaagatatattgtatttctctgctagtaaagtcatattctctccaaatatgtagacaagaggcttaatgtattataaaagtattatgaagagacattaagattgatgcaaactcaaaaaacacactcacacacaagacttttttttctgccatctttcaccctctaactcgcgatggctccacaaggttgacctgttacggctgttcccagacttgatcaccagctggaattacagtgcgtcacatcaggaaacgtgcaccttacatccgtcagttattgaatacagtgaaaacatatccatcatctgagaaaacttgaagctttctttcaggatctgtttgggtgtaagtaaatctc

SEQ ID NO: 269020 - DNA, 386 bp, Homo Sapiens
gtcaaaagactgttaactataaagcccacaataatcaagatagtgtggcactggcaaaagaacggcaaaatagatcaacaaaacaggacagacagccctgaaacagaacaataaaaatatggtcaactaatctctcacaaatgggcaaaggcaatttaatggagaaaagagagtcttttcaataaatgaggccaaatgaactggatatctacatgtaaagaaatgaatctagacacagattctttatacctgtcataaaaatccaaaatggattctagacttaaaacataaaatacaaaactataaaactcctagaagacaataaaaaagaaaatctatgtgaccttggttttggcaattacattttagatacaacagcaaaagca

SEQ ID NO: 269021 - DNA, 512 bp, Homo Sapiens
gtgctataattttttaatttatgacatggtcatataagagtgcagcagtttgacacactttcaatcaagaggtggaatctacatccctctgttgtatacaggaatctacatccctctgtgactcgtcgcccagtagaatatggtagacgtactgctgtgctggtttcttgactcagactttactggtagggttacttcatctcatgaaatgacagaactgtcttgttacaaagtctggctactttgctgaagagaccacatgaagaggccctgaaactacgtagagagggagaggcacctgctgaaccctgtcttcttgacatccaccaagataccagacatttgagtgaaattttggatccaccagaccagccaccagctaaatgccagtgagcgacttggtaacctgaactgatgccatgtagaatggaagaattgaccagctgagcccctgcccaaatttctgacccacaaaaacatgagatataataaaatggttgttgttttaagcc

SEQ ID NO: 269022 - DNA, 421 bp, Homo Sapiens
acattattgacaccatagagatacaccttagactactttgtcctcttctacagctagcctggcatattctttttaggtactcaaaaaataaacttaacgagataccagtgagaaccttctagatgctgaattgtccagtataacggaataaggtcttattaactttccgtgacagaaaaacccaggtatttaataaaaatatgagccctgttttggttttgacaacctttttacattttaagactatgttaacatattaacattttaatttacctgtcactgaggggaatggattcatgttaacttctcataaagaggcgtacagctgtggcagcatggcgaaaccctggactccataaaaaaatacaaaaatttaggctggggcatgggtgggttattgcccattagttcccagctactt

SEQ ID NO: 269023 - DNA, 701 bp, Homo Sapiens
gttatactacagtgctggttccgtagtcttcaaagcttggaactccctcttgcctttgctccaaaaatttgttctttcactcagcaaatatttaccaagtttctgctatatgcaggaccgtgtggagaactcaaagatgaatcagacgtggggcctgtccacaaatgttgtcagtcaagtgtaggacatagggcaagcacacgggagcttttgctgttgtgtccaagaatagcatgatgcgccgtaggtatttggtgggggaaggaaattagtgggtgggtttcaagtaaacccacatgggagaaggtgacatttgagttgagccttgaaggacaggtttatcctgtgccagagagggaagttttagggcagagatatagcacaaaagttagaaaacaaaacccaaaacaggtggaagagaggaagagtaatcaacctgttaactgcgttgccatgcccttgactgaggcctcaccccacattatccccatctaatcctcctcataagaaaacttttttcctcataagaaaactaaggcctgcagcattaaaataacttgcccgagaaggctcataagtggttagagtggagatttgaacccaagacagttcaattccagatttgaactgagcaggctttagccagagcaaaagatatttgaagagaaaaaggagtaatttgaagagataaagtttaggaa

SEQ ID NO: 269024 - DNA, 564 bp, Homo Sapiens
  misc_feature (35)..(35): n is a, c, g, or t
  misc_feature (424)..(424): n is a, c, g, or t
  misc_feature (444)..(444): n is a, c, g, or t
  misc_feature (472)..(472): n is a, c, g, or t
  misc_feature (488)..(488): n is a, c, g, or t
  misc_feature (492)..(492): n is a, c, g, or t
  misc_feature (515)..(515): n is a, c, g, or t
  misc_feature (542)..(542): n is a, c, g, or t
  misc_feature (546)..(546): n is a, c, g, or t
acaggccacgaaacagcaatccagcaggctagccnactctcctgctggtgctgttggatgtctatgatgctgggaatatggggcgcagaagccagaaggcacggtttgcttctgtgacgtgacagatggccagactgatggcccaccaaatgctggccggccctcctcccttgccagcctgtcctgggaggctgcagggggcctgaatactttgcttgttctccatagtttgtcattgggtatcaatgctgggatcctgcatacatcatagcacagacaagtgtgtgagggtctgaggccctggctttgaatcctctctccatcacgtgacttctgtgagtttcagaaggtcgcctaaacccttctgaggctactcagcctcctcaactgcaaaatgggaaggctaatgcatacttccctgggnatcagtgagggccacatagnataatgtatataaagtgcctaacacagntcctggtacgcaggangggntggtaaatgtgagtcaagtatgnacatctaaacatcataggccaggtggnaagnacatctaacaaaatctat

SEQ ID NO: 269025 - DNA, 394 bp, Homo Sapiens
accaaagaataaatgtactgtattaacatgaagactaatgacaaatgcactgcagtagtaagcacgtcatagatgcatagaatattctctatatagtctgaatatggatataaaataagttatactcattttgttttccatcacagtaggagcatagcatacaaagtgattggttcagtggccatgaagcaagccaggggagagaccacagaagagaatgtagggcattgagtacagtggggatttgccaaggacactgcagagtccctggggaccctctggggaacaaggccccaaacctctcaagttagccttctgagaatagtatgaggtcccacttgacaagagacagtggctgcatctgagctgggatgattcaggcaactgggtggga

SEQ ID NO: 269026 - DNA, 282 bp, Homo Sapiens
gaggacagacaagggggaagaaaaggaaaaaacagagccactcattccaaagttctcaattcggtgcataagaaaatgattcctatttgttgcaggtgaaaatgtttgatgtgccggctcctttacctcatagttacagtaagaagaaatttaaaaattgggatcaaagatgcagccgccttcccatttaagcagcacagacagcccaaagtgacagttttcctgtacagttactcttctgttatctgtaactgatctatgacattttgggaaaaaacagcc

SEQ ID NO: 269027 - DNA, 151 bp, Homo Sapiens
gttcttcatttctttctgcctttgacagccccttcctgtctataaaactaacctcttctacccagctcattgcagcactctctgtattttatggagtgaatctgttcctgattcaatgagtctgttgcctgattctagaattgccctgtgc

SEQ ID NO: 269028 - DNA, 982 bp, Homo Sapiens
agcctctgaactcagacgtgcagtacacggaagttcaagtgtcctcagctgagtctcacaaagatctaggaaagaaggacacagagacagtgtacagtgaagtccggaaagctgtccctgatgccgtggaaagcagatactctagaacggaaggctcccttgatggaacttagacagcaaggccagatgcacatccctggaaggacatccatgttccgagaagaacagataatccctgtatttcaagacctctgtgcacttatttatgaacctgccctgctcccacagaacacagcaattcctcaggctaagctgccggttcttaaatccatcctgctaagttaatgttgggtagaaagagatacagaggggctgttgaatttcccacataccctccttccaccaagttggaacatccttggaaattggaagagcacaagaggagatccagggcaaggccattgggatattctgaaacttgaatattttgttttgtgcagagataaagaccttttccatgcaccctcatacacagaaaccaattttcttttttatactcaatcatttctagcgcatggcctggttagaggctggttttttctcttttcctttggtccttcaaaggcttgtagttttggctagtccttgttctttggaaatacacagtgctgaccagacagcctccccctgtcccctctatgacctcgccctccacaaatgggaaaaccagactacttgggagcaccgcctgtgaaataccaacctgaagacaccgttcattcaggcaacgcacaaaacagaaaatgaaggtggaacaagcacagatgttcttcaactgtttttgtctacactctttctcttttcctctaccatgctgaaggctgaaagacaggaagatggtgccatcagcaaatattattcttaattgaaaacttgaaatgtgtatgtttcttactaatttttaaaaatgtattccttgcca

SEQ ID NO: 269029 - DNA, 359 bp, Homo Sapiens
acagtaaaacttcagtatctttatatatgagtatatagaatagaaaaattgtatttgtaagtagaatgacataaattattttttcacttaaaaattacaacttttgcttattagaataaaatgaacacatatgaagtcaaccctgaaggaaaaaaagtcaaaaacaactttgaggaagtgacaagaaaatattttaggattaggggtgtgtctcattactcccaaatgggcattttgccagtggccaaattttctttaactaaaccaaggaacaatgttgattattaggtgctggcatccgggctcggggtgttcacattttttcagttttcatggcacattacttgtcttgctttccc

SEQ ID NO: 269030 - DNA, 463 bp, Homo Sapiens
cccctgatttctgcattcattcagcaagtatttatgatgtcacctggctccccgccagacactggggaaacaaacgtggagacagggcactgccccaacaggaacaattttgggggacagctaccctgtctggtgcaccatcctcacctgcacctggcaaggtgggtgaatggggaggaatccagacaggtgacctgggggatggcgggctattctctgatttggggaacacagagaggacagggggcaaagtggaaagtaaatgaagatgaacgagttatatctacaagtctgaagctggagaaagatgtctgggcttcaaaggagatttcggaggcagcggctcacaaggaagcgatcctgaaatcgtgggcttgaaggtgctgagtgctcagtctctccaaggatgatgatgctttacagagtactggtgtcacttcctgtactgggtggcatcgggctg

SEQ ID NO: 269031 - DNA, 441 bp, Homo Sapiens
ttgggtcgtaggagccagttgtcatgttactatacagctactgaaggaagaagagtccctagtgaggccccgggtgaacagcccctccctagtattctgtgtgaccccccattcgacccttttaacaaatccctaagtaaataaatagcccctaaggtaaactaagtttttctctgctgtttttttgcttgagagagctataactgtaatagacttatatttctgaacattttagtgcttgccaatatttggtaatatttatgtttcctatatttgtaatgaacattcttcttcaggtacatttcttgttaaattattgtttcatgcataaaagttcaccttttattgtataaaattgactcagattaatttatacacattgacaatgggtaaatagagtttttcagattattaaaagctgaaggatgcccatgtaagcaa

SEQ ID NO: 269032 - DNA, 443 bp, Homo Sapiens
  misc_feature (285)..(285): n is a, c, g, or t
ggcataagctgatttattatttatgagaactttagtataagaagcatcctgcaatcacaaaagtggaactagttgatattttgaaatcatacttgatttaaccaccttcagaaattctataaaacactagcaacttccttttatcagacttatgaggtagttacattatttttccttttattgacatgattcatcaaaaaattattttatccaagctcataaactaagtcaataaaactgcaagggaaaaatgacaaaaattctatcttatgcctggatcttagntcaaatccaaatgttgccctcggggattccaattcttcatggtcacagttaagtaggtacttattatggtattttacagtgatacgacccaaaatagcagcagtgtgctcctgaggtgtgccaaaagtgtgccctgtgaaatataagtattatcaaat

SEQ ID NO: 269033 - DNA, 422 bp, Homo Sapiens
  misc_feature (339)..(339): n is a, c, g, or t
  misc_feature (361)..(361): n is a, c, g, or t
  misc_feature (366)..(366): n is a, c, g, or t
  misc_feature (377)..(377): n is a, c, g, or t
  misc_feature (384)..(384): n is a, c, g, or t
  misc_feature (389)..(389): n is a, c, g, or t
  misc_feature (398)..(398): n is a, c, g, or t
tattatatatacccaatgtctacatcaagttactactgcagaatttcatcatgtaatgcagacaatgtactaacaggtatacatatgtatctgcatatgaagtgctaaaagaataatggctagaaagaatttttaaacaaatgtattatagtattaaatattaaggataattataaaaaccactataggccacttctaatgccttaccccttactttctgattactaatcaggtttattaaaatttatcaaatgtgggccatgcccagtgggcttcatggcctggtaatctcaggcactttggggagggccagggtggggcgggatcacttaagggtcngggaagattccaggaccaggcnggggnccaacctgggncaaaacncccancctccaacnaaaaaataaccaaaatttaggcgg

SEQ ID NO: 269034 - DNA, 185 bp, Homo Sapiens
ttcctctttggcttttgcttttgctctctctcacttctttccttattttgttgcattggtagagtgttgtatggctagcattgtattgtatgtaattaattttgcacaaaagcaaacatttagcatagtaggttaattttgtttgtttttatgaccatgccaaaataatattctgggctggtgga

SEQ ID NO: 269035 - DNA, 271 bp, Homo Sapiens
tttgcctgcatgataaagcaaacatggtaatgtttttagatttcaaatactacttttgcttcttattccttgactaatctttttcctaggatagtcaatcctttatactgattagagtttattacaacaaactgaaaactgaataattatttacattcattttaggtcaattattgctgtgacaaatttcaaacattccaattattacagtcactaatttttggttattttgttggcttttctaaaaaattattttaataatttcctaatt

SEQ ID NO: 269036 - DNA, 246 bp, Homo Sapiens
  misc_feature (51)..(51): n is a, c, g, or t
tattaaagtattgaactacaattgaggaagcatatataataaagcccactntttaaaccacgtaagagaaaaatcaaaagaatgcaaaaacgtttgtaaaaattaaagcattgtgctcactgaagtgaaatgatctgaaaataagaatgtcaatattgcttgagggtgagttgcaaacatgttaaggtaaactatcctttactgtgataacataatggcagtaaagaagaaaaatccgacaaacgt

SEQ ID NO: 269037 - DNA, 352 bp, Homo Sapiens
taaaacccaaatgagatctacagctctgtctgtaggggtttatccaggagttgcagtgactactgtagatacaaagggaagtcctggtactggctaatttgaacttgcaattgttcactcgcctaactatacatgtggaataaagttattaccattcaattatgattacttgaccaatatatctgtgtgtgtgtgacagatgggattttgagagtggacaagtgggatccactggccatctggtaattttgcctccaaaccttaccttgaggaatttaagtccagaaggattctgtaattaggttaggaaggagcacagtttacttttcttcaacaaaactgggacttttcc

SEQ ID NO: 269038 - DNA, 362 bp, Homo Sapiens
  misc_feature (28)..(28): n is a, c, g, or t
  misc_feature (52)..(52): n is a, c, g, or t
  misc_feature (57)..(57): n is a, c, g, or t
  misc_feature (80)..(80): n is a, c, g, or t
  misc_feature (85)..(85): n is a, c, g, or t
  misc_feature (91)..(91): n is a, c, g, or t
cctgggccctccccaaaggggtgggggnttataggacatggaggccacccgnccccnggccttaattttcctggtcaccncagantcctgncagataaagtatcatttccagtagtggctttagatgtggtctgtctgcccatctgataaccgaaaatttatcactttcatgaataagtgtttgcagaccaatattcaatagttggataaattttacattaatatatttaaatttattctgtccttatcaggtggtttgatttaataattttaaataattaaaacaggaattaagtctagtttaaaaaaaattgtctccagtaagcctaccaagaaatttggtatttcattaggtcaaaaaa

SEQ ID NO: 269039 - DNA, 530 bp, Homo Sapiens
  misc_feature (42)..(86): n is a, c, g, or t
  misc_feature (154)..(172): n is a, c, g, or t
  misc_feature (306)..(306): n is a, c, g, or t
  misc_feature (368)..(368): n is a, c, g, or t
  misc_feature (389)..(389): n is a, c, g, or t
  misc_feature (421)..(421): n is a, c, g, or t
  misc_feature (438)..(439): n is a, c, g, or t
  misc_feature (441)..(441): n is a, c, g, or t
  misc_feature (456)..(456): n is a, c, g, or t
  misc_feature (460)..(460): n is a, c, g, or t
  misc_feature (472)..(472): n is a, c, g, or t
  misc_feature (485)..(485): n is a, c, g, or t
  misc_feature (496)..(496): n is a, c, g, or t
tttcaccatgttgctcagggtggtctcgaacgcctgagctcnnnnnnnnnnnnnnnnnnnnnnnnnnnnnnnnnnnnnnnnnnnnnaagaaccatcgcgtccgaccctaacttttcattttctgtttggaataaaaacctataccaactataannnnnnnnnnnnnnnnnnnattgccatttataattgtagtttattggcaaggatggtctaagtttgccaggtctaagtgttgtaggtgaagggtgctacaaatgagatacaacttcagaagacatctctagggactaaagactttacattggncaggcagcaactttttcctgcttgttaattttagacctgacagttgaatttatgtttgagcnattttagctgataaatgcatnttttaagtaccttcctcttttggcattttaanttttactttcgtttttnnanaattgcaaatcgtgnatgnatgtgcatattnaattagcatgctnctaggcagggnaacaatgcattttcttttgataccttctcatcca

SEQ ID NO: 269040 - DNA, 377 bp, Homo Sapiens
ttgcataataccaaagaatttattgtaaatgtagtggcaaatacattcagaataatcatcattaaaaaggaactagaaaattatacatgtttaaagtatgtgcttttttcccaccacctttaagttaatggctagtaccaacattttaagtaatgaaatacttaatgtgatgacccattttcagataatttcatgactgtatcttcatcttaatttttaaagcagttgaccatgaatttcagtttcagttattctctgtttttatcaattccgtaatgatctgcaggaatcttgtcattttcaagggacatctttggattttcaagcttttttcttaaaactgaatcaatgagaactctcagctgcttgaaaatgac

SEQ ID NO: 269041 - DNA, 1180 bp, Homo Sapiens
  misc_feature (96)..(96): n is a, c, g, or t
  misc_feature (307)..(319): n is a, c, g, or t
  misc_feature (900)..(900): n is a, c, g, or t
cacagtcctgcatttactgcctttcacttaatgattttggacaggttttagagagccaggatgttggtctgggcctttatttggttttggctttantgataatgttttagtgatgtcagctagtgcagttctcaaatggctgcctattagggaaagaattcagaggatttgactgctcctaatcatctgtcattgctgctagataatgattggcaatttttaagactcaactggaaatctcaacagttgctggtaaaccattaaccataaaaacgttgcttttgaacaccagtgctgaaaaaaatannnnnnnnnnnnnttgagagtgaaaagggcttggacttaagataggacaatgtggagaatggggggaagaatgcaaaacgatatagtatcccttatggatggtacatgtgcaacagggaactcttacttcatataccctttgcagtaatcattcagggaggaagaaaaacctggaacttgaatgaaggctgatctttgttttgtgcactgtggccctgccagcatatagtgaaggtgaatgtcttctccctcagaaaaaaattggttccttgctgtcccagtaaggcatagcttttccagccctaactttaaaactcagtgaggacttagatgggaaagaatgaggtaaatacaaaggattgcaggacaacaactacagcgttgtgtactgtgggaaagggagttgggcactcttggaggactcatgctgaaggtggtcagcatgcctgacaatggaagacatacttgaatggggagcagggtatgtgctttcatatggaaaaaagagctgatgttaaactcatttggtgaggtcacggtgcacatacctcgacataggatagttatttgtgtgcagctacatgtgctacatgntgaactggactcaggttccattttatgaacaagatcgttcatctcggggcatattttggagaaatttgagatccccccgccacaggaattgtcctgcgatgtgtgtagagagctcatgactgtgctccttgtcttatggtgtattggcgagctgtctctgtctcgtagatggaaggagggtgcgcatcagcaactgtctccacaaacatgcaagagcgctctttgtgtgcgcagaaggcgctgtgtaaaaacacagtgtgcgccactcatgtgtacaagt

SEQ ID NO: 269042 - DNA, 270 bp, Homo Sapiens
tttataaattgcccagtctcagtatgtctttaacagcagcatgaaaaatggactaatacacagggctcatgatacacacaactttgtataagttgcccaaactttgtataagttgctttatacatattatttcacttagtcttaatagtatttcacttagtcttaatagttgctttatacatattatttcacttagtcttaatagtaaccatcagaggtaaacttctctgtccattctagagatggagaaactaaatacagtagttgtca

SEQ ID NO: 269043 - DNA, 477 bp, Homo Sapiens
  misc_feature (13)..(13): n is a, c, g, or t
  misc_feature (32)..(32): n is a, c, g, or t
  misc_feature (50)..(50): n is a, c, g, or t
  misc_feature (247)..(260): n is a, c, g, or t
  misc_feature (290)..(371): n is a, c, g, or t
tgttacttgaaanccaccctactccccacaantgggaaaagccacagaangggggaggtttggtgcctgttttccatttttaaatccaggatacacaaattcctaaagcaaaaaataggccaaggggcaagtggctcacgccttaataatcctcagcactctgggagtgtgaaggccggaggatctcttgaagcctaggaattcgagatccgccctgggcaacaaagcacaagacccccatctcttnnnnnnnnnnnnnncaaattagctgggtgcggtggtgtgtgcgnnnnnnnnnnnnnnnnnnnnnnnnnnnnnnnnnnnnnnnnnnnnnnnnnnnnnnnnnnnnnnnnnnnnnnnnnnnnnnnnnnctgtatgtaaaaataagtcaataaataagcaaaaacatggttttgttctgaattgtgactgatgtgactgacatttattgattggaaaattaaatttagctcacct

SEQ ID NO: 269044 - DNA, 659 bp, Homo Sapiens
  misc_feature (22)..(22): n is a, c, g, or t
  misc_feature (29)..(29): n is a, c, g, or t
  misc_feature (73)..(73): n is a, c, g, or t
  misc_feature (98)..(98): n is a, c, g, or t
  misc_feature (469)..(469): n is a, c, g, or t
cccccttgaacaaaaaagtggnaaggganccagatgggaaaaccccaccaactcctttgtaagacgggggagnaagaggccatatgtagccccccatntcccaacttcccctgccatgtaagacagggggggtaggacatatggcacagcaatgacctcacccaaggccaagaatctgctgtctccccatgagtttaagaaaatatttgctggcctcacagatatggactgtctgttaaacagacagaagtgtcccctctttaccttagctccacaaaacaggagaacactgttggaaaagatgagaagagcaaaaaaaaatccctctggagaatgatctaaaattcatttggtaagtcttcacatttagaaaaacaaccagaatatatttcaaattgcaaaatagtaataaattactatagcctggcagtgaacaaggattctgcctaggaagggctatgatctaccnagcccatggctgcctcctgttttaacaaaagggataaagattaccccatgtcccactctcttcattccttcagccttaagaaattcatcaagagaggaggagtttaaagaggagctgcttctggcagagcaatcactactcttctcttcatatacaccatggctcttctgagggaactctacgaataggc

SEQ ID NO: 269045 - DNA, 826 bp, Homo Sapiens
  misc_feature (768)..(768): n is a, c, g, or t
gaagaatgacctgggcattcagagctacagcagatggcaagtttataaaggagcagagtgacgtgtcctgcacagaaacacatgactgtcgagaccgttatttaagtctaacgggcatttgcgttgcacagtgagttggagataactcgggggatttacaagtccagttgcttgaaagagtcaaattgattgtggccttttctttcgctgctcataaactattaccacccagttagctttatttatttgtggtgttaagaatcttgatgtgaccgaagaagtctgtggcatggtgcaaaggcaggcccaacactgggaaaggactaattttttttgtatattgagagaaaagtttcacatagactggccagagttccgaagcacaactacagacagcgtcattgacagggggacttggcaggacaccttgatccaaggcgacaatttttggcaaggacacggaagttgggtcgttgcatccatcatcaggagttgacttgttctgagcaactgaacagaacacaccgcgatgctctcgacacttccgctcctgggacttcagtcacgagtgagttgatggtgacttgacctgagagatttcacagaagctctgtgacttggttgtgggaaggaaatctgaactgtttcaagttaaccaacttggtttcatttttaaatcagggcaaaagccacagtggggtttcccctggaggagggtttagttcaaagatttctggttcaaggttatggacccttttggaacattgnattttttttccgcaggttgttccacaaacagctatttgatgttttgatgggtgttttt

SEQ ID NO: 269046 - DNA, 327 bp, Homo Sapiens
  misc_feature (260)..(260): n is a, c, g, or t
ctgaacagaacacaccgcgatgctctcgacacttccgctcctggacttcagtcacgagtgagttgatggtgacttgacctgagagatttcacagaagctctgtgacttggttgtggaagaaatctgaactgttcaagttaaccaacttggttcattttaaatcaggcaaaagccacagtgggttcccctgagaaggttagtcaaagacttctggtcaaggttatgaccgttctgaacactgaatatttctccgcaagatngttccacaaacagctacttgaatgtatgatggtgtatgcttggtcctgggggaatccaccggcaagg

SEQ ID NO: 269047 - DNA, 509 bp, Homo Sapiens
  misc_feature (364)..(364): n is a, c, g, or t
  misc_feature (372)..(372): n is a, c, g, or t
gcagtttggtagtccccctttctggccccttggagccacacacgtttcatctttttcccctctgagagcaagaagagacatggcatgttctctgggaccctggaatcctaggtacccacatgtgtgccaaagcctaccccacctggcaggtgtcccacagcaacagaaggaatagtagtccccactctttccatcagccctaccctaccctcattccccgacaccctctggcttgaaccatggctgagcagtgccggcatacgctttgctggcatgcttggatgcccagctgtgtccagaggtggcctgggaccgccagttgcacgcctgccacctcagccagcccccgcccatgctcattcangtctgaantggatgttgccttaaaattggcaggtggtaccgtcactcactgcccttggagctgtgaccggctcctgcctgttccaccccttcccgaggtggctcctgcttaccttatcatcccagggctctgattagccaggcct

SEQ ID NO: 269048 - DNA, 427 bp, Homo Sapiens
  misc_feature (57)..(57): n is a, c, g, or t
  misc_feature (75)..(75): n is a, c, g, or t
  misc_feature (116)..(116): n is a, c, g, or t
  misc_feature (146)..(146): n is a, c, g, or t
  misc_feature (173)..(173): n is a, c, g, or t
gccccagcctaatttttgtgtttttaagtaagaagaacagggtttccatcaatggcnccaggatggtccacgaanctccctgaacctccgtgaatccgcaccgcctcagccttccnaaagtgttgagattaacaggcctgtgagcnactgcgccctggcctaaattctcattnctatatggtccctgacataagtactctgtgcataacaacaggatgctattgtaatttcccaggagtgtctcatacatacatatatatccattttgctattcttgctaaaaaggcataagcgaaaacacttctgtcaggaaatttgtgagcagtatcatacaaggtatccgtatctctaaaaaaaatcttgcctgtcttttcctttacaatttctaggcagaaaattcattagtcatgaaaagattaagtaaaca

SEQ ID NO: 269049 - DNA, 331 bp, Homo Sapiens
  misc_feature (58)..(128): n is a, c, g, or t
  misc_feature (194)..(194): n is a, c, g, or t
ttattttttattatactttaagttttagggtacatgtgcacaatgtcagggtttgttnnnnnnnnnnnnnnnnnnnnnnnnnnnnnnnnnnnnnnnnnnnnnnnnnnnnnnnnnnnnnnnnnnnnnnnagtagtatcattctattatagctgcatggaaaaagttaattcattaatacaatggatgcctaaggncagaagtactcaaacttttggtctcagtactcctttacattcttaaaaatcattaaggaccccaaagaatgtttgtttacaagggttacttacattgataattaccacatttgaaatgaaaactgaggaaacttagg

SEQ ID NO: 269050 - DNA, 351 bp, Homo Sapiens
ggccccataaattaaatccatattccattaccttatccggccctatttagatttattttaaaagtttatttaagtaaatatttttataaaaacccagaaaacactgtattacaaaatattatttattaaatgtagttcaggaaataatctatttttactcttttttgggaaatacttgtgtttttgatacatctccatgaagttcttttgagaggagaggctattttgatgtttttatacaactgaaggttaacagccatagcattttatgatactttacaggtagtcctggctttttccctgaaacataagcttggaaaatctattagaaagcagaacagggcaaactct

SEQ ID NO: 269051 - DNA, 334 bp, Homo Sapiens
acatcctaaatctcttaaaagagcagagtccttaattacataagacaaataacaacaacaacttcaatggagcagtcccaaaggaaagtaatggccatgtacttaacatttaattcaaactaaattataaataattgatactgggattctttcctgttacacagaagtcagggcagagtaggaaccactgaaccactgaaatggggagtgggtatttccaaaaaggaagggcaaatgggtctcccaaataaaaatgtttataaaataaaacttagtagctttttttctgctggtgggacatgtgagaaaaaaggtgcagattcagagtctgact

SEQ ID NO: 269052 - DNA, 391 bp, Homo Sapiens
  misc_feature (43)..(43): n is a, c, g, or t
  misc_feature (56)..(56): n is a, c, g, or t
  misc_feature (199)..(199): n is a, c, g, or t
  misc_feature (202)..(202): n is a, c, g, or t
actgaactgtatcctcaaaatacaagtccacccttattggtgnagccattcctcantaaattcatcagcaagaatatcaggtatcaccattattatttagcattatttgggaagcatagctaaagcaattagataagaaaatgaaataagaaatttaaatgttagaagagttgaaaaatattaaagtttatatgtactnatnccttgggggcaaaacacaaataaacagaaaatttaatgggagaaattctgggctaaccctttgctgttgccttagctcaaagtgattttgctatgtaggcatttttaggtgaaccttttagctaaatataatttcaaacttttaaaaatggcatatatataccctttaccccagatttacctatttatg

SEQ ID NO: 269053 - DNA, 452 bp, Homo Sapiens
tgccagtgcataaggcagataattgaaagttcgttcatgaatgtatctgaatctaaaattctagacccaatcctgaaataaaattaatgaaatatctgttcctatcttgatttactaccctaataaacaccaattaacgaatgaataaattaattccattaatcctgaggttaatttaggatcctatttccagcaccctggtttccttcaatatttgtatatagtctcctttcatgataaatacagtcttttttcatggtaaacgtatgtttgtatgaagaacaacaaagtaaaactgagataaagagaaagcatctactttcatataaagccacccattacgaagtcacagcattgctcttttgaaatttcagttgtattgctacagatacttcacaaccaatgattgactacttctgtcttcttcaggagctttaaaactcaaaactcaa

SEQ ID NO: 269054 - DNA, 960 bp, Homo Sapiens
  misc_feature (88)..(88): n is a, c, g, or t
  misc_feature (108)..(108): n is a, c, g, or t
attgcaaacagcaaggcagtatagcccacactcagccactagcccccagtccccaggactgagaatgagtggggaggctggggagttngtgagagaaggtggagatanggatttctgcttcccagtactctatcattagagaaaaggaggggtaaatattagctaagaagaagaaaaaagcttattcttcagggacccagtagattggacgtaagcaagtaaatattgcacaggcatcatgatgtaatagttgatggaccccagagatacccttcacccatgcagagaacaaagctgtgtggaagagcaactaccataagatggtgtgttccttccagcggctgttaaagccatcctgaataacaaatcagctattcctacctacagacccattccaatatgctgtgatacacgacacggtgcaccgcagtaggagacagacatcttcagcacaaacacagatgcctgcaggagcttgggcaagtcactaaattgcatgaaattgtgaggtgcacaccaaatgcagggatgggggaggccgtggggaagctctgtattctcaaaatttgacagctaattccggtttttagaaaatgcctgaggccagtagaggccctctagtcacctcactgctgctgtttctgatataattattgagaaagctatcctcacttaatagaagaaaacacgcactatcaaaaccagatagcctaacgtgcatgtgaaaatcgagaaagctgaaaacaaatcccaggtacccttctctgaactggagtgtttccacagacttgaataatttatgaaattatcacaccagtatttctcatatcaccaagaagactttctctcctgcagtagaggattgttatatttgcctaaaaaacacgattccaatatatgacaagggcagataatttataagtgaatgttaataaaattggatgtgtataactttaagcg

SEQ ID NO: 269055 - DNA, 364 bp, Homo Sapiens
  misc_feature (348)..(348): n is a, c, g, or t
tgagccaagcaacagtctcccatttggaatacaacaatgttaagaacagaaaaagatccctgacttcatgggccttatattctcacagacagatatagacgttaagcaataaatatataaataagtaaattcttattagaattagtatattagaaagtgattaattgttataggcaaaaactaaaaaaagatgacgaaatttgaaagcttgtagggggaggggaacggcaggttacaattttaaacaggggtgctcaggggtagggcctcattgagagggacgggtattttaggcaaggcgcctgaaggaaaggtaaggggagggtaggccctgtgccaaagctgggngccagtgggggtcccg

SEQ ID NO: 269056 - DNA, 495 bp, Homo Sapiens
  misc_feature (147)..(147): n is a, c, g, or t
ttcatttgtcatgaccatctttaataaaaaataaattagttctgggtgggaaccatttcaggaggcagggagtggggctaggggctgggcggggtggtgggggagcggatctcacaatttctctttttcaccctctgcccagctggnctttgctctggagaggcagtctctttcctcctgccttcctgagtaaggcaggattggcagtggctgaccccagccctagctaattagggaggcaggggcagagatactaggcaaatgagaaggggtcagagacacagggcggcttagaagatgtgaggtctgaacatgagaaatgaggcttagggcacaaaactggagttggtggggagaccacactctaagtagctcagattagcaaggaactgcagacttgctttccttttccacctaggaaagtctcaaggaaacaggtcttgtccttctcagtctgtgtaacctctttttgaaaagtgatacacgtttgagcgc

SEQ ID NO: 269057 - DNA, 413 bp, Homo Sapiens
  misc_feature (19)..(19): n is a, c, g, or t
  misc_feature (24)..(24): n is a, c, g, or t
  misc_feature (43)..(43): n is a, c, g, or t
  misc_feature (61)..(61): n is a, c, g, or t
  misc_feature (73)..(73): n is a, c, g, or t
  misc_feature (156)..(156): n is a, c, g, or t
acccaacctggactcttgnaaatncggaaaacactgccggggnccccaaacagcgggaaanaccctccggctnggcccatggaagcacgggagcatgtgggggctgaatcccacaaagcgggggatgccttgtctccaagccgggtcttctttgcnacactgggctgataaagctcttttggcctccttccactgggaaaccgaaaagggtgttgcacagctccatggggccagaaccaaacccagtttccccagcctaggggtgattctgacaatcgctgctatggaaacaagactgccaagaacgtcacacccaggaaactttcaatatactttattaaaaagtttctttgtataaatttcctaaacattttaaaattaaaattaaatcccctccctccagcacacaaaaa

SEQ ID NO: 269058 - DNA, 355 bp, Homo Sapiens
  misc_feature (176)..(176): n is a, c, g, or t
  misc_feature (257)..(257): n is a, c, g, or t
  misc_feature (265)..(265): n is a, c, g, or t
  misc_feature (274)..(274): n is a, c, g, or t
  misc_feature (319)..(319): n is a, c, g, or t
aaaatccttttccttctttttagaaaagctgggcttcttgaaaacatggattcccttggacctcttcattttagaaggactttctgcctcatctccagagctatcttcctgaaaggctgcatagcttcagtcctcttttcctttttcttaaatttcccttttttcttcccatgaanctttctcatcatcaggacactacatcagggagggctcatgggagggatggtcatggggggagggtgagggggctcgccagntgcgggtnacaaatccnggggaaacttaggtaggggctggatctcttcagaggctggggggnccggggtaaggcccgctgccatgctccaccctgcgg

SEQ ID NO: 269059 - DNA, 334 bp, Homo Sapiens
tgcctgttgccgtctgtctttagtaactgctgctctgttaactgttctattctgatactacgcgtgttgttttttacaacaggtatgtttttgtttcagaaatatgtattgcttttctcatattttttgcaaattgtattgtcaacatgggtcatttaaagtcctgtatgaaccataacctgctgtggtacctttgtacatgtttgattctgtaatctttattccagtgtggcatatgtgcccctctgtatcttttgagaagtgcggaataggttgcttctaccacctgttcttaatgtaacagtaaaagttttcacatttttctcagaaaaaa

SEQ ID NO: 269060 - DNA, 423 bp, Homo Sapiens
  misc_feature (23)..(23): n is a, c, g, or t
  misc_feature (34)..(34): n is a, c, g, or t
  misc_feature (341)..(357): n is a, c, g, or t
ctcagcctcaggagaaaaataanaaagaaagaanccacacggaacaaagctctttgggttccctaaaagggtccaagggtgaggggaccagaggctgtgaaattcactgctccagaagatatggctataaatgaaaatagagaatctgagaatcaccttgggaatgaataattctagagtctgcattctctacataggacacggtgtccctaaggaagagaaattgattcttgggagtgaaatcttgttattttttactgtataatcacagatgtaatgtacagaacatagatatgtcatgtgacttttgtgttcatatttcatgaggaggtgatccacgnnnnnnnnnnnnnnnnnggctcctggaggatggtgatgatgaacaacaaaaaagttggcaaggggaacatttagaatcctgta

SEQ ID NO: 269061 - DNA, 478 bp, Homo Sapiens
  misc_feature (24)..(24): n is a, c, g, or t
  misc_feature (38)..(38): n is a, c, g, or t
  misc_feature (66)..(66): n is a, c, g, or t
acccaactaccccagccctccccnactcattcctcagncccggggaactgggggctagtggcctgnagtgtgggctatactgccttgctgtttgcaatgaaacaattgtaaaataaagagagcagcccaaaacagggagttatgagctgagaatatgggaataagcacacaattagttctgacgaaagaaatatcttcctgatgttattaacaatctactagaaactgtgtcctctttaccaacagaaaaatattgatgtgcaagaaaataagcttatttctaacttaattttttaaggggtagaaaatatgataaattttgcatacatacaatttatttatttatattatagccctgtatgatacaagcattttctcatctaaaagtgttattttaactcagaaaacatacttgcattaagctcttgagcctcagaatggagcacagagggaagaaaacccttttgaaattaaaaat

SEQ ID NO: 269062 - DNA, 433 bp, Homo Sapiens
  misc_feature (50)..(50): n is a, c, g, or t
aaaatatacatatataactcccaaatttggggaagggcactgtctctttntttctctcaactttaaaatgaaaatgttgttgcctttgtatgtggttcaaccatccagctcccagctggctaaactttgcctccagtggtcaaagatgggaaaagagtggggttggcaggagatggaaaacggaggtgccgccccagcatgggggcaggtcccccagtccaccctgcctctccccctgtggagaagacgcttagttgggggtgtgggtttgggctccattctggattcggcggttccgggggaggggtgggtctgtgccgattactctgtcttgtacgtttgttctgctgctcttcaatattgtatcaacgccaggaaaggggggtgaaaagcctcttttaccccccaaataaattgtcacattccgaagctg

SEQ ID NO: 269063 - DNA, 437 bp, Homo Sapiens
aaaggttcccccatgaaacccgttaatctctctttcccctggctgacttacctgcatacagtaggcactcactgctggagtgaggcactgactcctcccaaagattgcagggggcggaggagggaacccacgaaggccctgggagggggcatctttggcccccactaaccatctccctatttctgcatccctggtgaccgtcagcaagagatgagtcggggagaccctctcctggagttctagcccctaattctgggctttctatatgagaggacatgcagatagggaagaaactaaaacctttcaatgtcttccttttttctttaaaagtgtttcctcaaaccatccccgtcccaaagaggccgccttgggcaagtgcatgggagcccggaagtggaactgaccaggtggggctccactgtcctgtgtgggcgaag

SEQ ID NO: 269064 - DNA, 489 bp, Homo Sapiens
  misc_feature (243)..(243): n is a, c, g, or t
  misc_feature (255)..(255): n is a, c, g, or t
cgcacttcgcccacacaggacagtggagccccacctggtcagttccacttccgggctcccatgcacttgcccaaggcggcctctttgggacggggatggtttgaggaaacacttttaaagaaaaaaggaagacattgaaaggttttagtttcttccctatctgcatgtcctctcatatagaaagcccagaattaggggctagaactccaggagagggtctccccgactcatctcttgctgacnggtcaccaggantgcagaaatacgggagatggttagtgggggccaaagatgccccctcccaggccttcgtggttccctcctccgccccctgcaatctttggaggagtcagttgcctcacttccagcagtgagtgcctactgtatggcagggtagtcagccaggcaaagaagagactaacggtctcatggggggaacctcttgcgggaggcaggtagctggagcatgttcccggctgcccttgctgc

SEQ ID NO: 269065 - DNA, 347 bp, Homo Sapiens
  misc_feature (58)..(58): n is a, c, g, or t
  misc_feature (81)..(81): n is a, c, g, or t
  misc_feature (99)..(99): n is a, c, g, or t
  misc_feature (102)..(102): n is a, c, g, or t
  misc_feature (109)..(109): n is a, c, g, or t
  misc_feature (125)..(125): n is a, c, g, or t
  misc_feature (174)..(174): n is a, c, g, or t
  misc_feature (191)..(191): n is a, c, g, or t
  misc_feature (209)..(209): n is a, c, g, or t
  misc_feature (254)..(254): n is a, c, g, or t
  misc_feature (291)..(291): n is a, c, g, or t
  misc_feature (296)..(296): n is a, c, g, or t
  misc_feature (312)..(312): n is a, c, g, or t
agttggaagagtggactgaagaaagaacttatactctccctcctctaaaattgaaccnaatttattttttaaaatgctaanccaaaagcagctaaaaantcnccagttncttatctagggtatcnccaaacccagataaatgacaatgttagaaacttcagcaagtggtcatgnggaaatgagtggataantccagtggagtactgggnggacattgattctcaatatctaccacccaaacttcattttcatcnctgtaaagaaggtgaattgtgactactgttttggttntgacnggttagataattttgntcaagccttgtgttgaaaataataaaatcttttgg

SEQ ID NO: 269066 - DNA, 388 bp, Homo Sapiens
  misc_feature (15)..(15): n is a, c, g, or t
  misc_feature (39)..(39): n is a, c, g, or t
ttgcctggccagggncctggcccagtcctcatgggggcnacccacccagtttgggtgaccagaagtggtgtccatttattgaattcccacctccgtttagaaggagatcatggtaccaaaaccccaggaggggccttaagatgtgaagatctctctgagtaaaaggcaaggggcttctcttcttcacctctgggatagttggtagatcggagagttttattttcagggtcaaggctgtggactgatggggatattggagggtgggtgggttttcctgagagactttgtataatgctgaatgtgtccagagggacaagtttgcagaacctcatattggtatattaaagaaataataaaataaaaaagcactttaggttattttatcttt

SEQ ID NO: 269067 - DNA, 487 bp, Homo Sapiens
  misc_feature (44)..(44): n is a, c, g, or t
  misc_feature (53)..(53): n is a, c, g, or t
  misc_feature (69)..(69): n is a, c, g, or t
  misc_feature (109)..(109): n is a, c, g, or t
  misc_feature (149)..(149): n is a, c, g, or t
  misc_feature (151)..(151): n is a, c, g, or t
  misc_feature (241)..(349): n is a, c, g, or t
cctggcattgtatgaataccagccacaatgtatccagttttaanattggggancattagcattaatccncaggtttttaaaaattataagcagtacctactatggacantctggtcctacatctccctggcacatatgtaagagtttcncnagggtataacctaggaatggagggtatgaacatgtttacatgcacaaactagctgatgccaaactggtaatgccaactgaaaacattgcnnnnnnnnnnnnnnnnnnnnnnnnnnnnnnnnnnnnnnnnnnnnnnnnnnnnnnnnnnnnnnnnnnnnnnnnnnnnnnnnnnnnnnnnnnnnnnnnnnnnnnnnnnnnncacttgttttttaaatattgtgtctgataattccaatgtctggattctttgtttatctgttgtttctgttggtttttactcatggtattttatttccttgtatgtcttgtgaatttttattataagctcgttctcctt

SEQ ID NO: 269068 - DNA, 526 bp, Homo Sapiens
cagataccttaactcccgagaagagagtccttgtgcacagaacttgtgggagcctccatccgctgctctttacctttggatacagtgtgcaagtttcatgacagaatcattaagataatcaaattgtcctaattctggtgcgattcatggatatactggtaaatttaggcaaagtgaaacttatcagcgtagtttctgttctttaaaataaattggaaattagagactaagcacaattagtctataaatgttctataaatcaaaagcttacctcttgcactatcatgccttgaaatttactttttcaaagggaaacaagtttagcagcagccttcaaagaacttctttctatgatgagccaaattcatctttgccagaaaagaaattttgataattccaagaagcctgattagaacaaatcagatataccttctcttgtctgcatgactttgtgagataaaagagagggcttccaacttttttctactagcttgatatgtattatcacttaaaatggttgccttta

SEQ ID NO: 269069 - DNA, 419 bp, Homo Sapiens
gacaaaggaagaaagggggaaagctgtgaagggaatcaaaggcagtactgctctaagtagcaggactgcaccccaggtgagggacagggctggtctgagggctgcaggcagctctatcatcgacaggtgctatctctttcccacttctttgtaatgggtaagacacctaagatgatctgatggcgcaaaccccacctggtccacccgaccctgtctgaagccaggcctggcaacccagcgacttgcaccggcccagagagaaggtggcagagacgagagttatgtgggaggcgagggatccttcctgcagcagaggcctgagccgggtgaattctggggtccaagcaggtggcacctgttcccagcctgacgctctctttcctgctgccaggacagctcatcttagatgtctatctcag

SEQ ID NO: 269070 - DNA, 406 bp, Homo Sapiens
  misc_feature (16)..(16): n is a, c, g, or t
  misc_feature (22)..(22): n is a, c, g, or t
  misc_feature (38)..(38): n is a, c, g, or t
  misc_feature (62)..(62): n is a, c, g, or t
  misc_feature (77)..(77): n is a, c, g, or t
  misc_feature (84)..(96): n is a, c, g, or t
  misc_feature (117)..(117): n is a, c, g, or t
ggacaggggcccactncacagncatgtccagggaaaanccactgtccaccacaaatcccaanggaatttgtgccccnttttggnnnnnnnnnnnnntcctttagcgtaaacatgaantttttttcaatgtagcccccggggaatgaatgaaattttgagcttcttcaatacgtaaaattaaatttataccactgagggagagaccctttctgaaagaagtatggccaaaagcactttaatgctgctgacattgttgtttttatgttcatttgctggagcgcaagacgtgctgacacagtgagttttctctgatgtatttaaggtgatgtatttgcttgagttactcctgtatcattgctcataatattggaaactaaaataaaacctagttggaaatccaaaaaaa

SEQ ID NO: 269071 - DNA, 783 bp, Homo Sapiens
gaaataaggaaaataagcttatcttaagtttatttttccttggatatacctagattccatacagtgacaatacaaatacaaaggaagaacatctggatttcatccttgacctcatttacaaagcaaaaagagatgctggattcagatataaatgtttaattttgcagtgtttaagtcagcaaatcttctgttttttaaaaataagccacatatctagatttttctgtgaaagctctcaattaagtgttgggaactaatttcaagattttaaaaaatgttatgcaggcttaacgtgtctgagagccataaatgacctaacgtttcccgttagtctctgaactaggtgatctcagttctctttcaactccagtactctgtaagtttctgtgacctgtagtgtaccattctcaggtggtgatatggtttggatgttttgtcccctccaaatctcatgttcaaagtgtgacattcagtgttagaggtgggcctagtaggaggtatttgggtcatgggggcggatcccttatgtatgactttgtgccatccccatagtaatgagtgagttctcactctggttgtttatgcaagagctggttgtttaaaagagcctggaacttcctcctctctcgcttgctctctctcaccatgtgacacactggctccccttcaccttctgccatgattgtaagcttcgtgaggccctcaccagaagcagatgccagcgccatgcttcctatacagttctatgcagaacagtgagccaaataaacctcttttctttct

SEQ ID NO: 269072 - DNA, 345 bp, Homo Sapiens
  misc_feature (31)..(31): n is a, c, g, or t
  misc_feature (46)..(46): n is a, c, g, or t
aaactccctgctgttttccctgccctggaantttccctcctgcccnaccaagaacatttcatccagtcctgagctcagcttaagggaggcttcttgcctgtgggttccctcaccccccatgcctgtccttccaggctggggcaggttcttagtttgcctggaattgttctgtacctctttgtagcacgtagtgttgtggaaactaagccactaattgagtttctggcgtccctcctggggttgtaagttttgttcattcatgagggccgactgcatttcctggttactctatcccagtgaccagccacaggagatgtccaataaagtatgtgatgaaatggtctt

SEQ ID NO: 269073 - DNA, 544 bp, Homo Sapiens
  misc_feature (198)..(198): n is a, c, g, or t
gaagtctgaagttaactttatgaacccaatttaaccaagtaacctcctgtttaataacctagggagaaaaatgaagtttgagtttctatccaaagtcctaagttcatcaacccatgatatatctactaattaaatgtttattttctcctccaagtctcagcatgtatcaatgctataaaatcacgtagactatgtttnagaagctattactaaactcactcatgtaacgctgcatgagctggagatgagaatcggcagccccaatggtgggtggctgctcggcgatgctgtctgccctgcactccctctttactttccttagggggatgggtagcataaaatctgagaactccttctttaatggaatcatataaagaggaatggcacccactttatctgttaagttcagattcccatgaaaatgcagaacagatgaaatgccagaatcagtattttacaaagactagttggagaaaagtgtcaggaccacgagaaaagtggatttttctctgtttgtatcaagaaagcagggtttaaagattct

SEQ ID NO: 269074 - DNA, 385 bp, Homo Sapiens
tagcagatttctctatcaagatatttactcaacttcctacaagtaacaactatttataagtaaccctaaaatagagaatggtgaacagtcaaggaatcctatatgatttagtttacaaattaaccttcattgtcataaatgaccaggaggaatgctataaagtatgcatgcaaattagtcccacttgtcacaatgacaaaatacaaagttaccaaagtaacatagcaaacgggggctctggaaaatctttcattacactcccaaatgcactgaacacatttccccaatagtcaattatttttttaaagtgtctttctcatagaggatggctttttaggaacgcccaacgatttccactcagatagaaagtgggattttgatgtcc

SEQ ID NO: 269075 - DNA, 494 bp, Homo Sapiens
  misc_feature (83)..(83): n is a, c, g, or t
  misc_feature (86)..(86): n is a, c, g, or t
  misc_feature (482)..(482): n is a, c, g, or t
tttactcaatatgtaatcgctttacttcaacgatgtgtttacagtcacgccaatacattttgcaaaccgcacaacacgcagancancctcacagctgacgccagatgacatgcagcagtttaacgcttccaggtcggaacaacctcctcaaaattgcgaagacaaagagtgctttggggagcctggcttttaaaaaagacccgagaattgatgagtcggagacaccagggcgcttccctgacagcccagcctggacccaatcacacggtcccatgctgtttctttctgagcagacaccaaagaaatgccacgccaatgggaggacacaggtgggcgggttaaagtcacatttttaaaaaggctaaactctagattgctgtatttgctctctctggagattaacaaagtgcttggtttgcagatttgctggtacggtgatctcaatgatatgaccgagggtgggagggatgtgaggagggaanactgtgccgaat

SEQ ID NO: 269076 - DNA, 359 bp, Homo Sapiens
cacgcggcccagttttcccacgtctttgcgccgatgatcacagacgcagtagacggtgatgcccgagaagacggcccccatgacgaaagccaggatgactgcaatggccaagagggtgacgggaaccagctggtcgtggcctttgagggtcctcctcccttcaattgtgacatcacagttggttgctgtggaaatgattgtcctgtgacaaaggattgtgacttaagtagaagcagcaaatatctcttaagaaataaagattctgtgatccaacaaatacccttggtaataaaaggcagtcaaggcaattcaccataaggaaagagtgtacaagacggaaaaatacaacagagaaagat

SEQ ID NO: 269077 - DNA, 491 bp, Homo Sapiens
  misc_feature (396)..(408): n is a, c, g, or t
  misc_feature (441)..(441): n is a, c, g, or t
  misc_feature (447)..(447): n is a, c, g, or t
ccgcatggaagcccacgtgtgcacttaggggcccataaatggcagaagggcccctcctttgggagaccttgtcagtcagcatctctagggcaaccgtgattgccatttgtagaggggaaggaatcaagggactttaagctagatcaaaatctggggacaaattctcctgctaactgcaagttaaaataggcccttcttactgaatttccctgtttgtttctctgcagacaatgctttagccctactcttgggcccccaagttagcagagtaatcaaagcttcctaccgtttgggcctactattccagactagtcccactggtttttgtgggaaacaatgggaaacttacagatggcctgcctggggatgatggaggcacatttcagaacaaatggnnnnnnnnnnnnngagacagagtctcgtttctggacgcccagggtnggagtncagtgggcgcgatcttgggttcattgcaaacttttggctcccag

SEQ ID NO: 269078 - DNA, 404 bp, Homo Sapiens
  misc_feature (68)..(68): n is a, c, g, or t
aaaaatggacagccaccataacaaaccttagccaaatagccaagtaagctctgaactaggattactgncatttcagaaaaccttttgcctacttcatcagagggacatcaagaaccatgaaaatactcaggtgaattgctggaaactgtaaaaatcactgtggccaaatactctagagtcagatcaaacaagattctaagaagtcatacaggggagagcatcctgaccagcataccactgaacaccagtatgatgcatataggtacaggtgtggcctgaatgttgagcctttgcagggtggcaaaggagaggggacctcaggactggtcacctacatggccaagactcacctgcttacactggtatgcttttcagttacaattttctgtgtggatggtggcatg

SEQ ID NO: 269079 - DNA, 413 bp, Homo Sapiens
  misc_feature (45)..(45): n is a, c, g, or t
gcaacagaaaaagtcctcccggattgctttcaacattgggcaccnatttactagctccccacctcgaagacatcaccatgcgcccctttgtgctggaggccttgaagggctacggctggaagctggtgggcttccagaggacaccaatcacctctccaccatgctggtcatagaagaaaagggccagatccccaaaggcctccctgagctgcgtcagatagagctgaggaggatcataacccagcacgggcatcagggatgagggccccggctggctgagcaggccccggcagaaggaggcagctggcgagtccacaagcctgcggtgccgcgggatatggcgaggagacaggcgaatcagcacgtcgtaaatgtccaagggcggccggaacactgtcctgatctgtgccgaa

SEQ ID NO: 269080 - DNA, 483 bp, Homo Sapiens
  misc_feature (39)..(39): n is a, c, g, or t
aaggcccctttgaccctctggtttctcccattgggccgnaatcggggaatggagggaactggcccacaaccccactgcctctgaatgggtggtttgtcccaaggatgctgaatgtaatccccggtcaatgtggaagccccatgaggttgccccagggaagcctccaaaagctgggatgcttgagggtatccaagttgaaaaagacaaaatctgaccatcagccagtgacagtcctggcaaatgaaggtggggcggggcagtgaggggtgggagaaggtgaatgattcattatttccaccccgaggtttgctggggtgaggggaagaatcgatgctgctttgggaactgaaggtttttctgttgggaaggccctcttggttttggagagaaagacaagttatgagtagctgctaccctggaacggtgggcagagagcctactaggaaatgtgcagaataaactattttttgaaggaaaataagg

SEQ ID NO: 269081 - DNA, 320 bp, Homo Sapiens
  misc_feature (299)..(299): n is a, c, g, or t
tgtttgtaaattatggttaatcagataccttgggtgattctagtcttgctctcagggtttggccctcagggaattacctgaactctttcatccttcggagtatgttaatatagttttattcttcagcctagttccttacaaggctattctttttaacagaatgttaacacattgcagaaatagtgttttcaaatgaccatactctgtttctttatctaatcattaactcctcaacagctgttcctctacctgaattatttaaatgaggatgctaggtgtgttttagggagcaaagaggnataaaactaggactctaaaaa

SEQ ID NO: 269082 - DNA, 439 bp, Homo Sapiens
gaacttctatatttccatttctcaggctgcattttccttcccctgttctcttatctgtatcatgacatgagatgtgaacctcagaaatgtaaaaacaaaaagtctagaataaagcattccttgaattttaaatgaacatgcttttagcagctggatacgaagcagactattttcaacaaattgaatgtttcccacttgtgtgagagccaaacaagtgccatacagaaagggacctcttcaatgttaccaaagctttgtggcagcatttaagtgtggtggctccatagaagtcactatagcatggacgagccacttggcttgctttttcctgctaatcaaagttttaagaagataaaaagctatctttgttatatatgttttgtctaatttgcaatattacagtctcctggggggaaatccaacttccaataataattgt

SEQ ID NO: 269083 - DNA, 359 bp, Homo Sapiens
agatacagtttgcctacagtatttagtacagtaacatgctgtacaggtttgtagcccaggagcaataggctgtatcacatagcataggtgtgtagcaagccataccatttaggtttgtgtgagtacaccgatattcccacaactataaagtcatccaaagacgcatgtctaaaggatgtatcctcattaagcaacccatgactgtattttgagtttgaagttccaatggtacatctaaatggatctggaatgtgggaagagaatattcctggaactaaaaagaaggaaattaggaagtcattttcatgggaggtgatgatttaaagctttgttaatagggtgagattgccaaaaaagtc

SEQ ID NO: 269084 - DNA, 471 bp, Homo Sapiens
  misc_feature (96)..(96): n is a, c, g, or t
  misc_feature (148)..(148): n is a, c, g, or t
  misc_feature (157)..(157): n is a, c, g, or t
tcagagagcataaatatattgtcttctatactttgtaacttgtgccatatcctaaagaaactaacaacgaacattttgggagatgtttttgtgttnttttatagtagagttttagagtacatttgtcttaaataggaagtttttaccnataaacccnaagattttatttcacgtattgttgctttctcttatatggaacttattgtgtacctcttacctttatttctaatcatttagtgatactaatcttttcatagtaaatatatttgtttctaattgtattcctagagtttacattcctaaagaataaacgacgactttggctatttttgtgtgttccctaccttcttaaggctatggaaataaactggagtttagttttttgaatttttgtatatttgtgtaaatgttctccatatgtagtactttatacaacaagtgttgcctcttgttttattgaaataaaaactg

SEQ ID NO: 269085 - DNA, 534 bp, Homo Sapiens
  misc_feature (57)..(57): n is a, c, g, or t
  misc_feature (496)..(496): n is a, c, g, or t
  misc_feature (518)..(518): n is a, c, g, or t
tcatttgtaaggataaacttttcccacaaattttcaacaatcattgtagaaactaanggggagaaagtaatctcagttgttttagaaacgaaaaagttaagcattgtttacttgaagtgggcagggaagcagcactgagtaaagttcaattgagtggttacagtctagggcagtggttcccaactctccgatcagaatcatctgggaagcattttcaaacagcaaagtactttgaaaaccattattaaatagaattatgcatgaattactgtttcagatcctttaatgtggtagttggtaataataagatgaaattcctctgttgttagtaaaattatgaaattgaagttctgcagcatgtcaggccaggattattagggagattcctccgaaactagtgtgtgtttattaaaaggagaaaggataacaataggaatgttctaaaacccagaagtcccaagtgcgtgtcctactttatggggacccataaaataangaacaggaccattttgattttnaggttgagggtaaaag

SEQ ID NO: 269086 - DNA, 427 bp, Homo Sapiens
  misc_feature (17)..(17): n is a, c, g, or t
  misc_feature (24)..(24): n is a, c, g, or t
  misc_feature (58)..(58): n is a, c, g, or t
cccattggtaagggaanccaagcngttgcccaaatttggggaccctgtccagcccaangaaaccttaagtgtccccaaggacttttggatggcctttgaggtgggtctcccatgcccagaaatgcctgactgtactgcgcttaagcaattaggcagcattgtagagcatagcttgtattacattttcccacacttagaaggttttcagacacaaaacccaaaggaattgtgtaacaatccggataaacacgcctagattgtttttacaaataataatgttgctatatttgcttaacgtggtgcttttaatgctgtgaatctagccctcctcttgaccaacttacttggaacattccttttttatcctgttaaccattttagtgaatcagaagcatgcctggtaattgggaaaaattaaaaactaagt

SEQ ID NO: 269087 - DNA, 386 bp, Homo Sapiens
  misc_feature (11)..(11): n is a, c, g, or t
  misc_feature (336)..(336): n is a, c, g, or t
  misc_feature (365)..(365): n is a, c, g, or t
  misc_feature (370)..(370): n is a, c, g, or t
aattaccaggnatgcttctgattcactaaaatggttaacaggataaaaaaaggaatgttccaagtaagttggtcaagaggagggctagattcacagcattaaaagcaccacgttaagcaaatatagcaacattattatttgtaaaaacaatctaggcgtgtttatccggattgttacacaattcctttgggttttgtgtctgaaaaccttctaagtgtgggaaaatgtaatacaagctatgctctacaatgctgcctaattgcttaagcgcagtacagtcaggcatttctggggcaagggagacccacctcaaaggccatccaaaagtcattggancacttaagtttcttgggctgacaggtccnaaatntggcaacagcttgctt

SEQ ID NO: 269088 - DNA, 303 bp, Homo Sapiens
tgggtaatattgtatattgtaagcttccaattcactggatagggaaatgtatgaggaattttatatgcaaatgttattctataatttttgaagtgtttgtaaactactagttcagtaaaatgctatgctaacattatctggatcaatttttacaatcacctgattataagaacatttcatataccacattctgttttagctcaagtccatttaaagcatttgaattgggaacaatttcccaaggctttaaataaggtcataagggagaggaaggctctttatttgtttgtttgttttgggggc

SEQ ID NO: 269089 - DNA, 420 bp, Homo Sapiens
  misc_feature (340)..(340): n is a, c, g, or t
taacgtacatttcagagtaaactaaatgtgaagtattcaatgacaagaagtcaggaaatgggatctgatcagcttaggaatgaatagatttcgtactaacctaacacaattctaacaacttcccaggaacctcaaggtcaaggctgagctgtacagaactgagagaagaggaggtgttatctcctctcagggggcaagggagacagactaggagtcacacagtgaggtcctctccattgttcccatgggctcagggtgggccttcaaatgttgaaacctcttttgggtaactcctggggggggattatttcccagccagtctctcatgtattttgaaganaactaaatgtgtttcacctttgtgaatgaaactaggtttacaggatggataagagtggatacataaaaatgcataaaatt

SEQ ID NO: 269090 - DNA, 434 bp, Homo Sapiens
  misc_feature (13)..(13): n is a, c, g, or t
  misc_feature (22)..(22): n is a, c, g, or t
  misc_feature (62)..(62): n is a, c, g, or t
  misc_feature (77)..(77): n is a, c, g, or t
  misc_feature (83)..(83): n is a, c, g, or t
  misc_feature (135)..(135): n is a, c, g, or t
  misc_feature (165)..(165): n is a, c, g, or t
ttggcgcccttangtacgtganatgtgggaagatcatcatctgaaatgtttggtttgaaatnaagaaatcccttctnagggtnaacgctgcaggtgttcacctaaacttggaaaaatgccaccgcctttctggcnacaaatgtacccatcttgggaacaccaagnattctgcccctgaagcccagccctggcctcagagccctgggccacagggagaacctcacagcccaggacactgtggcactctgctgtctagaagcctgtctccccacccttcccattctaaccccatgcgttcctcagcctccccactgtgcaagcctaggtaaggacattatgaagacgtcagcctgcctctcacattcccctgcacactgctgtccctctcccgcgggccaagcagacccactgtggcaaaaatatagaagaatgac

SEQ ID NO: 269091 - DNA, 135 bp, Homo Sapiens
aaaatctaggcctgggcacagtggcctgtgcctgtaatttcagcactttggaaggctgaggtgggaggattgcttgaggccaggagttcaataccagcctgggcaacatagggagaacctgcttgtatttaaaat

SEQ ID NO: 269092 - DNA, 387 bp, Homo Sapiens
  misc_feature (50)..(50): n is a, c, g, or t
  misc_feature (69)..(69): n is a, c, g, or t
  misc_feature (77)..(77): n is a, c, g, or t
  misc_feature (98)..(98): n is a, c, g, or t
  misc_feature (114)..(114): n is a, c, g, or t
ccaggtatgttaccctcagtacctcaggtaccccaggtccttccttctcnacctgcaggtctttcttgnaacccttntgccccactgcaagcaattcnggattgctgatgccangtccttcctctttcccaactcttgagacttgcttttccctaatgtcttttcttcctaatcaggctactcgaagtttcttaatagatccctagcaaattatgtaatactagtgagtgatgaaaaacttctgtagcgcccagaaattatgtgataataactccttccggcttttaggagttatatatcatatggtccctccctgtctccagctgtactgatgttctttcaacatacctgtggttccttccattaaaattgtgtaccatactgtaa

SEQ ID NO: 269093 - DNA, 185 bp, Homo Sapiens
ttagctagaggcaatttcaattgtgaatttttgttgttgtcctattgttcctgaagactttgccataatttattggtttaatttatccctaatttatttgatgaaggtgtacaattttgtattaccaaggatgtactgtaatattaattgatatgataaacacaatgagactccctgtccatatt

SEQ ID NO: 269094 - DNA, 463 bp, Homo Sapiens
  misc_feature (353)..(353): n is a, c, g, or t
  misc_feature (394)..(394): n is a, c, g, or t
  misc_feature (443)..(443): n is a, c, g, or t
acatctaccataagagacggcagctccctacagctctgctccaggtcctgagaggccgcctccgtccaggggatggactgctaaggagcagcagcagctatgtgaaaaggtttaatcgaaaaagggaagggcagattcaaggtgcaattcatacccaatgcatttgaaacaaccatcctgggcatttctggaccgcaagagacttggacgtcggccaacaagacatgaaaggtctaccttcatgtaatggggtcctccttcagaagagagccctcagctactctgtgaattgacttgcatagctgcaactgtaatctcgaaggtgttcactttgttatttacaagatggcttncttgaaatggggctgctcctggaggttcagtgttcaaggtngatttcaactgttagtggccagacaatggattttacacaggttcagatnaatttggacctgttccagtt

SEQ ID NO: 269095 - DNA, 471 bp, Homo Sapiens
  misc_feature (280)..(280): n is a, c, g, or t
  misc_feature (290)..(291): n is a, c, g, or t
  misc_feature (295)..(295): n is a, c, g, or t
gagaggactgccaggtggagaaggaggtactgaggtactgaggtactgaggtaacatactgactgtatcctcttccaggaaggcaaggttcagaagtaagagctggagaaagagggccacatgcaaattccaaaatagaaccctgagggcaccctctagatattcaaaatatccccatgctcccctatgatcataagcaatgataatccatataaatcatttccatttccagtgttgtatgtaatacagggatatagaattcagattcaaagcctatgcntttttccccnngatnccataacatgcatgagccttgagtttgaaattaatttggatttgaagtaataaaaataaatttaggtataatgtactcattaccataatgtaatgggtgcactaaaatctcagaattcaccactatataatgtattcatgtaacaaaaaaaacacttgtacctcaaaagctattga

SEQ ID NO: 269096 - DNA, 340 bp, Homo Sapiens
caccattattatttctacaaccacagccacaaccaccaccaccatcatcatcaccagcagcctcaccaatacctgcagcatggagccgagggcagccccaaggcccagccaaagccgctgaaacatgagcagaaacacaccctccagcagcaccagggaaacgccgaagaagaaaacaggctatggtggaactaaacggtaatgctgggagaaagagaaatatcttttaaaggaacctgagttctggatggaaggccaccaaccctatttccaggggttccttcaatgggcaaccaggcaagtttgtaggacatttggcttgaaggcagatttttaaagg

SEQ ID NO: 269097 - DNA, 558 bp, Homo Sapiens
  misc_feature (74)..(74): n is a, c, g, or t
aaccacagccacaaccaccaccaccatcatcatcaccagcagcctcaccaatacctgtagcatggagccgaggnaggccccaaggcccagccaaagccgctgaaacatgagcagaaacacaccctccagcagcaccaggaaacgccgaagaagaaaacaggctatggtgaactaaacggtaatgctggagaaagagaaatatctttaaagaacctgagttctgatgaagccaccaaccctatttccagggtcctcaatggcaaccagcaagttgtagacactagcctgaagcagactgtaaaggccaacacctttgggaaagcaggaattaaaaccaagaatttcattcagaaaaacagtatggacaaaaagaatgggaagtcttatgaaaataaatctggagagaatcagtctgtagataagtctgatactataccaattccaaatggtgtggtaacaaataattctggttatattactaatggttatatgggtaaaggagcagataatgatggtagtggatctgagagcggatatacaactcctgaattgtaattc

SEQ ID NO: 269098 - DNA, 691 bp, Homo Sapiens
  misc_feature (33)..(33): n is a, c, g, or t
acaatgaaaaatgccccaaaaaaagttccagcnagaatataccctatgagaggttttggcaaaaaagacttaggtatgatggctgggtttaaagataaacatgtgtgattcccggatatggtataccaattcattatttggtatttcagactaaaaaattcatttgtgctcctaaagattttgatcagtttgggtaaagcaagcaatgtctgtctgatgtttcaggcattttcaggaggacaaataactgggacaactgaggctatgacttagtggcataaagttggtttcaggctaaaagtttggtttgtccaaataaagcccaatagtccctcaactctcagagcaatcacagtgatggtgtaaagagcctctttgaatgcgtgattgcatacctagtgaccatacaatcagagatctggtcataatgaaacactttatacagacaggaatagacaagggatttctgacacactcatgctttggatgtgtcagtacaagacagtatgtgagactgtgattctgccaggcagaggggaacgggcatgatttatctgctggcaaataagtctccactatacctaatcattcttttatctaagtgcatcatgatcttcttagtcctggacgtcaaaatagtcaattattggctccttggttattttctgtaaattactgctcccaggattct

SEQ ID NO: 269099 - DNA, 604 bp, Homo Sapiens
  misc_feature (80)..(80): n is a, c, g, or t
  misc_feature (153)..(153): n is a, c, g, or t
  misc_feature (381)..(381): n is a, c, g, or t
  misc_feature (383)..(383): n is a, c, g, or t
  misc_feature (389)..(389): n is a, c, g, or t
  misc_feature (393)..(393): n is a, c, g, or t
  misc_feature (396)..(396): n is a, c, g, or t
  misc_feature (400)..(400): n is a, c, g, or t
  misc_feature (406)..(406): n is a, c, g, or t
  misc_feature (408)..(408): n is a, c, g, or t
  misc_feature (410)..(410): n is a, c, g, or t
  misc_feature (417)..(417): n is a, c, g, or t
  misc_feature (443)..(444): n is a, c, g, or t
  misc_feature (461)..(461): n is a, c, g, or t
  misc_feature (467)..(467): n is a, c, g, or t
  misc_feature (469)..(469): n is a, c, g, or t
aagtctcctgctactgctctggggctcatggcttgctctagggcagaaggaagttgctggaagcctggcctccaggtggnaggggtgccaatgcaagggtcacactaatggaactatcaatgcacctgccttaaaggagcctgaagaatgccntccagtgggctgccgggcataagcccctggactgtccatatactacttgggaatattcaaacagagtcccagagctccagagggcagggagagccaataggcttgcttgaaggcctaagggaaaggcaaccaccaggaacagttgtcccattttgagacttcttttcttcttattcaaaggagggagttaggggatattacttggtccagttccagagacccccagtntnaccctngcanaanaacntgctcncnanaattccnaccaatccttggggacggccaaactnnatggtttactgaccagnttccantnatgtggtatgagaagtgccagggacttaaggaaatagaattctgtaaagcagcctgacccccttctaggtctagaactgatcacattgaaaatgccaaaataagttcagctagatatacctatgagaggttttgg

SEQ ID NO: 269100 - DNA, 477 bp, Homo Sapiens
  misc_feature (83)..(83): n is a, c, g, or t
tctcaagtctcctgctactgctctggggctcatggcttgctctagggcagaaggaagttgctggaagctggcctccaggtggnaggggtgccaatgcaagggtcacactaatggaactatcaatgcacctgccttaaaggagcctgaagaatgcctccagtgggctgctgggcataagcctggactgtccatatactacttggaatattcaaacagagtccagagctcagaggcagggagagccaataggctggctgaaggcctagggaaagcaacacaggacagttgtccatttgagactctttctctatcaaagaggagttagggatatactggtcagttcagagaccacagtgtgaccctggcagaagaacttgctctctatatttcctaccatcatgggggacggccaaactgattgttactgaacaggttcagtgatgtggtatgagaagtgccagggacttaaggaaatag

SEQ ID NO: 269101 - DNA, 267 bp, Homo Sapiens
tccacacaatccatattccctttctgttagcagctttgtcttgtacccatggccgtcacaggtccatggctgatttgccaagttaacaggagtccatccataataatcagcactgggtcatgccccagaatcattaggatcaaaggatgggaaatcagggatttctttgaaagtaagccactcttagtaagattcaaatttgtttaaagcctggattaaaacaatgccaaacaataaacttaaacagactgctttaccctctgactt

SEQ ID NO: 269102 - DNA, 475 bp, Homo Sapiens
  misc_feature (13)..(13): n is a, c, g, or t
  misc_feature (139)..(139): n is a, c, g, or t
agtacaccctaangaaaaacactcccgcattaatgcttgaaacctgtaaacagtctcctatgaaaaccaagcgttccttacaacaaggactccgtaatatgttaataacttggaataggctcaaataaattcccaagcnaaatggtgccatggtaaggactctctataattattagatgtaattatttgaacaggtcgatggtcccaacaaaatgacgcaaaattgccagtaaactggaaaatacattctctctgaagtccacatgggaaatgaataacttcgtttacatcggggtgcaacacatccaattgaagcaccatttttcttgcaaacacagcatttcagtttagaagctctattcacttccttcctgatatcttctattagaaaaccataaactccttcttcttctttgcctctctgccaaattccacttgacatcaacaaacagtagtaatgtacagtgagattcca

SEQ ID NO: 269103 - DNA, 598 bp, Homo Sapiens
aatgctttggcagatgaagtaacgtttgaaaactgtttgtgaaaatagtatgagactggaaagattacgtcgtggtaaaagtttcacagttttccaggtatttccttatactgaagaggccttgaggcaaattcaacattctggaagcccagactgacaaagcaaaacagattttgatgttgcctttgttgggtcccgggaaatgatgctgctgcttggccagggcaggaggaagttttaataatccatcaagcttcccagacagtcaaggccggaggtcgctcctgtcctgtgggtctgaccctcagccagggccatattactggaagaaagatactaagatttgcttgccaataataatttaagtttttaaataaatatttaagtgccatgtttagcatctatttgtcctggcaacacagcacttgttgccccaggacccagcttcttcagcgcatgaagccacagattcagtcaattcggtttccacaaattgtgaacctgtctatctctaacaaatctttctttgaggatctgtgttttaattcagaattgtcctgcgttatgtccttctcgtcaccatctggagtctcgtgcc

SEQ ID NO: 269104 - DNA, 537 bp, Homo Sapiens
  misc_feature (29)..(29): n is a, c, g, or t
  misc_feature (44)..(44): n is a, c, g, or t
  misc_feature (53)..(53): n is a, c, g, or t
  misc_feature (67)..(67): n is a, c, g, or t
  misc_feature (90)..(90): n is a, c, g, or t
  misc_feature (180)..(180): n is a, c, g, or t
  misc_feature (333)..(333): n is a, c, g, or t
ggcttaacttaaaaaattttaaccactgnggtgcatatgtaggngattattangggattatccccanaaattttattctcctggtttaangatgttgagtgtattccattggtaatttttagtttgccaaatgtttgttcaaattcttccacctgtttttaaatggaagacgtacggacnttatttttgtgttctgaacataagttctttgtcacataaaatgtgctatgaatgttgagttttaaatactccaaatgaatggcctagagaattacctatttgtagaaatatttatatgtcaaagggatgcctaacaatttacctttattgccnctaaaatagaaaagttgcccagaatgcctgtggagttttagtggaaaacatgatagctggtgttactgagtaaatttgagtgttaaatgtcaatgtaagctaacggccaagatagggaccactgcagggtggttacttgcagctatgactcaactggtccttcactgccaaacatacctgggcgacagaatgagactccatctc

SEQ ID NO: 269105 - DNA, 452 bp, Homo Sapiens
  misc_feature (40)..(40): n is a, c, g, or t
aacctaataatttaaaaataaaagaggccttgccttaaanatccacacctcaattttggccccttgtaaaaaagaaataagtcggataagttaaacaatttaccctgaatacgcctgggtgccctgcccaaggtaccttgcccggttttaatcctaaaatatgtccctgcccagggggacaaatgagagggattccctcccattttgcatctgtgtttcatacctgtgctcttagcaaaggagtaggttgtgggggagaaggagggtcttttatattcagctgtatgtactatttgacatcagagaccccatgaataatcactcttttttccattcggccaccagctagcaggttgcaattctttcctacctggagcgctgcagggggtggggcaagtggagacattactggacatttgcatttaaagaattaataaaaattccttatttgc

SEQ ID NO: 269106 - DNA, 380 bp, Homo Sapiens
  misc_feature (288)..(310): n is a, c, g, or t
  misc_feature (343)..(343): n is a, c, g, or t
  misc_feature (348)..(348): n is a, c, g, or t
  misc_feature (357)..(357): n is a, c, g, or t
tggcaacagctaaaatctcatttagcatggatcctgtttacagtataattttattacctatagttgtcatgttgtacattagatcgttagacttgttcagcctacgtacctgttcctttatattctctgacctatatctcttcctttactaactcccacatcactgttttgttctctaattctgtatatttgattttttaaaaaaatttcacatgtaaatgagattgtgcaatgtttttcttttcagtcctcctgactcatctatgctgtgacaaatgggcaaaatannnnnnnnnnnnnnnnnnnnnnngagacagtcttggcctgtctttaggcacttggntctgngcaactggnactcagggctgggagtgcagtgg

SEQ ID NO: 269107 - DNA, 604 bp, Homo Sapiens
  misc_feature (16)..(16): n is a, c, g, or t
  misc_feature (58)..(58): n is a, c, g, or t
  misc_feature (63)..(63): n is a, c, g, or t
  misc_feature (153)..(179): n is a, c, g, or t
  misc_feature (295)..(295): n is a, c, g, or t
  misc_feature (436)..(494): n is a, c, g, or t
tgaaaaccccattccntgtacaacctgccttcaaggattgaaaccccttgtatgtagnccccnagcctacctctggaaacctgaggtagtaggattgccttgaggccctgaagttcaaggcctgcagtatgcctgattgtgccctgtgaatannnnnnnnnnnnnnnnnnnnnnnnnnncagaattatagagacagaaagtagaatgatggttgcccaggggttgcaggaagggcagcgagagggaattactgtgtaatgtgtacaaggtttcagtttgggaagaagaaatgagncctggagatggattacggtgatggttgcacagcagtatgaatgtacttaatactactgaattgtatactcgaaagggttaatatggtgaattttatgtgtattttatcacaataaaaacattgaaaaataaaacaatcttnnnnnnnnnnnnnnnnnnnnnnnnnnnnnnnnnnnnnnnnnnnnnnnnnnnnnnnnnnncagtagtaagaaagggaataaaaactgatgaggcaaaatgccctttagagtgaagaaggccttaccacttggatttacaactttaagtccaagtagacaataatagaaaa

SEQ ID NO: 269108 - DNA, 475 bp, Homo Sapiens
  misc_feature (344)..(344): n is a, c, g, or t
  misc_feature (350)..(350): n is a, c, g, or t
  misc_feature (356)..(356): n is a, c, g, or t
  misc_feature (383)..(383): n is a, c, g, or t
  misc_feature (410)..(410): n is a, c, g, or t
  misc_feature (421)..(421): n is a, c, g, or t
  misc_feature (427)..(427): n is a, c, g, or t
  misc_feature (441)..(441): n is a, c, g, or t
  misc_feature (450)..(450): n is a, c, g, or t
agagagctgttaccgttgatctctggagcctccctgaaggccaggtggggcaggtgttctcatgctcctgccagggaaattggccatcagagacacagagtatcttgcttagggtcccacagcccccagcagcagggactggaaccagagactggctgctcctgctccccagcagttccttcctgcacatcaggggcttctccacctgattcaagcgacaggaaccccctgtgcatcttcatcctcctgctgggttcagcctggcccttaaacagatgtggaccgggggccagggagttgcattgaagggcagggccctgtttgttccttgcattgccgccagntgggantgggtngggcctttccgtgtttttgttcaaggnttgggttgattgagggaagaagtttcntgttaggcagncttccnttttagggttttgncacaagaantgtttcaaatttttgggcgtcttat

SEQ ID NO: 269109 - DNA, 313 bp, Homo Sapiens
  misc_feature (21)..(21): n is a, c, g, or t
  misc_feature (56)..(56): n is a, c, g, or t
  misc_feature (121)..(121): n is a, c, g, or t
catttccccactatcccccgnccccccaaagctaatattcctaacctgtttattanatttattcactgttggtcttatgtttgaacaaaatgattttgtttatctccaaaaagcaataagncgtcaggaccatgtattctgttatagaggcacatagctacttgttttcaggggtgctttgccattaaaaccatggcaacattttcaaagtgacttattgatcaatgtttcccctgagcacaggccaattacaatatcactaattaaatgtctctcaaacacctttaacaggaaaaattctttgtaagagaaa

SEQ ID NO: 269110 - DNA, 395 bp, Homo Sapiens
  misc_feature (13)..(13): n is a, c, g, or t
  misc_feature (169)..(169): n is a, c, g, or t
tgtttgggccagntctggatcactcatattgttgagggaggggtgggggcataagataacaaggaacctacaggccacttgaggaaattctctggttctgccttgtcagtcgcttcaaacttccacagcagaagagttggaattctaatgccgcaatatcgttgtaatnccagggattctctagaggcaagttaaggctttctgggcaaagaaaacaattccagatgatattgtgatagaatgctacagtgaaatgcttcttaatgactctcctgtcctgcctaaaggacaaagacctatgagtgacttcaacttgacgtgatgtttcagtgatctttacttcagctctaagtcagaatcaatgccacaggaaaagaaaagcttcttacatctca

SEQ ID NO: 269111 - DNA, 405 bp, Homo Sapiens
  misc_feature (23)..(23): n is a, c, g, or t
  misc_feature (105)..(105): n is a, c, g, or t
ggacactgccacattaaaaacantgcctacagaaagagtcctgaatacccagaagggtataactccaaccctaacaagtctctggtctgcaaaacctgccatggnacaaatccaattcaaaggggacttaagtctgtgcaggagctgtattttaagggaactgaattgggaacacagatgtttcttcagttagcagagttggcagaacagcttctggaccaaatccgagttcctaatgcgggaaggggccttggagagcatctacttcaacccactcattcaactgctgaggaaactgaggcccatgaggcagttaagtggcacacccagcaagtggcaagagtggcagtgttctgatgacaagtactgtgcgttttccattacaccatgattcgctttaaaaaa

SEQ ID NO: 269112 - DNA, 993 bp, Homo Sapiens
agtctgagaagtgtcgggatgattcagactgtgcaagggaaggaatatgtaatggcttcacagctctctgcccagcatctgaccctaaaccaaacttcacagactgtaataggcatacacaagtgtgcattaatgggcaatgtgcaggttctatctgtgagaaatatggcttagaggagtgtacgtgtgccagttctgatggcaaagatgataaagaattatgccatgtatgctgtatgaagaaaatggacccatcaacttgtgccagtacagggtctgtgcagtggagtaggcacttcagtggtcgaaccatcaccctgcaacctggatccccttgcaacgattttagaggttactgtgatgttttcatgcggtgcagattagtagatgctgatggtcctctagctaggcttaaaaaagcaatttttagtccagagctctatgaaaacattgctgaatggattgtggctcattggtgggcagtattacttatgggaattgctctgatcatgctaatggctggatttattaagatatgcagtgttcatactccaagtagtaatccaaagttgcctcctcctaaaccacttccaggcactttaaagaggaggagacctccacagcccattcagcaaccccagcgtcagacccccgagagagttatcaaatgggacacatgagacgctaactgcagcttttgccttggttcttcctagtgcctacaatgggaaaacttcactccaaagagaaacctattaagtcatcatctccaaactaaaccctcacaagtaacagttgaaggaaaaaatgggcaagaggttcatatccttcagaccaggtgggatttactttaaatttttaaagcctggaaaatttccaatttggggggttgggaggtgggaaaagggaacccatttttcttatggaacaggttttttttaacttaatgggcacaagtcttaggatttttattatgtgccccctgtttccttt

SEQ ID NO: 269113 - DNA, 496 bp, Homo Sapiens
  misc_feature (19)..(19): n is a, c, g, or t
  misc_feature (53)..(53): n is a, c, g, or t
aggaacaggggcacataanaatatccaaagactttgtgccataagttaaaaanaccggtccataacaaaatgggttcccttttccacctcccaccccccaaatggaaatttccaggccttttaaaatttaagtaattcccacctggtctgaaggaatatgatctcttgcccattttttcttcaactgttacttgtgagggtttaagtttggagatgatgacttaataggtttctctttggagtgaagttttcccattgtaggcactaggaagaaccaaggcaaaagctgcagttagcgtctcatgtgtcccatttgataactctctcgggcgactgacgctggggttgctgaatgggctgtggaggtctcctcctctttaaagtgcctggaagtggtttaggaggaggcaactttggattactacttggagtatgaacactgcatatcttaataaatccagccattagcatgatcagagcaattcccataagtaat

SEQ ID NO: 269114 - DNA, 441 bp, Homo Sapiens
  misc_feature (321)..(321): n is a, c, g, or t
  misc_feature (332)..(332): n is a, c, g, or t
  misc_feature (417)..(417): n is a, c, g, or t
aagagagctagcaccatgagttcaataccctggggtgagtcttggggaacataatcatatctctgatggtcaccatcaggacatgagaccaacagggcaggtctaacacttctggggcctgaacacaactgatgtcaaaatgaaccaactggacaggtgtcctctgtgtagggcaggcacagtccatcaagattctcctagaactgtccagaaccacccccctcccttcactctggttccacacttaatgaaaaaccttctgatgactaatacagggtgctggcacataaatgaagtgttttgaattagcagaaatgggcntaggcatagtnggcttcacgtctgtaatcctaggcattttcggggaggcttgagggcagggcggattcgtttgaaccccagggagtttcaaaaccngttgggtttgggcaacatgggtga

SEQ ID NO: 269115 - DNA, 406 bp, Homo Sapiens
aggcatatcctgttaaactaaatatgttagtttttaacatatcctgttaaaaactaaaacttaaaaggatgagacaccatatcgtacttgaggttgtgatgctggcgaaatcatcatcaggtgctttgacaccccccatcccatgcccccaacaaccaccacatgcacacacaccctgggcctctgccccacagctctctgggaccacagtcagggcaggaccaagtcagggatagagggggctagactgagcggaccatgaggcacagatagggtcataggaaggaataggcagtgtattcaatgatatatacactaaaattataccctggacaaagtgggggttaccccgggggttggcaaggcaagtgtttgcctccttttaggggggtctttttatttggtt

SEQ ID NO: 269116 - DNA, 645 bp, Homo Sapiens
ctgtctggtctgtttgaaggacagtgaggtagcctgtttggctggagcagagaagtaatgggggtcaaagagtgtgggaccctgtggccactacaaacagtgagctctttgtcctgagagcaatgggaagaccccaccgttaccctgtgaagtgggattatcaacctgcttttacataagaggagactgagggtcagggagaagtgactcgtccaagaacatctggcaagagggtggcagagctacgaacccagatcggcttcctgagccccattttgtcatcattgcccagggtctctctctaagttggcctcctctcccttgactctcaacagccgaagtgggtctggatgaagaacaagatggaaatccgtgaagatcccaagttcctgataaccaattaccaaggagtcctgacgctgaacatccgtcgcccctcgcccttcgacgctgggacttacacatgccgggccgtcaacgagctgggagaggcgctggctgagtgcaagctggaggtccgagtgccgcagtgagacctgtcccctacctgccaagacaattggtggtggagtcctgaccccaatccccaacctcccaggactgtgttctttctggagttttcgctgagaacaaaacagtgttgtc

SEQ ID NO: 269117 - DNA, 189 bp, Homo Sapiens
  misc_feature (137)..(137): n is a, c, g, or t
  misc_feature (143)..(143): n is a, c, g, or t
  misc_feature (150)..(150): n is a, c, g, or t
aagttctccctatgagctcagtctaataaaatgtctcaagaaaagcattttacaaaaagaatcccttaatgggcataattttaacaatgcaaatcacctttaaaagactgtgtgcctgtaatcccagctattctggnggctgnggcagcnggactgcttgggcccaagtttgaaaacagcctgggcaac

SEQ ID NO: 269118 - DNA, 434 bp, Homo Sapiens
  misc_feature (61)..(61): n is a, c, g, or t
  misc_feature (189)..(197): n is a, c, g, or t
tgatcacatgactcggtaacttaaacctcttcactggcttcccaagacttaaaatggaatnctgatgcctttattttattgctttacatgaacagggccctgcgaacctctccagtgtcattccactccaatcctcctttcagtgcacgatgctccagccacactggccatctttcggttcctgatacnnnnnnnnncacgttccttttccatggaaagcaggtcacccttgttattttgtatcgatgacaactctttaaacttattttgctttttggctttatgtatgtgtgtgggtgggtgggactgactgccccactagaatgtaagctccatgagggcagggaatcttgctttcttgtttaccattgtatactcagttctttacacagtgcctgaaacataacaggtacacaataaatatctattgaatg

SEQ ID NO: 269119 - DNA, 418 bp, Homo Sapiens
  misc_feature (208)..(208): n is a, c, g, or t
  misc_feature (364)..(364): n is a, c, g, or t
gcgtttcagggtaagattaggaataaaaactatcattacatataaaagtagtattaattcttatgctgaaaaagcgttttggggccttggctgaaccccagtgcagggacagctattgttctgatcagtaccctcacctcctctgaggggcgctccccctcattgcaactatcctgttctgtgaaagttgttgcccatcgcagaggtncgtccactggctgctggggtgggcaggtgtttccaagccaggcccatcttggtttttccccagggattttcaaattgggaattaagggaagaagctctctactgatgaagttataaaatgtgaggccagggagctactgatgggacattgtttccngttgaacagcaaaaagtagcccaagggaaacaaagatggcaccaatgacagggg

SEQ ID NO: 269120 - DNA, 352 bp, Homo Sapiens
gtttgggccactgtgccagcccattttttaaattaaatgttttgaaaaaaattcaggtatacagaaaagttgcaaaaatataataatgaactcctacacacccttcatctcgatacacccattaacactgacacatttgctttatttctctctacactatctttctcttacatacttagtacatatccttattttttgctatatctttcagaaataagttgcagagattatgactcctcacctttaaatactgcagtatgtatctcctaggaagggctataccattcacaatgcagcctcttttaattttgattgtgacaagtcatatggtgctcacctgacttggtatttt

SEQ ID NO: 269121 - DNA, 434 bp, Homo Sapiens
  misc_feature (54)..(82): n is a, c, g, or t
ctcaaaaaaactgtgaacccagcgaaaaaatgcaggttacatgcttatacatannnnnnnnnnnnnnnnnnnnnnnnnnnnngttaatgtagcagtaataacagcaatctttgcttattgccatgttccggacaaattttcagacatgattatattctcagatgatggcccataggaacctgcacctgataaatttgatttttcactttctctatcaactaaagtaattcctttctcccttctttgacctttcccctttttaggttagggttctcttccctctggtcaacataggattcattctctacttatggcaggaatgggggcatggcagcctaggggaaggtttcccttaatcagggtgtggtggtggtggtcccctggtggtcccttcctattggctggtttttttccgggggacttaataaaggggg

SEQ ID NO: 269122 - DNA, 535 bp, Homo Sapiens
  misc_feature (116)..(116): n is a, c, g, or t
ggcacgagcagacctggagctcccccacaggcctgtgactccctctttggggccctgcaatctccaagcttccaggcaccaccatggtccccagtgccagctgtggaagctgcttncagtagcacctggtcttgccacagccttgcaaagaaccagcacccatgccggcacttggagctgcccaccccactgcagcaaccagcctgtctgactgtgtgcagtggccagacctcacacttgctcacatacccttcaccgctcccaccttactcgcccttgggagacatgggatcaaggccagtagcgtgagcaaagcacagcctgcaaggccaagtaggcagaatgacgccagtgggccccaccaaatctcaagcaaaggcgccactggtcacagatgtttccggtcagaaaagtgacaccccaaagatcccctaacagtagaccttccctacaattgttttgctttgtttcttatatataaacaagcattgtacctaaggtggacgtaattcttccttttgcttttgggaatgtc

SEQ ID NO: 269123 - DNA, 415 bp, Homo Sapiens
gatgaaatgtaaccggatgtgaggatagcctgccatatccaggaacccattaaaggaagagctcctaattgtaagtgatgaagtcgaggaggtgcgtgataatgggccaagtgaggatgcaatgcaccaggtgtataagtagctgcagtcactccagcttcaattcccagttcccaggcagacctctctggagcctgtcgaggatgtgaggacatagtctgaggcacatgaatatgatgcccatgaccatagtttgggtgcatcctatgtggatggggtggggggcgttcatgtgcccgcctggaaacacagaacacaaaaagaccactggaaataattgaataattggttatttcttttcttaatgtagaaaaaaatccctagtattaatactataaacatctagagattagtc

SEQ ID NO: 269124 - DNA, 430 bp, Homo Sapiens
  misc_feature (65)..(65): n is a, c, g, or t
  misc_feature (216)..(216): n is a, c, g, or t
  misc_feature (222)..(222): n is a, c, g, or t
gaaatgaacactggaaaggttccgcagggccctgttcatgtaaagcaataaaataaaggcatcanaattcattttaagtctttgggaagccagtgaagaggtttaagttacgaagtcatgtgatctgggttgtgtgttaaaagtatccctctggcttctttgtgaagaggaggttgggaggcagagggtgagccaagaggtggggtcagtcttccngggtcnagagatgaccatggcccgagaccaggctgatggcagtgcaagagcacgagaagtctttcctcttctccatctccaaattactgaattatttcaggccctcattctatctcattttgacctttgcaaaaaccctcctggggcacacctctgggtttatatgctcctaatctgtcctccacactgcctgccaaataaattttctcgtgcc

SEQ ID NO: 269125 - DNA, 822 bp, Homo Sapiens
cctgttctgcagggcttcagcgtggccttcattcccgcctcgcctcggcctcttttcaattaagaagtgatgccacttgaggcagggtctgcatgatcacttcttgggtttcagtttgaaagctgccatccctgcgactgcccagggcctgtatgttgggaccgaagccaaacaccactgtcctccagggggctttcggcccggggcagggtccccagtgcccgccttcgaatcagactccgcgtttccgcctctccctgggcggacctgccgctagagggcgctcctcctccgcagccggcgccggcgttccagcgccccagactcccgcgctgccgcccgagcctgaggtttctcacggcgttccgggattcgcgcttcggaaaccgggaacaaagaagcaagcagcacccctttcagaaacagtgttctcgctctcctagcagctggcccgggcccggaggctggtgccaggagaaggcagaagagcccgggcagccggagtgggctacggggttcaggcagtgccaaggaagaagggcctcacaatgggcaattcagctgcctcccgggccgttgtccccgctgtcttcaaacaggggtcccctgtcccagctgccccaggaggaggggggaggcaggcagggccgaaaccctccagagcccagagggggacgcttggtggccgctgcagttacataaccataggatgcttttgtaccgtggaccttgttctagcaggatcctttcggaattgcacttttacatgttgggcgaatttgtgtccgtgctgaagtttattaaaggaaaatagatggaaaa

SEQ ID NO: 269126 - DNA, 383 bp, Homo Sapiens
  misc_feature (350)..(350): n is a, c, g, or t
gttggaccaacaaagtaggctctttacaggggtgttctcaccaggtagaaatgcgattcgctcactgaggatgttggggaagggacgaagggtaaagaagaaactgcacgtatacacaggttcacatcactctgcagacagcaatgtgactcagcgtgtgacttctagcagcagtacgagggctacactcctctgctgaggatgtctacattgaaagcctccactagtttcatcgtttgtcaaagttccgtaggattcagtgatgggtcatttcagcatgactggttctggggagaaggtgaggagacaaaaatgggaaagatcctgggcctgttggtagttggtagccntttttcttcaattaatgtgggttgacagtcact

SEQ ID NO: 269127 - DNA, 639 bp, Homo Sapiens
  misc_feature (12)..(12): n is a, c, g, or t
ggaccccactcngtcccagaagccccctaaaagctggagggggacaactcgaggtaaaattccaggggaaaacccctggtaccctggacaggtgagcccactcagaactcacccaaaatgttcggacaccccataacaacagcctacctcaaactgtaacccccaggataacaagttgatgaccttcacactgtggacagtttttcccaaagatgtcagaacaagactccccccatcatgataaggctccccacccctcttaaccgtcccttgctcatgcctgcccctttcacttggcaggataatgcagtcattagaatttcacatgtagtagcttctgagagtaacaacagagtgtcagatatgtcatctcaacctcaaacttttacataacatctcagggggaaatgtggctctctccaccttgcatacagggctcccaatagaaatgaacacagagatattgcctgtgtgtttgcagagaagatggtttgtatgaagacgtaggaaagctgaaattataatagagtcccctttaaatccacattgtgtggatggctcttgccgtttcctaagagatacattgtaaaacgtgacagtaagacattctagcagaataaaacatgtaccacctttgct

SEQ ID NO: 269128 - DNA, 607 bp, Homo Sapiens
  misc_feature (13)..(13): n is a, c, g, or t
  misc_feature (73)..(73): n is a, c, g, or t
  misc_feature (498)..(507): n is a, c, g, or t
attgtgggaggtncagtcaagagttgtgtttgccctgccactttcttttcataaactttactcttttgagaantttgcgaaggcaggaacagagccttggcccaggtaagtatggtttttcttgtcaagtgaccaaccaaccaattctagccacacgaatagttaggaaaatgccaaagtgggaattgttaacctcatcaaaggagatgggacctgcaacacaagcacctttgggtcagtgtgttaattagggctgagagcctgggtgaaaggcaagaagaggggcaaaagaggctgaggtggtaattcctcttgtcagtgtcatgggagaaaagaaacaaggaacgtttactgtctaaactgagctgggcagagggcatggaaactatgaagcaaaatatctgtaaatgtgctcacctcccaacaaaaggaagactgtcccaactcatcctccagcctacttctacttccgtttctaccaacccaaaaggcacattnnnnnnnnnnttgtcagagggggctaagtactaggaaggcaaatggactgactgcctggaacaaggtacccagggaaacccaggaatccccccagacaatcaccaaatct

SEQ ID NO: 269129 - DNA, 541 bp, Homo Sapiens
  misc_feature (396)..(396): n is a, c, g, or t
aaactttattttttagagcgcttttaggttcacagcaaaattgaacagaaggtagacagatttcctatatatcccctgcctccacacatgcatatagcctcccccattatcaacatctccgaccaaagtggtacatttgttacaattgatgtgctgctcattttctcattcattccaatatgaactgaatacctactaggtgtttttgtgaacaaatggatattagaaagaaaatgcaactcatccctaaagttaataaatactccccaaatcaaacaaaacctaaactgagggaacagaccacctgaaacaaagaagatcaactgtctttttctttggcaaagtctgctcttaacaggcatgtggacatccatttggagggtttccaggccaatncaggaaaattcatccaaaacaaggatggcatggttttccaaattcccaggccaaaggttctgggaatttaaggtgggtggaaggcatggcacaaattttaatggtgggggcttactaaattttggacacttaaaggtggtaggag

SEQ ID NO: 269130 - DNA, 486 bp, Homo Sapiens
cccctttgtgatgaactgagatagctcagagaccccaagcccaggttctcagaaggctaaactgtgcttgcaaagtaagatgtgcctggccttgccccgaatcaacagagcaaaggctgggtgctggctcacaaaggtggtggagattctgcccaagagactggatttcaccttttcaagattctctgatcttccagaaacttctttgaatagacatgtccagaaagctgactagtaactgtgatgtgcccaggaatttttagagtcagccaagcacggtggggaaagaagagcatagggcacttctctggcccctgcgctggataaccacacccatgagcctaccagactctcagcccctccctcttcaaccaaaactgtgtggctcctgatagggaccagggggattggctcctgtgcttcaaagagaaataatggagtcccagggaaaagagtggacccacgctccaggcattatgattttga

SEQ ID NO: 269131 - DNA, 486 bp, Homo Sapiens
  misc_feature (393)..(393): n is a, c, g, or t
ggagatattgtcttccttgggggacatacatggtgtatgttctcattgtgggattctattttgttctaccaggacctctaatttctgccagttacttcattcatttgttctcttcaccatgagtctccagagggtacttccatggtccgtgcctccccatctcccagcaattctgcatttccaagattggcacctctggtcctctgcacggtgaagccccttcctttcaattccccagtagccagtgctctaatccaccaggtctcaggcatgatctatgtttctccacactcgctttctgaggagagttttgcctgggttctatcatgaacaggccctccctgctgtcctggcctctatttgcatagtgtttcctgctccctctggccgttngtgtggctcccagacctgggttaaagaaaatcacctgagggccacagtgttccctagcctggtgtttagggcaggattatggggtgagatttt

SEQ ID NO: 269132 - DNA, 351 bp, Homo Sapiens
  misc_feature (21)..(21): n is a, c, g, or t
  misc_feature (34)..(34): n is a, c, g, or t
caaggagatctccctttcagnctggccctgcctncgacactttgctggtggaattaaatatagcacagggagacacagttgccaggcagaagcaggaggtgctgtgaatagaacagtgccctttgtggtgacaaagctatggggagcctgctgtgcatgtgccaagactgcagggcagctcccccagccccacagggacctctgagctgcatggttttgtccccgcttcacatgtgaaatatctgaagttcagatgaagtcgtttccccaagatcattctgccaagtaggagagcctgaatgcacagtctagagcccacgttcctgccaccgactcactctgtgccgaaat

SEQ ID NO: 269133 - DNA, 331 bp, Homo Sapiens
  misc_feature (29)..(29): n is a, c, g, or t
  misc_feature (89)..(89): n is a, c, g, or t
  misc_feature (125)..(125): n is a, c, g, or t
  misc_feature (149)..(149): n is a, c, g, or t
aagggccctagcacacctttgatgaggtnccccggaccgtgagacccctcacaaagacccaacccattccctctaatagcccatttaanggtactgcagttcatgggaaaatgtcctcattcttnggagatagatgcctggattatatnggtgaatgccttcaagaaatgtgtaatttaattccaaatagttccccccaaaatacacaaagcaaataaggccaaaatgttcattgttgaatctgcagtggctggtatttcagtgaacagtgtacttgttctttcaacttttctgtatgtttggaatttttcttaataaaagattgtgggaa

SEQ ID NO: 269134 - DNA, 810 bp, Homo Sapiens
taaatagaaaacaaggtaaacaaattacatgagtgggaggatgcactaagtgtttgggagggggttataatacaattggttgcagaaagcggggctgggtgtagaggtggcagagcaaatatgaaaaatgggaaggaagttccaagggcaccttcatatgctttgcagaattccaggcacaagatgatagatacattccctatttaatccttttaaactcctatgagatggggtattaccccgcattttcatctgagaacactggtggggatgatgattagataacttacttagggatctatagctgttgagaagtgccactgagattcaccccaggtctgtccccatcagaccttatacacactcttcccacagcacctgccttgggactgggaaggcaagaaggttctgggatacagtagctgatctccatttcctgacccaagctacaagaagtgagacaccacttaggctcaccctcagcataagacctcgcccatagtacgctcccagcaaacgtcaaatgaccaacgagaactgagttcagggatactctcatgaggacatggcagtagggcagacaagtgccaaaattgaaagtatcatttgtatcattcctaggtgttctttgttattcttcttctacagagatcttgaatcaggaactcagagagaaatgtaatttatatattttgctggagaacaattacttttcattttacttattttaaataagatgaaaagtacccatttgatgcctataaaacataaaacatgcctaaataacatgcacataatttacaattcatg

SEQ ID NO: 269135 - DNA, 456 bp, Homo Sapiens
  misc_feature (69)..(69): n is a, c, g, or t
caaagcaggcaactttattctataaacacaactttattaagcagaatacactgtagatgcttttccccnaacgtatctggctggccagtctttgtcgttgttcattctggggataaaggggaacttaggctagcagttctaatgtgacattctttaagcatatcttaaaatagtatttaagtaaatggtctaatttctacataattattgcactgaacttttttgtttattaaggtgtttaaataagctcagctaattcaagacactgtagccacttgtgcatcagtgtgcttgaatttagtagcttacagcattatttatgaaggaaaaaatacataaatatgaagtacctcatgttgaatgttattgtactgtatttttaatgtaacagtgcagatcttgttagacacatgaatgtgtataatcatgttaaatgcaaataaaactagttcatag

SEQ ID NO: 269136 - DNA, 671 bp, Homo Sapiens
aacctttattcattcagaatgcaattctgggccactctacaaccaagagaaaaccctaaacttttaagtagtgttaacggactacataatataatagtattgctcctatatgtacaagcaagaagtcaatttttattcttttcataaaacctctttgtaaacatgtaccttttcttcccatcaaaaatgcattaacaagatcatgcttatagttagtcagcacaagaaaaaaacgacaatttatactgaactatttaagtcttgcagtagagtgctcacaactccgagctgtatctgttaaccttttcaatagcattcattatgtgacattgtcaccaattacagtaaaagaacttcactaatttttgaaagctagaattactcaaaaaattctgcattgtaaataataccaggaatattgcatttaagcctaggatggcaaaattacttaaatcttttctatacttttttgtgtaatatagggtgggaaaatgaatactatataagaggaatgaaatatatcaggttcttatatttttaccctagggggctatttattttaggggaaggttggattaatattttaaatggatttaaaaaataaatccaggttagggtatttaccggcaccaaaatccttaaaaaaagggccccccattaccatccatacc

SEQ ID NO: 269137 - DNA, 529 bp, Homo Sapiens
  misc_feature (46)..(46): n is a, c, g, or t
  misc_feature (363)..(417): n is a, c, g, or t
tttccacatccatgaagcccaatgatgcgtgtacataatcccaggngagggggtcaggtgtcgaaccagcaggcaaggcgaggtgcccgctcagctcagcaaggttctcaactgcctcgagtacccaccagaccaagaagggctgcgcagagccgaggacgctgggtcctcctctctgggacacaggggtactcacgaaaactgggccgcgtggtttggtgaaggtttgcaacggcggggactcaccttcattctcttccttcactttcccccacaccctacaacaggtcggacccacaaaagacttcagttatcatcacaaacatgagccaaaagcacatacctaccccatcccccaccccnnnnnnnnnnnnnnnnnnnnnnnnnnnnnnnnnnnnnnnnnnnnnnnnnnnnnnngaggtgaacagaaactgaaacattttgtccacaacttcacgggacgtggccagactgggtttgcgttccaacctgcaaaacacaaatacattttttaaaatcaagaaaattt

SEQ ID NO: 269138 - DNA, 418 bp, Homo Sapiens
gcgtgttttaattgtgtattagagaagttggaagtttaatttcaatattgatggtatcatcattttctccgctttgttcagaggaacacacagaatcaatttttacaagcatatacaacaattcatctggtgctgtgccctaaaatcagtaatctgattagttctagactaccgggtttccatgcgctcctcttggctttggtggcatggctcaattcccagcggaatactttttcatgcactgtctgcaactcaactacagcaggcttaaagaccatgcagattaacactgtagcaaattgttttgatatttaacagacataaaaaggtcatttcctgatatgaaattctgaaaatctgcataaatatttttgtgtaaaattaaattagttatgtatttttttcaaactagaacttg

SEQ ID NO: 269139 - DNA, 465 bp, Homo Sapiens
  misc_feature (24)..(24): n is a, c, g, or t
  misc_feature (36)..(36): n is a, c, g, or t
  misc_feature (112)..(112): n is a, c, g, or t
ttctccctccccctccctctatgnctttctgacccngtgccccccgggacgccctattgctgaatggggcataggcattccccagttcccctccctggccccaagctccccnggaggtggggacccacacatgacagagcgacaccccagcttgtcctctcttttgcaaagtgcaggatgagaattttgggttatccctggctcctccccatgttttttgcagctccagtgacagcaatgccaaatgatacccaaagataaaaatattgatccaagtgcagatgagctgaaaacattccttttctgatagaaaacacggtaaacagtctcacttccttcctcaaagattgtacctggaaagccatggctggttaattttttccctttagaatacataacattgtgaacttcagaaaataccataatcagggagttccatgacagagttaagtctccacactccaa

SEQ ID NO: 269140 - DNA, 461 bp, Homo Sapiens
  misc_feature (23)..(23): n is a, c, g, or t
  misc_feature (72)..(72): n is a, c, g, or t
aaatgtatccttccccatataancctttatttaagcccttgagccaagcctatatgtgaaaaaaattccacncccatggaatacctatgcagcccacaaaaagcatgagatcgcgtccctttgcatggacatggatgccagctggaggccattattcttagcaaactaatacaggaacagaaaaccaaacccctcatgttctcacttataagtgggagctaaatgatgagagcatgtggacatatagaggggaacagcacacactggggcctggtggagggtgagaggagggagatcaggaaaaataactgatggattctagacttaatacctggatgattaaataatctgtacaacaaaccccagtgacacaagttacctgtgtaacctgcatttgtacccctgaacttaaaataaaagttaaagaaaaaattctgagacaaaataattttaaattgtaa

SEQ ID NO: 269141 - DNA, 424 bp, Homo Sapiens
  misc_feature (269)..(295): n is a, c, g, or t
cctgccggaaattgtaaaaattggtttccagctggagaggcttgttccaaaatgttgtccgtacatttccagctgtgtttcggcctataaaaaggcggctgaaagaaggggaaaattactttagacttaattggaagtttccatatggcacacattaccagtagagaaaaagatataaacggcaataaatattaggctcgatttgagaaactctccccacctcaatgctttcttttcccttgctatttaagtgtctactttgcaacccnnnnnnnnnnnnnnnnnnnnnnnnnnngagggtgagggggtagatgttaataagtggtagtttttcaccaccacacaggttcaatgtggtcctatctagtaaaatgtgaaatgcacaaaagaaccaggtaagtgattattcttatgaactataaaa

SEQ ID NO: 269142 - DNA, 476 bp, Homo Sapiens
  misc_feature (346)..(346): n is a, c, g, or t
ccccaaaaaatttgctactcttgaggttctgtcaaagaatgtgctgtggcctctagaagcatttttaaaaagagactttcacaagtgattgtgcaaaattgtgaggtcactgaataggtgtgtatcctcctaaggaggtagcgttggaggagctgttcttgttcaatttactcagcacctgtgaagaggcttcactgtgatttgcctgtacaggtgtgcaggtaaaaatctaagttccacaggtagtgcaaaaaaatctacctccctaggtacctcgtacatttatcacagtttcctgggtaaacagttctgctgttgttgacaaaattttattcagaaacattgncatactgcttcttctaaattagtgagttttccctacaagtgggctgttctttcagtttagtcgtttaagttatgtttgacataaatggttatgtgtgtgggcggggcttttgcgtaggttgttgaaacat

SEQ ID NO: 269143 - DNA, 423 bp, Homo Sapiens
  misc_feature (11)..(11): n is a, c, g, or t
  misc_feature (24)..(24): n is a, c, g, or t
  misc_feature (43)..(43): n is a, c, g, or t
  misc_feature (65)..(65): n is a, c, g, or t
  misc_feature (74)..(74): n is a, c, g, or t
  misc_feature (79)..(79): n is a, c, g, or t
  misc_feature (85)..(85): n is a, c, g, or t
  misc_feature (100)..(100): n is a, c, g, or t
  misc_feature (126)..(126): n is a, c, g, or t
gtgggggtttnaagggggggcccngggaaggtacctttaaaanaccccctaaacaaaatacccanttccatttnccccnccctangtaaaataaccaacncccccattagtgtgtagaagcctatncctaaccccattaaaattttatttttatatttatttaaatatcctactgtacatgacaaaatatatttcctgtggctgcccttttataattattttcccaagtagacataatcctatttaaaacatatttttcctagtgacaaagaaatacattttatcctgatatatagtttttaaatactaggctatttcttttcatactgcctgattggtttaataaacatgatgtgacaaatattaagtatatatcattttatcatgttgtaactgatccaaaataataaaagaaataattat

SEQ ID NO: 269144 - DNA, 455 bp, Homo Sapiens
  misc_feature (419)..(419): n is a, c, g, or t
gaaagaataactaggtaatatatgaaactagtttcacactctctggttggtaaaagagatgctgggtgagctacagtaaaggcagccttttaccaagttaccacctattaccgtcaaaagccttcaatagaaagcaaagctccaggatcattctgtttctgctcagtatcagacagataaccttaccctcaaagattctgggttctgagagaacaaactgggcccagggatgctaacttctgcttcaagtgaatctgggccgtgtggggcaacaagcacttgtttgcagtctatatttgccaccacttgggactcactaggcatccctcgggtaaagacaagggctaggggtaggtagggtaaaggcacaatgtttttacaatggaaaggggcgctttcactgggtcaggcgcgggaantaagtacaggggcccgcggattttcttttgggctgt

SEQ ID NO: 269145 - DNA, 591 bp, Homo Sapiens
tcacacaacaccgaggtcggggagacgcggacagttactccagaaatgcctgccgtgtctgcgttctttagcctcgctgcgctggctgaagtggcagccatggaaaatgtgcacagaggtcagaggtcaactccgctcacccatgatggacagccaaaagaaatgccgcaggcccctgtacttatttcctgcgctgaccagtgaagcgccctttcattgtaaaacattgtgctttacctactaccctagccttgtctttaccgagggatgctagtgagtccaagtggtggaaaatatagactgcaaacaagtgcttgttgccccacacggcccagattcacttgaagcagaagttagcatcctgggccagtttgttctctcagaacccagaatctttgagggtaaggttatctgtctgatactgagcagaaacagaatgatcctggactttgctttctattgaaggcttttgacggtaataggtggtaacttggtaaaaggctgcctttactgtagctcacccagcatctcttttaccaaccagagagtgtgaaactagtttcatatattacctagttattctttcaaaac

SEQ ID NO: 269146 - DNA, 694 bp, Homo Sapiens
  misc_feature (130)..(130): n is a, c, g, or t
  misc_feature (164)..(164): n is a, c, g, or t
  misc_feature (175)..(175): n is a, c, g, or t
ccacacttctcagagctgcccctggacgaccaggtcatcctgctgcgggcaggcttggaatgagctgctcatcgcctccttctcccaccgctccatcgccgtgaaggacgggatcctcctggccaccggnctgcacgtccaccggaacagcgcccacagcgagngggtggcctantctttgacagggtgctgacggagcttgtgtccaagatgcgggacatgcagatggacaagacggagctgggctgcctgcgcgccatcgtcctctttaaccctgactccaaggggctctcgaacccggccgaggtggaggcgctgagggagaaggtctatgcgtccttggaggcctactgcaagcacaagtacccagagcagccgggaaggttcgctaagctcttgctccgcctgccggctctgcgctccatcgggctcaaatgcctggaacatctcttcttcttcaagctcatcggggacacacccattgacaccttccttatggagatgctggaggcgccgcaccaaatgacttaggctgcgggcccatcctttgtgcccacccgttctggccaccctgcctggacgccagctgttcttctcagcctgagccctgtccctgcccttctctgcctggcctgtttggacttttgggcacagcctgtcactgctctgcctaagagatgtgttgtcaccctcc

SEQ ID NO: 269147 - DNA, 433 bp, Homo Sapiens
  misc_feature (354)..(354): n is a, c, g, or t
  misc_feature (378)..(378): n is a, c, g, or t
  misc_feature (397)..(397): n is a, c, g, or t
  misc_feature (411)..(411): n is a, c, g, or t
  misc_feature (422)..(422): n is a, c, g, or t
gaagagtttaacacgcatgagttgctgtcatctggtgacatcgtttgagtctctctagtcattgaacagaacaagaaaaatcgaattaaatttataatctgaactgaagttatatgtgacccatcacatctctcaagttttaaaatgggtttttttgttgttgttgatggggggggagagggtccagcagcttttaaatgttttcacatcgtgtgttccaaaaataactggttagcctaagtcacttccaccctccaatgttgtgaatgcagtctctagcattcgctatttaatgtcttcttcctgcactatttgaggaaatcgcgaggtcgacttaataccggcagtcgccanttcgcggaccggaggcgggagttntgcttagttcttgagggantgcgtggggttccntggcagagagntcccgttaggg

SEQ ID NO: 269148 - DNA, 466 bp, Homo Sapiens
  misc_feature (447)..(447): n is a, c, g, or t
tttaaattctaaagaaaagaagtttaattggctcacagttccacatggctggagaggcctcaggaaaggtacaatcatggcggaacacaaggggaagcaaggcacgtcttaccatggcacagcaggagagagagagcaaagggagaagtgctgcacttttaaaccatcagatttcgtgagaactcgttcactatcaacagaacagcaagggggaaatccctccccatgatccaatcacctcccaccaggtccctccgctgacatgcggggattacaatttgacatgagatttgggtggggacacagagccaaactatatcatttgggttaaagaagtaagtgggcctgtatttaacttttggggactgggaaaatgaatttaaaataattcctttattttacagatatttaaaagtaattgtgaaattaaaagaaaaaattgtctgntaaaaccacatcccatagg

SEQ ID NO: 269149 - DNA, 452 bp, Homo Sapiens
  misc_feature (364)..(364): n is a, c, g, or t
  misc_feature (428)..(428): n is a, c, g, or t
ggcacgaggcaaaatgaaactatatgaacaaaaatcagctctcatttcactgctagactttggtgttttctttaagaagtagccttgttaatgcttagttttgccttggggaccttaatgtgtcattaactgcctggaaatacctttcatttaaaaaagtatactttagtacctaatgttcaatttagtatcgatctggatattttagcaaattttgacttttcaaagacaaagtttctgtcttgtaatgtttcttggggccggctatactgcctttcatctaaaactcactacagttcactggggccgtttgggtaacaggggtaaccgggggcataattagggtgcttggattgacaagagnagttaccagtaccagaagtcaggttctattttaacccccatccttttccaattggatgtttttnttttccacccattattccactgtt

SEQ ID NO: 269150 - DNA, 373 bp, Homo Sapiens
gaacggaggtttgtatgtgcgcagagccctgtcgcaatgccccagcaagcttcttgttggcatgtggccactctaaattgtgctccaggatctgctatgggtccatgcttgcaggagaaacagctgtgtagaatttcctattgcatttcatttgtgggtttagaactcggttgcttatttcatattgtctcccttttcagtccttcaaggtacatttttccaacttctctaatgaattattacatttctgagtagctgatatgtttttatcttatctaagcagtatatttataattccttctttgcattggctaatctgattagtagttcagaacccaattttcagattgtctatagcaaactgtgaagaact

SEQ ID NO: 269151 - DNA, 566 bp, Homo Sapiens
cccatctcagcagcaagaccatctttcactcactgacggcagcagccatgtctctcaaagtggtgaaactaatatctgagcatcttttagacaagagaggcaaagacaaactggatttaatggccccaacatcaaagggtgaacccaggatatgaattttggcatcttcccattgtcgaattagtctccagcctctaaataatgcccagtcttctcccccaaagtcaagcaagagactagttgaagggagttctggggccaggctcactggaccattgtcacaaccctctgtttctctttgactaagtgccctggctacaggaattacacagttctctttctccaaagggcaagatctcatttcaatttctttattagagggccttattgatgtgttctaagtctttccagaaaaaaactatccagtgatttatatcctgatttcaaccagtcacttagctgataatcacagtaagaagacttctggtattatctctctatcagataagattttgttaatgtactattttactcttcaataaataaaagtttattatctcaatcac

SEQ ID NO: 269152 - DNA, 376 bp, Homo Sapiens
  misc_feature (333)..(333): n is a, c, g, or t
ctaggaaatttctttattatccagtgaatttttatttgttataattttatttccaagttatcttctatatggatgttcatttttatagcaatcattcttttaagtatgcagtattttttcacctctgaagctatttaagtttttaatgtgtttttagctccctgcattttttgttattctgttgtcattcacatttagaggccttcctcaagcattctgtgactcttggctgtgaattcatatttaaaagtaagtgccttaaacacttactagaagctggagttgagagcttgttaactggtctccctttgaagggtgtttgtagggggaccnaaatcatgtgccacgtgtgtgtagtactcagttttaaaaatta

SEQ ID NO: 269153 - DNA, 276 bp, Homo Sapiens
  misc_feature (85)..(85): n is a, c, g, or t
  misc_feature (193)..(193): n is a, c, g, or t
  misc_feature (244)..(244): n is a, c, g, or t
  misc_feature (266)..(266): n is a, c, g, or t
acaatcagtaattataatcaaatacataattatatacaggattatatacatttggcccagacttttacatcacagtacatagttncccttagaaatattgtatacatttatcaccaaacaataaaatccaacaacagtagtgttacagcacctgttagtacagacatctttttcataaattacatcatagganaatatacggctgtaaatggggcttttaaaaatgtcttttataaaatctgancatacaatatttcattacagantgtttttgtt

SEQ ID NO: 269154 - DNA, 417 bp, Homo Sapiens
  misc_feature (18)..(18): n is a, c, g, or t
gggcctgtagaggccctnctgcctcccgcctaaccctctactttaaatgtgagaacaatacccgcagagaataatgagcctgtccagaatgtagaggacagacccatgggaacttcaaaattcccctctcaatccccattttatgttagaaaatcaagtaccgagaatgttaagttaaattatgtgaccaaaacaaggaaagaggctggtaaaactgcattttgcacaaaagtgttgattcaacatgaagtcaaataatatgttctaatgaaaccacacctctcacacacatatcctttctctcaaacctcggtgttactctggccaaaagtcttaggtttcttgaagtgtttgtggaagagtagatggagttttatttaacattatcaagaaatccaagctgcagacccacacata

SEQ ID NO: 269155 - DNA, 194 bp, Homo Sapiens
  misc_feature (137)..(150): n is a, c, g, or t
cctttggcctgggaatttttcccatttttatgaaggggttttaaattgtttcattttgtgtgctgtgcttcaaagccttaactgtcaaatcttgcattatcttgtttgtacagaaatatagtggcctagcagaggcnnnnnnnnnnnnnntgaattttattttacttgtcacacctgtcttaataaactggagt

SEQ ID NO: 269156 - DNA, 359 bp, Homo Sapiens
  misc_feature (244)..(244): n is a, c, g, or t
  misc_feature (336)..(336): n is a, c, g, or t
  misc_feature (341)..(341): n is a, c, g, or t
tttgagatggagtctcgctctgttgcccaggctggaggctctatctcggggggggaaaaagtcagagaattctatgaagaaaacacagcctgccacttactctcacttattaagcacctgcctgtgttagaatttgtaccaagcagcaacagtcacatcctttcctcaagtccaaattatcactgcctccatttattgcttaccctatgggaatgaggaaagaagagatagatcaaccttaggnaattacagagcatataaatctatggaggtgctagggtaatgatttttagaagtataccccatgatccagctgggcaacttaaaatctggganaaaanaaagggggccgggtgcgg

SEQ ID NO: 269157 - DNA, 458 bp, Homo Sapiens
  misc_feature (24)..(24): n is a, c, g, or t
  misc_feature (67)..(67): n is a, c, g, or t
  misc_feature (281)..(281): n is a, c, g, or t
  misc_feature (348)..(348): n is a, c, g, or t
catgtgccccatgtggagtgcccnacctgctcgacatgtgcccggatgtggagtgccgcctgctcanacacgtgccccatgtggagtgcccggcctgactcacgtgccccatgtggagtgctcgcctgctcacacgtgccgatgtggagtgcccgcctgctcacacaaagccccggcatggtggttcctgtaggtttccctgtcctgccggctgagtcagacgctgttacccgtacattcctactcatggtggctttttaatacgtttttatgtcaaggancccttttatatttcgctgcaccttcgagataacgtagaaatattagggatgagatggaagaggacangggtgtttttgtaaaattgaattcaggactgatttgttagcctggtgcttttcgtatcagaccttttaatgaattttcatggatgctgattaaaagacaaacctgtgaaa

SEQ ID NO: 269158 - DNA, 473 bp, Homo Sapiens
ggcaattggatctctcaagtcacccgcttggctctcttcaagtgcactttgcttccttttgttcttgctctaaaacttttactcctgctataaaacttgccttggactatcatgctaccttacgcctccccggccaaattcccctcctcctcctccggggggcaaggatggagtctgctgcagacccattggatttgctgctggtaacagttccaccatttaggttccagcaccaagcaaactaacacccgactcagtgtaaacagccaaacaagcttaaccaattagaaaccaccatctaacctctaactaggtcctttcaactttaaccaagtattttctttgtcttgcttctgtgggaaccttataaaattttcccccttgtacctctgtagtagagacccagttgcttgcagtttgccctgcctgttcatgaatcacccttgctcaaataaactctctaaaatgctaaa

SEQ ID NO: 269159 - DNA, 452 bp, Homo Sapiens
  misc_feature (13)..(13): n is a, c, g, or t
ccccttttcaaanaagattaattagtcgtgcaatgtctgtgagctgcctttcatcacccatttttccctgaagtagggcttagttttattctggaaagacatctcccaaggtgaggtccacccccacagcagacctcaagtagaaattgccccaatttttaccagctggagggacacccttgggtttttgtacgaagctatttaatgagcctgtgtcttggggactcagcaggctggagcttggggcctggtggaccatcaccctggtgtctgtaggtggacccggtctcccacaggtgacatcaacctgagggtggcgtctttagagacaggcacatgggcagctctgttcccttcgcctctactgcgaggcctggggagatgttgttttcatgctgcttccaccatcacactggggtttctggatgggaaataaaaaaataaaggcaaaa

SEQ ID NO: 269160 - DNA, 411 bp, Homo Sapiens
tcccagtcacccagagggccccaaacccggcggccctttcttcctcaaatgtcctcggctctataccgtgcctgggtcttttctctttctctctgcctggaacattccttctttccccttttgtcttgcccactcctgtttacccttcaagtttcaagttcatgtcactgtctcagagaggttttcctgtgctcgccctgtttctctcaggaagccttgctcttttccatcatgcctctaatcacagcttataatcggatatttatttctgtgtctacagtcttgccctgccagactgtatgccccatgtgggcaggcgctcatgattgtttctgattgtttcacgcatgctgctaacccagagcctgggcccaaagctagttagtactcaataaacaatgcattgaatga

SEQ ID NO: 269161 - DNA, 245 bp, Homo Sapiens
  misc_feature (34)..(34): n is a, c, g, or t
ggatgacgtaaatgggactttccttaggcataancttagatagtataaaaatgatgattagccagagaggcccacaattccccacagtcatcccccagtagagtagtagaaaatttgaccttctgcaggaaaaaaatgtatttcatgacccatatgtatatatttcatacatagcactgttgaaactaggacaactaacccagccgaaagattttaaaaggtacaagattagagcagtacaagca

SEQ ID NO: 269162 - DNA, 398 bp, Homo Sapiens
  misc_feature (34)..(34): n is a, c, g, or t
aaccctctttcaaagacaataaatagcacagaantgtccgtgcttctgtgaggcacgaaggagcacctctcccctattcctgaaccatattttaattgatgcctttattgtcccaaatttaccacttaaagaattctattttcatttctgtcctgtttgccacttcatttcatttccttgagtaaatgagctgaagtgtaaagcaaagaatagcagaagcagcttggtaggatggaaggcacgcagtggcatggcctggctccttccctgagtggccttgttgccttgggcgtgtgttcagcacctcccatcccatggatacagtggagattccatacaggccttacttagctccttgcgatactgtgagccagagagaaagtaaaagcacttcacaa

SEQ ID NO: 269163 - DNA, 404 bp, Homo Sapiens
ctgagccatcacacccggtggaagtaatatttttgttgataatgtccaattctatgaagttattaaattcagtcagaagagaatctgcctaagtgggaattaaaatggctaaagttttaacctcaattattttgaaaccagaacattttccccactatagacgattttctaacctgtcttgggaggtgatcagaacttttcagtactatttgggcaagccaattttagggcttgaagggtgccatgggaaatcatctagactagtgcgatgcctgtacttgccaaataagacaacttaagttctgaagaatatacagaggtcatatagctcagtttgtggggaaagccaggggataggaaccagggtacttgactttcagttcatgggctcttcccagtagggg

SEQ ID NO: 269164 - DNA, 375 bp, Homo Sapiens
  misc_feature (243)..(243): n is a, c, g, or t
cccactgacccaggcctgcagggaataggcaggcaagtgacccagggccctttgctaacccagggactgagggtgacaagatgcccctgactggggaccctaatgactacgccccactgaacaggcacacactgctcagatccccgctgaccaggtcaccccgtagaccagtgctacaaaagccaccaatgatcaagtcctctctgaccaggcccccactgattaagttccacggaccagccntgcctgaccagggccccactgacaagcgtctctgctgactcggtcccaaggtctccactgaccaagtcccacagcccagattggcactgaccagacaccaaacatttgtctaccactatcaacccactcttt

SEQ ID NO: 269165 - DNA, 437 bp, Homo Sapiens
cctgtggcgtgcgtggagcccgaggcctcagctcccacatcgggctcttcattgaatctcctctttgcatactcatccccagcagctgcatccaaaattcctgcattttaacttaaatgacgcgggactctatacgttatacgcgttaaaaaatgtagtaaattgaaagcagtgagaaaggtaattgctttgagtgctgtttaaaaattgaagtaaaatctcattcatttaagcagttaatgtcagcttattgtgggggttacataaattagcatctttttagtttaaaagagaaatttgcttcaggggtttttcattgttcttagttcaaggacagttatctccagtgcaaagtcatgatcacatatgattgatgttattagcttgctgcttgagttactgttcagaaaaactacactttgtatattatgagaatt

SEQ ID NO: 269166 - DNA, 418 bp, Homo Sapiens
  misc_feature (14)..(14): n is a, c, g, or t
  misc_feature (55)..(55): n is a, c, g, or t
cagaggagcccatntgaggggcagagggcggacagtatatggtgcagtccgaaanggtacctcccaacagccatccccgcctatcccaggggtggatatgcagcctacagatatgcacagcctgctactgcaaacccgagccaaccgctgctgcagccgctgcagccgcttacagtgacggttatggcagggtgtacacagccgacccctaccatgcccttgcccctgccgctagctatggagttggcgctgtggcgagtttataccgaggtggctacagccgatttgccccctactgaagtgacgtgagacccctgcaaatgggacagccccccagttcatgaggcctggctattgcaatatttactagtagaggaactctatagcaagatgaagaggaaaaacaaacaaacaaaca

SEQ ID NO: 269167 - DNA, 443 bp, Homo Sapiens
  misc_feature (28)..(28): n is a, c, g, or t
  misc_feature (37)..(37): n is a, c, g, or t
  misc_feature (49)..(49): n is a, c, g, or t
  misc_feature (97)..(97): n is a, c, g, or t
ccccctaaccgttccactggagatgttnccgaagccnggccagccacangggtccttaaacagccgaagaccgtcggtttcctgccttaatttcctnccccagccctttttgaatttccaacagactgagcagatctgtccccttaattttagggtttttggtctttgccttgcggttgcaagaaaagcctgagttttgactaacttggaggcatttcctaaattcttaacatacaacgattgcattaggtttattctgaaactataaattgaagttgttctttttaaatgtaaagctcatgtgtagtaaaacagtgcttgagaaaaacatcagaacacaacactgaagggttgcttcttttctcaagtgcaaatggtaattaaaatttaaatggtaaagattgtccttttcataccatctattgcagtcatttacaatttta

SEQ ID NO: 269168 - DNA, 284 bp, Homo Sapiens
  misc_feature (69)..(84): n is a, c, g, or t
ggggattgggccctctttctcccagtggaggaaggtgtgcagtgtacttcccctttaaattaaaaaacnnnnnnnnnnnnnnnnttggaggtcagtaatttccaatgggcgggaggcattaagcaccgaccctgggtccctaggccccgcctggcactcagccttgccagagattggctccagaatttttgccaggcttacagaacacccactgcctagaggccatcttaaaggaagcaggggctggatgcctttcatcccaactattctctgtggtatcaaaa

SEQ ID NO: 269169 - DNA, 595 bp, Homo Sapiens
  misc_feature (32)..(32): n is a, c, g, or t
  misc_feature (40)..(40): n is a, c, g, or t
  misc_feature (53)..(53): n is a, c, g, or t
  misc_feature (239)..(253): n is a, c, g, or t
cataggatcaaggggctggcttcctactgggnatcctgcnggacacggccccngaggcccatccctgaggaaggcatctttagcccaaggtccgggaatgagcttggagttctctacatcaaacattctcacacttttgggtcccttttaccacttttaaagattactcatttcccccaaatgtgggttgtatcaacggaatatctacccaaaatacaaataaaaactgagaaactgtnnnnnnnnnnnnnnnagtatttaacaattgatttcaaaataacaataagcacattataacacaaataatatatttgtatgaaattttcatacaagcttctacattcaatctgttgtgatatcacacatcatgtaacctctggaaaattccactctacacttgtgagagacagaatgaaaaaagcaaatgttttactagtatcacaaaaatagttttgactcggcagactccttaaaagggtctcagaaaacctcccaggggtctccccatgtcatacttttgagaatggctgcattatgtacattaacaccatgttttaaaaaccctgcttaacttggtctaaagcctccacgctga

SEQ ID NO: 269170 - DNA, 960 bp, Homo Sapiens
atcagcttaggtagaacagttctcggtgagggccagctacatacctggctaagcgctgcccactgcagaaaagctcatcacccgggacctgatctccaggactcagaagcacttggaggaaggcctattcacttagaagcagttaccagtgctgggcagtgtcctccaagtgccagaggagtgctgtggagaaaagaagtccatggaagccaggagatgggcaagattttgcctcttcaaggtgaatgcggcttcaaggggctatctttgtgctcctgccccacctggggcccatcctggtctggctgttcactcgtgatcacatgtctggttggtgtgagggcccgaggatgctgtcctgggtgcccattcttacaaagtcttatttgcttgttacagacagccatctactctgtcgtgggctatgcctcctacctggtgtggaaggacctgggagagggcttggggtggcccctggccctgcctcttagcctctatactgttcagctcaccatcagctggactgtcctggttctctttttcacagtccacaaccctggtctggccctgctgcacctgctgctgctgtatgggctggtggtgagcacagcactgatctggcatcccatcaacaaactggctgccctgttactgctgccctacctagcctggctcaccgtgacttcagccctcacctaccacctgtggagggacagcctttgtccagtgcaccagcctcagcccacggagaagagtgactgaggccctagggcatgggagaggagggacgcccagggtggggaggaagagtctgcaagcagggctgtggagttagggttcaccccaatgggaccaccctcctgggtcccctggtgccgtttttccttagaaatcagagaaatgggaaagggggggaaactgattttacacttaaataataaaatcctattagtaactctg

SEQ ID NO: 269171 - DNA, 405 bp, Homo Sapiens
  misc_feature (75)..(75): n is a, c, g, or t
accccggactattggtccaaaaggggaagaaaacccattgtggttgaactgtgaaaaagggaagagtgttcctgnatctgctgaggtgttcacctgagggctagcctcatctggattcaattctttcacttgctgcacagggggatgagaagggacaactggagaagacgtacaaggaggggaaggaagctgaacaggggtggctcgtgagctaaggaccaaaggtcgacctgtctggatgtttggagcaggactactggagagggcattaggcggtacaggagcagaagaaaattttatgttctgaggtatgtgtaaagggccaacaactgcaacagagggaggcatcaggccagagttggttgtcagtggggctgcaggaattgtgcttggctgtgatccttt

SEQ ID NO: 269172 - DNA, 438 bp, Homo Sapiens
  misc_feature (401)..(401): n is a, c, g, or t
  misc_feature (418)..(418): n is a, c, g, or t
attcggcacagtcatattgaaatcattgatctacttctagtttttgatacaaaatgtgagccaggaaacccagtttttaaatttcaaatagctgtccaggtgtccctgcacctcttatgcatgagccctcgctttgtgccaatgtggagtgcccgcctgctcacacgtgcccatgtggagtgcccgcctgctcatgtgcccatgtggagtgcccgcctgctcacacatgtcgatgcggagtgcccgcctgcttcacacatgtccatgtggagtgcccacctgctcatgtgcccatgtggagtgcccacctgctcacatgtgccgatgtggagtgccgcctgcttcacacacgtgcccatgtgggagttgcccgcctgcttcacgtgcccatgtgggagtgnttggactggttcaacangtgtccgattttgggagttg

SEQ ID NO: 269173 - DNA, 438 bp, Homo Sapiens
  misc_feature (126)..(126): n is a, c, g, or t
ccttgaagtgtccctggtggggtacccccctaaaaagtttccagattttggggagccatttccgggattccaggattatccagatttggggaggctcccacccactctggagccctgtggacatgnaaaaggatactatttttaaaaatcctacagaaataaatttggacaactttgatgaaaataaactaagttttccagaaagtacaacatactgcaagtcactcagtatggcatagataatttgaatagtgctacaacttaatagaactttataattttaaaatgaaaataggcccgaatgatttcattggagaattctagcaaaggcttaaagaagaatttacactatttctgtgtagtctctgccagaaaataagggaatacttcctaattcatttatgaaatcagtattattttgctaccaaaagcaaagac

SEQ ID NO: 269174 - DNA, 601 bp, Homo Sapiens
  misc_feature (21)..(21): n is a, c, g, or t
  misc_feature (43)..(43): n is a, c, g, or t
  misc_feature (71)..(71): n is a, c, g, or t
tccctgcctgaacaaaagggnctgtaatggttgttcctgtggntccttggccctcttgcctagctgtacanggccaggaatggcctctgtggattggccaaaaaaccatatcccaccccggtcccacgggaaaacggggcaggatttcgccctctgtcgtgttcccactagcgagcagtcctaggggtcctccttagaagggtgactcttgaatattgcgaggatggcgtcctgcactgagattcgtctggagctttatggcctgaaggcgagaggagacaaattgggttattagatttaggagacatggaccaaaaaggagcaaaagtaggagactaacaagtgggcctgtaaggggaagaacccaagagaaccatttccaagttccttcccaatttaaccaaccctgagtggctcgttcccgtaaactggaggcttgatttaggagttgtctgatgttgtcttgtacgtttcctgattgatttacccaaaagcaacatttttcatctaaggccaaacaaattcctccctgtgctgccgttaacatgtctagtcctcgacgattttgaaggactacggctgctaaagagtcgatttgttc

SEQ ID NO: 269175 - DNA, 414 bp, Homo Sapiens
  misc_feature (197)..(197): n is a, c, g, or t
  misc_feature (202)..(202): n is a, c, g, or t
ccaaaagcaaaatcggtgtccttcctgtgcctgaacctggcaaaaagcccggggaaggggtgctgtgcccccctcaacctgccctgcccaatcaacaatccaagggtctcctttcaaggtgctctgggccccatgttctgtagcgaacatgggggaatggttgtgcccatgcccaggcagtgatcaagcctttgtgnaacgnccatggggctgggcctgccttgtgctgtgcctgctctgaggcagctggggctgtggtggggatccagggcctcattctgtaaacccagtgctggttctctgggagtctgcaccacaggcacgtggcacatattggtccctagttacattaagggcaggggtaggatttgcatctgtttaagattacaaggactggatgagttctgaaaaatt

SEQ ID NO: 269176 - DNA, 438 bp, Homo Sapiens
gcacctaaggggtggccaagaacctgaagggagttggggaggaaggcctacacctaaatattccaaggccatattcctaaaatccatggaggcctagtttcctatgaacctacacagaaaaccttgccctcagtacagtgatgcctatatttggtctcttctctttaatcttaaaaagaactaagaactaactagccattggagttttacacttattttctttatatgattcactgaatgaattcaatatatcttatttaaaaatataaatgctaacttttgcaagaaagagtttacatattattgcttaatttaaaatacacttttaagtaaagtgtcttacctcaagtttacaagagggaatactgaataaaaatggataaactacaattaaaagtcacagtcttgataccttcatattagatgcctcagtttcca

SEQ ID NO: 269177 - DNA, 439 bp, Homo Sapiens
cacttcctccctgaccacaccctcactgattagagccccatcaccaggcctcactaactagattcccgctgccaggcccacaatgaccaggactccactgacgaggaccttactgacaaggcctcactggcaaggcctcactgacgaggtccttactgacaaggcctcactgatcaggttccgccgatcatgacctcatcgtctggtcccacagacgaaggccccactgaccagggcctgcagggaataggcagccagtgaccagggcccctgcttaaccagggacttgaggtgacaagatggcccctggactggggacccttaatggactacgccccactgaaacagggcacacactgcttcagattccccgctggaccagggtcaccccgtaggaccagttgtttaccaaaaggccaccattggttccagttctttt

SEQ ID NO: 269178 - DNA, 688 bp, Homo Sapiens
  misc_feature (620)..(620): n is a, c, g, or t
  misc_feature (644)..(644): n is a, c, g, or t
  misc_feature (654)..(654): n is a, c, g, or t
agtggaccactctccactccacgaggatgtgaaacggttctttaaaatgggattttagagcctcgggaatgcatgtgcgtcgcatctttcatattatgggtcaggatagattcatttcttgcaacatagtggaaaagatataagctgcagtaatttgctctttgaatgaccgtcacccccagtataggatatgcttgtatccccccgtcactcctccgcctgttttttaaacttttccaccacctggcgtccaaaaagaatgttatagcgagtgctcttaaatgttgaaccggggtgttgcttccgggccagtctgcgtggctccatgaaaagctcactgctgccccagccgggctttctttaggagggaggtcagttgtcccatgtattcatcatttactctggggaatcccactgtgaaatcatgtctgtatttttctggagcagttcacatagagtagaatgtggaatttcccgtgaacgtctccttcctcccccgtatctgccgcctgtcacttcgccaccgtgctagaatactgttgtgttgtaagatgactaaattttaaaagaacctgccctggaaaagttcttaggaaacgcaatggaaaggggagggaacntgttcctttaacccagtttttccnttgttagggnggggaaagtattaaaaagggcacaggaagggttg

SEQ ID NO: 269179 - DNA, 429 bp, Homo Sapiens
gcggcttgtctaaccagcgcagcgcaaaggtctcgatgccttttggtaacatccgtcattgcagaagaaagtttacacgacgtcaaaaagtgacgttcatgctaagtgtttttccagaaatattggtttcatgtttcttattggctctgcctcctgtgcttatatcatccaaaaactttttaaaaaggtccagaattctattttaacctgatgttgagcacctttaaaatgttcgtatgtgtgttgcactaattctaaactttggaggcattttgctgtgtgaggccgatcgccactgtaaaggtcctagagttgcctgtttgtctctggagatggaattaaaccaaataaagagcttccactggaggcttgtattgaccttgtaactatatgttaatctcgtgttaaaataaaatataacttgtgaaa

SEQ ID NO: 269180 - DNA, 339 bp, Homo Sapiens
  misc_feature (43)..(43): n is a, c, g, or t
  misc_feature (49)..(49): n is a, c, g, or t
  misc_feature (56)..(57): n is a, c, g, or t
  misc_feature (65)..(65): n is a, c, g, or t
  misc_feature (68)..(69): n is a, c, g, or t
  misc_feature (72)..(73): n is a, c, g, or t
gggttatccagcataaacgggaatgtagtgtcagaggataccngtggcnttgtttnngtttatgnttnnttnnccttattcaagaaaaaagaccaaggaataacattctgtagttcctaaaaatactgacttttttcactactatacataaagggaaagttttattcttttatggaacacttcagctgtactcatgtattaaaataggaatgtgaatgctatatactctttttatatcaaaagtctcaagcacttatttttattctatgcattgtttgtcttttacataaataaaatgtttattagattgaataaagcaaaatactcaggtgagcaaaa

SEQ ID NO: 269181 - DNA, 454 bp, Homo Sapiens
  misc_feature (346)..(387): n is a, c, g, or t
aaaatatttaccttcctagactcccttgcagctagatgaaggccaggtgacattgtcttgtcaatgaaatataggcacaaggccctatgcaggctgtccctttctgaataaagcctgggtaaaagaaaacctgagtctcttccccctttcttctttcccgaatgcacagcagccatgctgtgatcacttggacaaaagccacacaccacagatggcagagcaggaagatattcagcctgattcctgaacatcctttgtgcagctacttcagcctgggttgcctgccttcacccatcttgttacagaagaaaaagacacctctcacttgtttaagccactgaagtannnnnnnnnnnnnnnnnnnnnnnnnnnnnnnnnnnnnnnnnnactaaaaattaatacaatcttactcaatagatctttattaataaaaatcctgaaatgtaagtataaa

SEQ ID NO: 269182 - DNA, 116 bp, Homo Sapiens
agcatgagccaccacgcctgggcccaagagactcatttttatcaagagactggggtgtttgtttccctactttttaaggatgctgctaataaaagttttctattatttcactggaa

SEQ ID NO: 269183 - DNA, 216 bp, Homo Sapiens
  misc_feature (42)..(42): n is a, c, g, or t
  misc_feature (146)..(146): n is a, c, g, or t
  misc_feature (186)..(186): n is a, c, g, or t
  misc_feature (193)..(193): n is a, c, g, or t
  misc_feature (206)..(206): n is a, c, g, or t
tgcctcagcctctcaaagtgctagggattacagggcatgagncaccacacccggccggtttctatttttattttaaaaaatcatggggtttaggggtctttgataaactatggccataggacttataaatttacaaaaataagggnctaaatatccacgaatggcaaattttaaggaaaataattnaccacancctttagggagantaggaaaggg

SEQ ID NO: 269184 - DNA, 525 bp, Homo Sapiens
atattaatgttcatcgattattatgactctgaattactgtgaggttaaattatagtaatccccccttatctgcagtttcactttccagttttagttactcttggtctgaaaatattaaattgaaaacttcagtaataaataattcataagatttaagttgtgtgccattctgggtagcgtgatgagatcctacaccttccctctctgtcctgcccaggacgtgaatcatcccttggtcctgtaggatcctcacagtatatgctgcccacccatgtaatggcctaagtcatcagattaactgttgttattgactgtcaaaactattgcagtgtttgtgttattttacttaataatgacctcaaagtgcaggagtagtgatgccggcacgttggttataaatgttccattattagttattggttgttaatctcctattggtgcctaatttatacattattgatcataggtgtgtatggtaaggcacacctcattttcgttgcacttttattgcacttttcagataac

SEQ ID NO: 269185 - DNA, 297 bp, Homo Sapiens
aaaaacttaaggtttgcctcaaactgttcctgagggtaccaacctttccctcacccctgtataaatcccacccatctgtgctcacaagcacacatgttccctctctcaacaaatgcatggagaccctacccaggcacagaagccaaaaaagcacaaggcacacaaaagctcccccaggctgccccaggtctaaaggagcaaaaggggtagaaaagatcttttgctcattgcccaggtgagacggcctggtgcgtcctctcagcctcgacacgcgtcaagtaaaagaaaggttaaaat

SEQ ID NO: 269186 - DNA, 491 bp, Homo Sapiens
  misc_feature (146)..(166): n is a, c, g, or t
agtgatgttgtaaccccaaacaattgtgagggggaaaaaatattgaataatttctgtcatgaggcactgacctacagcccaggctcctaattgaattaaactccccatttatttgctcaggcctaaacaacaggctgggaggaagnnnnnnnnnnnnnnnnnnnnncttaaggtttgctcaactgttctgaggtaccacctttcctcacccctgtataaatccaccatctgtgctcacaagcacacatgttccctctctcaacaaatgcatggagaccctaccaggcacagaagccaaaaaagcacaaggcacacaaaagctccccaggctgccccaggtctaaaggagcaaaaggggtagaaaagatcttttgctcattgcccaggtgagacggcctggtgcgtcctctcagcctcgacacgcgtcaagtaaaagaaaggttaaaattagaaaattcaatttatttgataatttcccagaataattagag

SEQ ID NO: 269187 - DNA, 411 bp, Homo Sapiens
  misc_feature (377)..(377): n is a, c, g, or t
  misc_feature (389)..(389): n is a, c, g, or t
gagtggagagagagaagaggaaataagcaggatgctgatggctcattctggggcatgcgaatgagtgcctgtgggactttcagtggagagggactagaggactgagggctgggctgcatatagaaatttacaagtcacaaaacacagggcctttgagagaagataagtgacttgaggagaatgaacagggagacaaaggaaatgatttaaggatgagtctctgagaatgatcaaaatttaggggagagggagcctggggaaaaagccccaagaggagcttccacagaaggaggaggaaaacaagttaagtatggggagtcttcacagatttcttagtttggggagagtttagggaggaggaggaaacttttcaaccncttgcaatgctnttaaagaggtttagtttttttt

SEQ ID NO: 269188 - DNA, 407 bp, Homo Sapiens
  misc_feature (161)..(162): n is a, c, g, or t
  misc_feature (168)..(168): n is a, c, g, or t
  misc_feature (232)..(232): n is a, c, g, or t
  misc_feature (281)..(281): n is a, c, g, or t
  misc_feature (352)..(352): n is a, c, g, or t
  misc_feature (377)..(377): n is a, c, g, or t
  misc_feature (393)..(393): n is a, c, g, or t
agaagaatgaagatttgcaaagagaagcagaagtaagagaaaatttatggcccctaaaatatggcctgggcaggagcagaactactacaaatgcattttcacctgggtgaaaagacttgcagctagagccaggctcaacgccacgtggaagcggccaaggnntggggnctgcaccctctgaagcaatgcctcaagctgtaccttggcccattttcaccatggctggagctcngagcagcagggacacaggtcaccaagtcgccaggctgcacacagcagtngagccctgggcctgacccacaatctattttttcctcctaggcttcaggaccgttgaagggaggggctgccnttaaagatctcttgacattgccttnggagacttttctttcnttgtcttggtgatt

SEQ ID NO: 269189 - DNA, 685 bp, Homo Sapiens
  misc_feature (44)..(44): n is a, c, g, or t
  misc_feature (63)..(63): n is a, c, g, or t
tccaaacttaaagccactacccacaacagtaaaaaataaactgncaagtactaaacagtgagncttcatcaattaaatggttatgtaaaataaagttgtcttctctgcttttatttcctaccaatacccattctatcatttcatgttctaagcatagctgtctactaaatgctcctgagatattctgagatagctcaccagcccaagcctttgaggtgtcttgattgctattttctggtacacttatcttacagatttccaattatgtgtttataagcccgttctgccctcactgccattaattcccttgaaattttctatcttcagtacctatccaccaggctggcacagagtaagctcttaaacaatggctctcaactgaggacaattttgctccccagggaatatttagcaatgtctgaacacactgttgtcacaaacaaggggaagttactgacatctagtgggtagaggacaaggtgctggctattctacaatgtacaggacagtcccccacaataaagataattatccaaagtgtcaacagtgctgaagttgagacactgctctaaaaggcttgctgaattactgaaataaatgggtgtcgattatataaacaccacgacttaaagacacacaaaacagaaaagttaccaaaacttctttttatttgtttttgtttgtt

SEQ ID NO: 269190 - DNA, 298 bp, Homo Sapiens
atgagcttcaataccctgactaggaccctgttttcaaaacagcatcattgcacctcacaattgacaaaaccagacaacggtgaaagggacagtgacatggcagacacaaaagctcaacacattatggccactctaaacagagtacaaaaggaagggagtcagtgatgtgtaaaccaaacaatgtgaggggaaaaatattgaataatttctgtcatgaggcactgactacagccaggctctaattgaattaaactcccatttatttgctcaggcctaaacaacaggctggggaggaagg

SEQ ID NO: 269191 - DNA, 409 bp, Homo Sapiens
  misc_feature (389)..(389): n is a, c, g, or t
tttatgtaaagaactgtacagtagaaatgaagaaattgtcagttaatagcctcttgtagattctattttaagaaattaactgatcatatgtaataagtaagggaacccaggtggccaccagtcttcacctaactcttagtgtagtaatgtatctaacaggatctcagattggtgtgctccactccccctcttgaatgccagcaatgatccaagtgtgctacaaagcaacagcaccctccaatgtcatgaggctatgacaggatttcttcagttggatagaaacaagcctctgaaacttcccttcagtgctttccaaagtcttgactttttttcctctttttcgaggtccttattcctaatccttaaaacatttaatactctctaggttnctcttccttaacataggacc

SEQ ID NO: 269192 - DNA, 630 bp, Homo Sapiens
  misc_feature (467)..(467): n is a, c, g, or t
  misc_feature (501)..(501): n is a, c, g, or t
  misc_feature (535)..(535): n is a, c, g, or t
  misc_feature (574)..(574): n is a, c, g, or t
  misc_feature (596)..(596): n is a, c, g, or t
ttagctcatcagatattattagtgttagtgtattttatgtgtggcccaagacaattcttattccactgtagaccagggaagccaaaagattggatacccctgcatctgcatactcttccacaaattcttcagtggcctagtagtcaggcctgtaagcactggcaatctcagacagcttacaggtacccacttgtttgagggtttcccagggatgaaaatctggtgtttggatctctgcatatttgtaaaataccttcaacagtgtgcatatcacactagggcagggagggaagaggagacctaattttgggcttcttcactaatgaagcctcctttgacaagctggggcagagctgggtctgtgtgatctgggagagcccccagaaggtgtcttgaaggtcactgtggggaaagccatgtggctggtaacctagaccctaaggcacctgattacatgggaaatcccnaagtctaagccctttttgagaggacagtggcccnaatggtattttgccttccctcagcaccagacccnatagcacacagatcctcctgaaggggcaccgggctattnactcactcaattttcccatccnggatggtgtcaaaagagcttgttcccggttcaag

SEQ ID NO: 269193 - DNA, 575 bp, Homo Sapiens
gattaatagagaaattaacagcttgaagaaataacaaaaagttcagtgagttagcatgaaactatacctgaaagttattgcaaggttaagtgagaggaaccttaaaattaaagggagcagcatttgtaaagaaaagctagaatcatgaaaagacctaagataagatcaaatgaaattacgtagaagtgtaaaattcttaactgttagtatctgaaaatcatgcattccttgctaggaaggcatggcattagtgctgtcggaatcctgataaaacatcacaaacttctgttcgttggtattagggacagtatagagtgagtgcttgaagaactgccttggcttaccaatctctctctccacaacttccaatcatctcttagggaaccttagcagaaacacttcccaccagagcaaaagtttataattaccagaaagtgatgaaagggagggacgcaggcttctccaatgacgtcaggtattcccgggacccgcccaccgtgggcgttttcacctacaggcaggcgtctccgggggcggggcttgctcagggttaacgtcactactgagcgcgggcg

SEQ ID NO: 269194 - DNA, 165 bp, Homo Sapiens
aatgacctcaagttgagggaaaaattggggcccacatattaagcttcacagcccggatatgttttattactgttagataatcttcaaagagaaaccgtgaaaatccttatttccttcaagatcttttaagaacaaaaaaggccttatctcagcccgagtgcagtg

SEQ ID NO: 269195 - DNA, 260 bp, Homo Sapiens
  misc_feature (47)..(47): n is a, c, g, or t
  misc_feature (53)..(53): n is a, c, g, or t
gctttcctttggttgttggttttaatctccccctacccctccccttntcttantaatcagaatataaacctgcaaagctctgctctgttttggttttgaaaagtttaagcttttctgcttctgtgagagcacaggcttctgtcccttttgattccaactgaacttttgtgttctctaatgatactaacacggtgtaggttttacagtctcctaatttgtactggtaatgcatattccaaataaatagtttcttttgttgc

SEQ ID NO: 269196 - DNA, 512 bp, Homo Sapiens
  misc_feature (25)..(25): n is a, c, g, or t
  misc_feature (126)..(126): n is a, c, g, or t
  misc_feature (133)..(133): n is a, c, g, or t
cggtgaatgaatggaaggaagccanccaagagcccaagccagtacgcccacaccggtttataaagtaagagacccgtgggacaagcctatttgtagcccaccctgataggattataaagcagaccngattccnctgtggtttatgaaaggctccttaaggtaattaccaaaagggaaattcccaagaatgccataacacaatgacaaccatggtgagaaaagtgccagtacctaccttcccaaggtagcctagtgtaaaggacacttgagtttttaaaactgtggttaaatgttttatgtggaatttgatgagtttgtatattaaataccactgcttgctgcttttactagaatcaagttaagggacacgttagaaatagaacagcttaatatcactggcttcagagcaaaatgagctcgggtgactgcagattatgatggtaaatatggctttaattacaaacatgaggaatgattcactgaagatgaaaagataggacggatgtgatatg

SEQ ID NO: 269197 - DNA, 226 bp, Homo Sapiens
aacacaaagaaatgataaatatttgaagtgacagatatgctaattaccctgatttgatgattacacattgtatatatgtattgaaatatcacgctgtttaccataaaaatgtacaattattatgtgtccatgaaaaattataataaaagcaaaaatacaaagtgtacgacttgctaaaggctcagatgattgttagcatttttggcaataaagtattttgtaattt

SEQ ID NO: 269198 - DNA, 412 bp, Homo Sapiens
ttggtgtcctggtttctggttaccggtgattttgttggccttgttatgtacattaggaatgactcgtggagtggatgacaaactctgaacaatgaacaccacagggtttcctgcattcttaatggcctcaactgcttcgctgtgtgaggcattctgcaaatcaactccagacacctcaagtattttatctccagttttaagtgcgttcgtcttccctgctgggactgtcttctaaaacttgtttgatgaatatacctttaaggctcctctccattctttaggacgttttataacagtttgtccaccaacaatactgatcacaaggggacacattgggggtcccctaaaaacctcaacaattctcggggggaccccgtgggctaaaatttgggggtttcttctccctcggctt

SEQ ID NO: 269199 - DNA, 118 bp, Homo Sapiens
gtaatgactgaaagctgttctgtggatgacctaccctttcctttaaacacgattctctcacttccaactccaaacttgctcaactaatccttaaaaataaacttgagctggaatttga

SEQ ID NO: 269200 - DNA, 830 bp, Homo Sapiens
  misc_feature (13)..(13): n is a, c, g, or t
cttcctgtttttntgccacaagccctttggtcttacccactacctcagagcacactgctaagaaaatgaaagccaccaatgagcccagcctgacacatatggactgctcgacagaaagcgctggggagcatcctgggccccgaatgtgcctcctgcaaaagagtattttctccctacttcaaaaaggagccggtgtaccagctgccctgcggccacctcctgtgccgaccctgcctgggtgagaagcaacgctccctgcccatgacgtgcacagcctgccagcggccggttgctagccaagatgtgctgcgggtccacttctgagtgactgacctccactggaggaagacccattgctgggaaggagctgagggggaacaaggagcaagggccacaagcacccctgaggtcttggccaggccccaggcacagagctgcctgcttcctcccggggctcttcttcatcacctcacggtatagcacattgcttctgcgctggtggcaatagggcaacaaaagccataggccagagggcggggggatgtccctgcctccctgccacccccactgcctgagcccaggacccactggagccagccccaccctaggcaggaagacccctgctgagggcccccccgtgcagtccgcatacccccctgtccagcagggcactgtgggtggctcaccctagattgtggcccagatctcaggagtctctgccttcagggtcatccaaaagtggaccttgggagcagtgggggtgtctgtggagtgcatgactcagccccccgactcgcagccttaataaagcgatggttgacgtctaaaat

SEQ ID NO: 269201 - DNA, 545 bp, Homo Sapiens
  misc_feature (14)..(14): n is a, c, g, or t
  misc_feature (65)..(65): n is a, c, g, or t
  misc_feature (71)..(71): n is a, c, g, or t
  misc_feature (83)..(83): n is a, c, g, or t
  misc_feature (101)..(101): n is a, c, g, or t
  misc_feature (122)..(122): n is a, c, g, or t
  misc_feature (150)..(150): n is a, c, g, or t
  misc_feature (161)..(161): n is a, c, g, or t
  misc_feature (182)..(182): n is a, c, g, or t
gccccttcccggantacaagtgcagctggccatcttgggacccaggcctgcttggctggacatcnaagcangaaggttgcctnccaagagttccaagaagnacaatgggaaccagggtcccnacagttggatgggaacaaaaagtggaantccaaaaagcnagctttttaagtcctaagaantccccttcccccactccccactccaggactcccatcggataagcccataagcccatccccctgcaagggcaactggcaagacaatgaaggggtcttaacgtagcttatgaccaaatctttgtctaaaggcagctcctataaacagccagataatgggcatgagtcatccatgagattcattccagaatctgtctctgtgtgggaatatgcttggtgtgaggaaagaaacacaatttgtgaatgtgtaattttccacaacaaaaattttctggggaaagtgggtggggaggaagggggcatggcctggagccaggcagggagcatttaggcttgaaggctctaagaatagaaagacgctgttct

SEQ ID NO: 269202 - DNA, 766 bp, Homo Sapiens
  misc_feature (686)..(686): n is a, c, g, or t
  misc_feature (703)..(703): n is a, c, g, or t
  misc_feature (717)..(717): n is a, c, g, or t
  misc_feature (738)..(738): n is a, c, g, or t
agaaatgctagttcaaatggtaatgtcacagtgttttgtatgcagagagcaagagttcaaccaacagctgtttattcatgtgtgtgtgtctttgctgctttgagttctctgtatctactgtgtatgtgaatggtcatgtgggactcagtggtggtgttgtgactttgacctagggtccgagtgtcacagctgatcttggcactcggcactcattggcacagtggtagttagaggtgaaaagtagagctgtcaagcccaagggcttagctttagggctcctcctgagttcggcccacagtagaagcaagattttaactagccccttttcctcttcaccctcccatgatgcgcagtgtttcagaaagctggtaagttcctagggatttccagaagtagcctgcagaagaaggttaagttttgaaagccactccaggggtcctgatgctgtcatgctcagtgagccattttacagttctccaaagtctagccctgtttcggacctgcacttcacctctaagttatgtacaactcaacctgcatccctctaaaagtcctatatccatattcaccatttggctaatttgaggccctgagtgggctttggaatgctaaaaagaaagcagggtacggagggctacatgtagataccacaccaagggctggaagctgctctgtcgtaagccggnaaagaaagacgcttggnccaattttttgacntgggcaaggggacaactttgnggggtttggtaacctttatctgtggggt

SEQ ID NO: 269203 - DNA, 435 bp, Homo Sapiens
  misc_feature (13)..(13): n is a, c, g, or t
  misc_feature (171)..(171): n is a, c, g, or t
  misc_feature (288)..(288): n is a, c, g, or t
  misc_feature (292)..(292): n is a, c, g, or t
cctttgggaaaancccccccactgccccagtattggatcctcccctttttgccccttgtacctgaaatgaccaccattaccctccccacacctcctccccggacctaggtggtccaaccagggcccacagggttgcctttcctgtcctttggtggggccaggggagttgancagggatgagggtcccaaggaataagcatgaatgacaagaaaacaagggaaagagttaacctgtcacatagcaggttaactttttcagggtttgcagttagaggtattcgaccattncganggctgagccagatcacgggaacttgagagcttttactgtgattcttcaatgtaaaaaataaacaacaatgtcaaactgtgtttatatgatttgtataaagcctttttaagattactatttaaataaacattataccaaagaaa

SEQ ID NO: 269204 - DNA, 541 bp, Homo Sapiens
aaggctggaggctgctctgtcgtaggacagaaagaaagacgctgggcccaattttgacttggccaggggacaccttggtgtgtttgttatctttatctgtgggtaggctagctgacccatctccttgagtcaattccctttgggaaaccccactgccagtattgatctcctttttgccttgtactgaatgacacattacctccacactctcccggactaggtggtcaacagggccacagggttgctttctgtctttggtggggcaggggagttgacagggatgagggtccaaggaataagcatgaatgacaagaaaacaagggaaagagttaacctgtcacatagcaggttaactttttcagggtttgcagttagaggtattcgaccattcactggctgagccagatcacgggaacttgagagcttttactgtgattcttcaatgtaaaaaataaacaacaatgtcaaactgtgtttatatgatttgtataaagcctttttaagattactatttaaataaacattataccagagaaaaaaa

SEQ ID NO: 269205 - DNA, 499 bp, Homo Sapiens
  misc_feature (231)..(231): n is a, c, g, or t
gacagctgaaaatgtaagggtcaggaagtcatgtctaaaaggggatttagtataacaataataacagcagtgactaagactaatcctggctcaggcattttgtttggggtcacctggtcttaattagcagcactctgggatttgagtggcgctgtgctgttgcccacaaagcccatcagtggcaccattgcctgtgtctttcggggcagtctgttagggaggaggtggcanaacaggtgttcagcacggccatccccattttatatgtgagggaacctcagccaggcaggatccttgcctggaatgctctgtggggaaccctgtgagtttgtaaaccctccgtgcagcctgccagggtcagcggccccaaaatggagagatacagagggcaccaaatttgtaaagggcagagcgtttggctaagtgacacaagctgccttttcgattcgcctgggcctttgttgaagcccgcaaacattcgcctggacccttggtcaag

SEQ ID NO: 269206 - DNA, 455 bp, Homo Sapiens
  misc_feature (420)..(420): n is a, c, g, or t
tcaaacccgacttgtataaggaatcctggaagaataaccctgccatcaaacatgttttctcatggactctgcaacaggtcactcggccctggctgagccagcatctggaaagggtacttcccgcatcattggtcatttcagatgactatcagactgagaacaaaatcctgggtgtacactgtctccatcacattgtgcttaatgtgccagctgctgatttgctccagtataacagagcccaggtcctataccatgccatttccaaccacctgtacacaccagagcaccacctcattcaggctgtgctcctgtgtctggctggatttattccccatcctgggagaaaaccctgcactgggaaaggagatggagctcgacccaccacccatttgtggatggaggtcctgcggctgatcctgnacccacatgggagccagagcaccgcttcttttacg

SEQ ID NO: 269207 - DNA, 510 bp, Homo Sapiens
  misc_feature (14)..(14): n is a, c, g, or t
ctgaataaaaagcnactgcaaacacaaaactaaaactcaaactccccttgtctgatgccccaaagcaaattccctggggcaccctaccctctcttatttgggagtttccgttggtttacctgagttttctctggggtctgcacagaggcagcagcatggacatcatggcctctcaggtcccttttggttctcagtttcattggttcctctttctgttcccccattgacttctgtgccccaccctagccttttccataaccttaggtattcagtttggaggggttttttgtatttttgaggattcctgtattctgtatcctctcctcgcatctcctcacatggaaagaaataatgtatttgtgccttctgtgaggaatggggggaacaagtggtcccaggtatccccatttccaaggcccccctccctctccaggtccccccacagcaataaaagcttccccctgatatccatccctttgtagtttgaacaaatatatttatatgatatgt

SEQ ID NO: 269208 - DNA, 604 bp, Homo Sapiens
  misc_feature (139)..(139): n is a, c, g, or t
  misc_feature (529)..(529): n is a, c, g, or t
taaaaatttgctggttacaggcgagtcatactcttgcaagtagttagcaaagggaggcccaaattctcaaggttgttgatggggaacttgccactaagagaaggcagagaggtccctagtgggtatatttgctgccaancacttgccaaagaagaggaaccacagaaagagagacatcatgaccaggagaaaaatgtgactagacatgctaacctccaggtttttatatatgacttgagtctgctgtaattggcagcagaaatccaaatttgtatggtagaccaaaaagaaccaaatccatagggtgaaattttgagacctagactctgtaaaaataatcctagtcttcctccaggggtcagttcctcacagtggttctgtaccaaaacttgccaaattcctccatggccaagttgttaaaatcctgtgtttggaaaatagcgaattaacctaagacacagaaggcagactgggtgaggagacctagcatgccctattggcagtgctcaggagctgcatcccacttttnccctgctctgaatcgaagtcctagttccttcctttgattctcctttggtaggtggaattcagttaatgttttgag

SEQ ID NO: 269209 - DNA, 368 bp, Homo Sapiens
  misc_feature (18)..(18): n is a, c, g, or t
  misc_feature (50)..(107): n is a, c, g, or t
  misc_feature (121)..(188): n is a, c, g, or t
  misc_feature (349)..(349): n is a, c, g, or t
ttttaagacggagctcgnctctgttatccaggctggagtgcagtggtgcnnnnnnnnnnnnnnnnnnnnnnnnnnnnnnnnnnnnnnnnnnnnnnnnnnnnnnnnnnactgcgcccggccnnnnnnnnnnnnnnnnnnnnnnnnnnnnnnnnnnnnnnnnnnnnnnnnnnnnnnnnnnnnnnnnnnnnggtgttacaggatcccctgggcggctgtgcgtggggaacagactggggcagggcaagggagcccaggggaggaggctgctgggagcatccagacaggagccaagggtggacaggaccaggggtttggtcagccaagtgttcgaagaaaggggcggggtctngatgcattttttgaaggtt

SEQ ID NO: 269210 - DNA, 411 bp, Homo Sapiens
  misc_feature (31)..(31): n is a, c, g, or t
  misc_feature (84)..(84): n is a, c, g, or t
  misc_feature (116)..(116): n is a, c, g, or t
  misc_feature (143)..(143): n is a, c, g, or t
  misc_feature (315)..(315): n is a, c, g, or t
  misc_feature (342)..(342): n is a, c, g, or t
  misc_feature (390)..(390): n is a, c, g, or t
cgagaaaaagcccagtgggagaaaaaacccnccccgggggggcagcaaggggagcccacgcaaacccccgaggcgcaccctgcnggccccttgtgtgtggccccccagtttcctancggcttttgcagcattagccctacaanctttgtcactccctgcccctctgtggtggtcactgtttttctctcttgccaaatgaggcagtctctgagtgacggtgactgtggccttgaaccctggaggactgttgggcatgtagactggccccttgaagattccccattgtttaaataaaatcaagcaaatgcttttttnccaagagcccgagcctcgctctaaggncgcagtcctagaggcgtgcctttggggcttgaagagcacactgtgggncgcacgtgcttctgattaaag

SEQ ID NO: 269211 - DNA, 303 bp, Homo Sapiens
  misc_feature (42)..(42): n is a, c, g, or t
  misc_feature (51)..(51): n is a, c, g, or t
  misc_feature (64)..(64): n is a, c, g, or t
  misc_feature (98)..(98): n is a, c, g, or t
  misc_feature (117)..(118): n is a, c, g, or t
  misc_feature (153)..(155): n is a, c, g, or t
  misc_feature (190)..(191): n is a, c, g, or t
gtatcctgtggtaacaaaacattaacccaaaagattttcctntcccagaancctccccgacccncccaagctatttgcctcacattaacaaattaaantgcctgaagcataattcannctttacctgtatactaaaaaccctgttgtattgannnttttataataagcctttttacctctgtgtgggagnnatatatacaagtgtatgatgtacattttaggtcttaactttgttttatggtttctaatatgtatgaccaatgtagccattgctttaaaatgtaccgtgtaaatataaacaca

SEQ ID NO: 269212 - DNA, 493 bp, Homo Sapiens
  misc_feature (340)..(340): n is a, c, g, or t
tgatgcataatcaaagataattatagcaagttgcatcttcaaggagaatgccaacatcaatctcattgaacctctttgaattagtttactatcctataactaaaagaagagatttatagtttactgaagtcaaaaagtgggcttgaattaaggctgcttatattgtataagtgaaatgccagagtattttacttttatgtttctgtggcccaagggaattaaaatagatattatgccctgaatcccagtgtcactgtgactgcctgtgaaccatgtcagaaccaatatcaacaaaggcctcttcagctaagacttcccagtgttagaaagacaagaacangtagggatctctaaaagcccttattcataatatgcctacacaatcaatatcactgccacaaaatcatgcagccaggtcactaaggcatctgcagtcatcactaacactgatctcacctggagaagctgtatggagactacaccactgcaccca

SEQ ID NO: 269213 - DNA, 537 bp, Homo Sapiens
  misc_feature (53)..(53): n is a, c, g, or t
  misc_feature (117)..(117): n is a, c, g, or t
  misc_feature (165)..(165): n is a, c, g, or t
tatccactgccccaaattcatgcacccggtcactaaggcatctgcagtcatcnactaaccactgatctccacctggagaaggctgtatggagactacaccactgcacccacctagtnccagaacaactgcactctgcccaaccgatgccctccagcctgtcgtcnaggtgaaagtttttccccctatgaaagtcattcctctgaagtttggaagaggagactgtacccagaagatgcgcaagcattaatgtgggaatacccagaaacatgaaaatgcaagggaacatgatgcccaccaagggaacatgagaatttcccagtatctgacccccaaatttacagaaatttatgaagttattgaaaaggaatttaaattaatgatcttaagaaaaccaagagagacaaaatagtatacaaatagaaaattcaatgaaatcagcaaagtaattcatgatctcaatgacaaattcaacaaagaaatatatatcataaaaaagaatcagaaatcttgaagccaaagatttcaatcaattaagc

SEQ ID NO: 269214 - DNA, 473 bp, Homo Sapiens
  misc_feature (19)..(19): n is a, c, g, or t
cgggaagcgggaaaaaggnccccccgggtggccccttggtaggcctcccttccgggatgcctgagggccctttgggaagccccagtgtaaacaatggataagggagccttaacaccttttataggttgataccatgtgatttaatcaaatccacctattccctgatcctcatttacctaacagaataaagtggtaaatatttaaattaaaaattcccaaagacccacttttaagtgcttcttcactattttgactggcccacaaacaccagaaattcagaccctgaagttttctgcctcagagaaatttaagtaccttataatgttccccttctacaacttttttcttgcagagatacatgtgagttgacaagaaacattaaagggaaataagaagaagctgataaagctttataggaggaccaaagaactagcttactataataaaaaaattttaagtcttcaagggtatac

SEQ ID NO: 269215 - DNA, 625 bp, Homo Sapiens
  misc_feature (476)..(476): n is a, c, g, or t
  misc_feature (539)..(539): n is a, c, g, or t
  misc_feature (598)..(598): n is a, c, g, or t
ttatgatgtatacccttgaagacttaaaatttttttattatagtaagctagttctttggtcctcctataaagctttatcagcttcttcttatttccctttaatgtttcttgtcaactcacatgtatctctgcaagaaaaaagttgtagaaggggaacattataaggtacttaaatttctctgaggcagaaaacttcagggtctgaatttctggtgtttgtgggccagtcaaaatagtgaagaagcacttaaaagtggtctttggaatttttaatttaaatatttaccactttattctgttagtaaatgagatcaggaatagtgatttgattaaatcacatgtatcacctataaaagtgttaagctcctttatcattgtttacactgggcttcccaaaggccatcagcatcctgaagaagcatacaagagccacccaggagccattttcctgctcctgccctattcagagactctcnatttttgtccagagttcacagtttagcacaaagatgtcctgagttattaagcctattttgacngtatcctgaaatcccagtggaaataggttatcccaattggcccaatggaaaccaatccnctgaaagaaccattcctggtccttgga

SEQ ID NO: 269216 - DNA, 298 bp, Homo Sapiens
  misc_feature (204)..(204): n is a, c, g, or t
  misc_feature (255)..(255): n is a, c, g, or t
  misc_feature (268)..(268): n is a, c, g, or t
  misc_feature (285)..(285): n is a, c, g, or t
tggagtcttgtgatattgcccagcctggttcttgaacttttggcctccgacaaccttcccatcatgggcttcccaaagcattggggactacaggacatgggactaggctccatttcttgatgtgaggccataaggcaggaaccaaggcaggacttcaagggcccttgggttgcttgggacacaattaggctatttaataacatnccgggggaaaaggctcagtctttctgagtcagggaaaaccggggctgggantccggggttacantggtcaccagcagcagnaggccgggggcaa

SEQ ID NO: 269217 - DNA, 469 bp, Homo Sapiens
  misc_feature (334)..(334): n is a, c, g, or t
agaaccatcaatgaattcagatatgggaaaagtcagtaaaaatgatactgaagaggaaagtaataaatccgccacaacagacaatgaaataagtaggactgagtatttatgtgaaaactctctagaaggtaaaaataaagataattcttcaaatgaagtcttcccccaaggagcagaagaaagaatgtgttaccaatgtgagagtgaagatgaaccacaagcagatggaagtggtctgaccactgcccctccaactcccagggactcattacagccctccattaagcagaggctgggcacggctacagctgttcaccagattttaccttcactngctgggccttgctggcaggaagtgggctgcttagatcttcttcttccttttaccaccatggcagggaacagactttttggtgatggaggagggaggaacaattattaggaggaaattaaaattgaggtaggaggg

SEQ ID NO: 269218 - DNA, 407 bp, Homo Sapiens
  misc_feature (27)..(27): n is a, c, g, or t
  misc_feature (143)..(143): n is a, c, g, or t
  misc_feature (163)..(163): n is a, c, g, or t
  misc_feature (184)..(184): n is a, c, g, or t
gtaaaaccctaagatgtggattttacnggaagaacccccggtttgaaaaactgatccgaaattagtagttacccgtaaatggcagatcctttaggaaaataagagaaaggtaagggctcttttgaataaactgcctgttttanttgtggcacaactgatcaanccttggaaaatctttaagtanttttaataagaaatgaattatcatttccttgccagaatttgctaccttaaggtgattgggaaaaatctgttgcaagaacattaacatttagtatgactcctttttactgtaatcttgcagttaataactgcagctattatgttaataacaagttgtttgtattttatttttgtttataccagtcttaaagatccaggttctgaataaaaaaattaattgatac

SEQ ID NO: 269219 - DNA, 842 bp, Homo Sapiens
actggaggaatcacatacccttcaagcacaaggcatgcttcagggctgaaaacaggggcaatattaaagtctgcataaggagcatttagctaccacgacttctcccaaccctgagcaaccaccttcgccttagcctcaagagaaatcaggtgatgtatattctggaaaggttgaggtcctaggctctgaaaatctcagtagagctgaggacagggtggaggtgagaagccacaatgaaaactgggggcttcagtgtacactggtatgctgaacagtgagatttctctatcctccactcctacctgcatccactcagctctcactctcaagatatggtttaggcaagaactactctccaagcaggaactactctctggaaaagctgaccagcccaagagaacatttctgcagagaatgacaaatgaggatccccatcctatcatcccaggctgaagtctatcagttctcaaactcctctttccaacccaccccaacctggacataccatagcagagagctctaaatatttgaggaaaactcccacatatggtcagcaaaacaaacagggaaggggaaaactcagagaaaaagaaaaaataggaatacagggacaatgcaggaaggataataaaactttaaacatttaaagagaaagaaagatacacggtattacagacacaaataaaatctcaaaaatttatttctatgcttcctttctcaggaagttactggactcagtactcccacaaaatgagggtctaggctgggctcagcggcttacacctgtaatcccagtacttaggaaggcagaggcaggatagtctgggcaacacagcaaggct

SEQ ID NO: 269220 - DNA, 472 bp, Homo Sapiens
  misc_feature (350)..(350): n is a, c, g, or t
attcggcacagcacagtgatagaggaaaaaatgataaagacaaccacataggtcaagaaagggctgtttgaggaagtgatagtgtttaaacctgggattagaagaataagcgctcacaagaaaagtgggttgaagagtattcctaggcaaagtgaatggctgtacaatatttttttctgtaaaggaccagatagtcagtatttttgtttttctgagccatacattctcaggcacagctcctcagagtctgtttttgtagcacaaaagcagcaacagaccaaatgtaaatgaatgaacatggcagtattccagtaaaactttactttaaaaaggcagcaggctgagtgcangtggctcacgcctattaatcctaggcactttggggagactgaggtgggcagggaacacctgagggccagccagtttttgaggaccagcctgaggcaacatagtgaggaccttgttttctaca

SEQ ID NO: 269221 - DNA, 944 bp, Homo Sapiens
  misc_feature (78)..(119): n is a, c, g, or t
tagctcagcagtggagtctccagaggttttgcccattctgataaactgttctcacaccaatcccaagagcttcagctnnnnnnnnnnnnnnnnnnnnnnnnnnnnnnnnnnnnnnnnnntagttcagcagtggaatctgcagaaggtcagcccattctgataaactattctcacaccaatcccaagagcacgggacaggaaattgtgacgtcacatctgcattaccttccaggaagcccaggtccagcctctgagaattcacaaatcaaaaatgtgacaaagagaaatctttacaagatttcccccctccccactccaaagcaaaacatgttcccagcatctacacagtcacaaatctgtctaggaaataaggatgcccccttaaaaagagcaaagggaatagagagtgcagttttttgagtgcctgataaaccgacaaacatcagcagctaaactcaaaaagaaaacactgggatcctgggggttgggtgaggggcataaagagacgattcacagaatattttagggcagtgaaactaccctgtaggaaaatatcatgtagcttccatgtcattatacgtatgtccaaacccatagattatgcaacaccaccagtgaaccccagtgtaaactatgaactttgggtgataatgagatgtcaatgtacgctcatctattgtatcactttggtaggaaatattgataatgggggagtttatgcatgtaggggttgagtaggagtatataagaaatccctgatgagcctggtgtgctggcacgcctgtaatctcagttcctcagaggccctgaggaaagaggattgcttaagcccaggaatttgaggctgtactggctataattgctcctctgaacattcactgcactacagcctaagccacatagtgagaccatatctcaataaataaataaatatctgtaccttc

SEQ ID NO: 269222 - DNA, 399 bp, Homo Sapiens
  misc_feature (21)..(21): n is a, c, g, or t
  misc_feature (87)..(87): n is a, c, g, or t
gggaaatcttgtaaaagattnctctttgtcaacatttccgaatttgtgcaattctcagaggctggacctgggcttccctggaaggtnaatgcagatgtgacgtcacaatttcctgtcccgtgctcttgggattggtgtgagaataagtttatcagaatgggctgaccttctgcagattccactgctgaactaattttatagatgaggaagctgagcccagaaaggcccagaaaactgaagctcttgggattggtgtgagaacagtttatcagaatgggcaaaacctctggagactccactgctgagctaattttacagatgaggaagtgaagcccagaaaagtaaccactgggacatgccgattaggagcagatatcttcaaaaaaataacttgtcttt

SEQ ID NO: 269223 - DNA, 379 bp, Homo Sapiens
agcaatacgtggtctatagaaatactaaggataattctggtggtctgttacatcaagtggagaacttgagtttatcagaggagacaatcaaagttataagagctcagcctatactattagttagaatgcagaacatgtacctttatctcaatttaagaaaatcattttattgcaatctaatgaaaagtagataagatgaattgttttttgaagggattttaaagcttttttagctgtaagggtgagatatgttttattggctattgcctgtgtgatttgagtaggtcataaaactttctttgcctctcatcattctcacaagctgaatatggagtaacttaaaatgaagagtatcatgaaagaaagcttctagaagtcg

SEQ ID NO: 269224 - DNA, 340 bp, Homo Sapiens
  misc_feature (273)..(273): n is a, c, g, or t
  misc_feature (291)..(291): n is a, c, g, or t
  misc_feature (317)..(317): n is a, c, g, or t
  misc_feature (325)..(325): n is a, c, g, or t
atgagccaccgtgcctggccaaaaagatctttacactgcaagaatgactgcctctacattgcctcttgctgaatgcctaatttattgattttgccaaaatatataaaccttactgaattatgacagggtattgggttctcgctaatgcttattatagaaattctctggcataatcaaccttttactagtactcatgaacaggagtatgtaatcatgggactatgaaaactgaatattttctgagctttctcataaaattacttgggggatccngacccaagtggtcttttnatttaaggcggccgcaaggcttattncccttagntgagggttatttttg

SEQ ID NO: 269225 - DNA, 424 bp, Homo Sapiens
  misc_feature (18)..(18): n is a, c, g, or t
  misc_feature (64)..(64): n is a, c, g, or t
  misc_feature (103)..(103): n is a, c, g, or t
  misc_feature (177)..(177): n is a, c, g, or t
tcgccttcccacccatgnatggtgaggtctcccccagcccatatggaactgtgagtcagttaanccctctgttctgttattaacttacccagtctcagatatntctttattagcagcattagaaccaacttaatgcacaaactcaaccagaaataaaaaagggagggaagacttccncaactcattttatgaggtcagcataaccctaacaaaaaaatctggaaaagacactaaaagaaaactatagaccaatatccctcataaacatactctcaaaaatctttaataaaatattagaaaatcaataaggttaagagctctgttgtataacatggtgactacagttaataacaatgtataatatttttgaaaattgctaagagaaaagattttgtgttctcatcacaaaaataggtatgtgagg

SEQ ID NO: 269226 - DNA, 407 bp, Homo Sapiens
tccttcctcaaatgatggggtcactgtctctcattattctagctgctttcctgtggacatgcctcaccctctcttaaaggatggccaataggctggatcacaaatctcctgcatggtttgacccgcaggactattactttctctgttctgaactggagttgcatcacactgttgactcatatggagcacaaagtcaactgaaaccacagcccttcttttttgacgtggtctactgatggtggtgagtcatctttctcccactttgtactcagtacttaagccaagatgtgttttctttgtttattttaagcccaagtatatccctgttaaattttatcctcctgttaagttttatggtctacctttcatttgccgagatcttttcatattctcagttctgattaaaa

SEQ ID NO: 269227 - DNA, 402 bp, Homo Sapiens
aaaaatcccatcacctaaattggaaccccttccacaaccttatttaaaccccgggtaatcctaggtccaatggaaagtgtatttggattaaataaagtagtcatggaaatacacaggttatttttaatgactaaatattttaaagccaaaggaaattgagtttttaccttatatgactatacaagttaaggaaaatacttttgctttcagataatattagatcaagtcagtgggctaacactgttcatcctgtattgactggcaggtgtatttgtccctctgcctgccttattgcctattttctcagaaagttttctggctattcttaaactgaattttcatttgaactttaggaagaacttggtagattagaaaacaacaacttttgactattttattgaa

SEQ ID NO: 269228 - DNA, 508 bp, Homo Sapiens
  misc_feature (171)..(199): n is a, c, g, or t
  misc_feature (487)..(487): n is a, c, g, or t
  misc_feature (491)..(491): n is a, c, g, or t
gaagggggagacggggagcagatgcctcaaagggggtcaaagagaggggaaggaaattgcacataaataaaccggatgattccaaatgcaaggagtcctcagacggagcgcggacggcttttccggagtcctgggtctgcatctggcgccttggcccctgctcactcgcgnnnnnnnnnnnnnnnnnnnnnnnnnnnnnactgcttgagctccagggcccagacgtgctgcggccagcccgtccggcctttggttttcttgtcgttgctgctcactgtgcttttcaagatttcgttctggacagaggaaaggcgagggcgagaaaagtggaaagagaaattcagagaggatacctggttccacaccaacccggagcttcctgcgccggaggagacagtgaaccagagaggaaaggatacgatgggggagtcccagcccctgcagagaagctaccaaggttagcgctaccctagccggcggggaggcnctcngctgcagcgctcaacaa

SEQ ID NO: 269229 - DNA, 431 bp, Homo Sapiens
  misc_feature (369)..(369): n is a, c, g, or t
  misc_feature (412)..(412): n is a, c, g, or t
acgtgacacaaaacaagtggctgttggaaacatcttcaaagagggaacgaccacagatgaatggatagcactagataccgaccccaacggaaatgttagcggccctgttttctgctttgaaataaaactttataatacccaggaatatttatatccaaaggccaagtattaaagatacacttcacaaacgcactagtgcccactgtctttatctggaaggggttgagtaggttggcggggggcaacgctggtgtctacacagccaagagggaacattcacggcacacagaatctatgagacgacgggatcccttaccacacgggagtgttcctcttcgtattaaaatatgggattgcttttctttcaantatccacttttttttgggaggggggagacgggggagcagatgncctcaaaggggggtcaaag

SEQ ID NO: 269230 - DNA, 457 bp, Homo Sapiens
acaatgtgttttttaactaggaccaggtgcagcatgctagtcttgattggaaagatttgacaggatgctaattactgaacagtgggttttgtcaacgccctggtttcagaatatgaactgaggagtcaaacagttgggaaacagcacattgcctgatttacactggatcttgccttagaaacccattgtctgcctgcctaacccagcctttcataaaatttaaacaaaactctttcctacgtagtgatcctcaagcaatatttttgatacagcaagtgtcaaacttgctatagcataaaagccggggctcctgatttcccaggtttctaaaatgaactgaggtaaaacagatgcctgaccgttttaaaggatcttttttaatgttttatgactgcctgtctgtttgaatactggcaaagggataaataataaattgacatcaaaaagtactaatgaa

SEQ ID NO: 269231 - DNA, 540 bp, Homo Sapiens
  misc_feature (55)..(55): n is a, c, g, or t
  misc_feature (105)..(105): n is a, c, g, or t
cacgagggccatgcacgctgaatgccagttcctgaagcatggccagcgggccccngagggtccagatcagaattgccccccacaatgtgttttttaaacctaggnccccggtgcagcatgcctagtccttgattggaaagatttgacaggatgcctaattactgaacagtgggttttgtcaaacgcccctggtttccagaaatatgaactgaggagtcaaacagttggaaaccagcacattgctgatttacactggatcttgccttagaaaccattgtctgcctgcctaaccagcctttcataaaatttaaacaaaactctttctacgtagtgatcctcaagcaatatttttgatacagcaagtgtcaaacttgctatagcataaaagccggggctcctgatttccaggtttctaaaaaggaactgaggtaaaacagatgcctgaccgttttaaaggatcttttttaatgttttatgactgcctgtctgtttgaatactggcaaagggataaataataaattgacatcaaaaagtaaaaa

SEQ ID NO: 269232 - DNA, 647 bp, Homo Sapiens
  misc_feature (505)..(505): n is a, c, g, or t
  misc_feature (597)..(597): n is a, c, g, or t
  misc_feature (605)..(605): n is a, c, g, or t
  misc_feature (621)..(621): n is a, c, g, or t
  misc_feature (634)..(634): n is a, c, g, or t
ctacagtgattctacttctgaggagtcttctgtcccaggaagagataccttctttacaggagaggaaaggtctaaatcacaaggatagacatttatcaaagaagttaaaatggtgtggcaggtcattaggattaggcagaatctctcagagctgctggacaaggaggtctacttattttgtgtggatggtaattatggcatgcacgctgaatgcagttctgagcatggcagcggcccctgagggtcagatcagaattgcccacaatgtgttttttaactaggaccaggtgcagcatgctagtcttgattggaaagatttgacaggatgctaattactgaacagtgggttttgtcaacgccctggtttcagaatatgaactgaggagtcaaacagttggaaacagcacattgctgatttacactggatcttgccttagaaaccattgtctgcctgcctaaccagcctttcataaaatttaaacaaaactctttctacgtagtgatncctcaaggcaatatttttggatacaggcaagtgttcaaactttgctattaggcattaaaagcccggggctcctggattttcccgggtttctnaaaattgnaactggagggttatanacaggtggcctgnacccgtttttaaa

SEQ ID NO: 269233 - DNA, 593 bp, Homo Sapiens
  misc_feature (29)..(29): n is a, c, g, or t
  misc_feature (34)..(34): n is a, c, g, or t
  misc_feature (67)..(67): n is a, c, g, or t
  misc_feature (75)..(75): n is a, c, g, or t
  misc_feature (77)..(77): n is a, c, g, or t
  misc_feature (100)..(100): n is a, c, g, or t
agtctgcctccatgctgcagtgttcgagnggatngtaggtgccagatggaagggattgtaggtgcangctgtccngngaaaggagtccttgttccagccntattctgccactcctgacagggtgaccttgggtatttgcaatattcctttgggcctctgcatctctcacctaaaaaaagagaattagattatagtggtggttctcagcaagagaaggagtatgtgtcccaatgctgcccttccccatgaatctgtctccccagttatgaatcagtgggcaggataaactgaaaactccccatttaagtgtctgaatcgagtgagacaaaattttagtccaaataacaagtaccaaagttttatcaagtttgggtctgtgctgctgttactgttaaccatttaagtggggcaaaaccttgctaattttctcaaaagcatttatcattcttgttgccacagctggagctctcaaactaaaagacatttgttattttggaaagaagaaagactctattctcaaagtttcctaatcagaaatttttatcagtttccagtctcaaaaatacaaaataaaaacaaacgtttttaataaa

SEQ ID NO: 269234 - DNA, 500 bp, Homo Sapiens
atagacaaatacttttcctgcctccaccaaacccctacagaacatcacctggaattgccactcacactgggttggagtcattgggcagctgtgcctgtgcgagaaggtgctgtggtctgggcagcccctggaaaagcacctttgctgcctgtcattgttgcctgaagaaggctggagttgctctgagagcagtttgggtttggagtattatatttggcttctatttttattattttggatcaccattctccctatcccttcttgcctccctcccttctaaacatgtgtaataactatacagagactgctacaaaattgtatatagtttttggatcaaatagcatgaggggagaggaaaccattaaaaattggggctcctactctcctttgctttgtaaattcaaaagttgggggtgggtaagagggatagttaaaatgtttacaaaactttaggctccctcggaacttttgccagtgtggaggaaaataaaaaagaactt

SEQ ID NO: 269235 - DNA, 605 bp, Homo Sapiens
  misc_feature (30)..(30): n is a, c, g, or t
gggttttgtgctcagggctgtggggaagtngggcttactcaggcctctgatcaccttgccccagacactggtgcaagtggccatctatgctctggccgagagcccaccttcttcttcgacccggaaaattttgacccaacccgatggctgagcaaagacaagaacatcacctacttccggaacttgggctttggctggggtgtgcggcagtgtctgggacggcggatcgctgagctagagatgaccatcttcctcatcaatatgctggagaacttcagagttgaaatccaacacctcagcgatgtgggcaccacattcaacctcattctgatgcctgaaaagcccatctccttcacctttctggccctttaaccaggaagcaacccagcagtgatcagagaggatggcctgcagccacatgggaggaaggcccaggggtggggcccatggggtctctgcatcttcagtcgtctgtcccaagtcctgctcctttctgcccagcctgctcagcaggttgaatgggttctcagtggtcaccttcctcagctcagctgggccactcctcttcacccaccccatggagacaataaacagctgaaccatga

SEQ ID NO: 269236 - DNA, 352 bp, Homo Sapiens
  misc_feature (312)..(312): n is a, c, g, or t
gctaattaatagctttttattttctcattgtaatatttttgagctccaaattattacaggaaaattatgccctaaactccaacttttctcctatcttttttcggatgttctgacacaatgacaaactggaggcaagacattaagcactatatcatctgccagtctgtttataggtgtaccctcaattcttgaatgttctaacttctaggcagcagaataacaaaagggcaaccctggggcttgggcaggcttcaaacagggaaggaaaggcaaggggctaaggtacccaggccaggcataggctcagggctntggaaagggcaagggcatgctaggggaaaaaggggagaag

SEQ ID NO: 269237 - DNA, 562 bp, Homo Sapiens
  misc_feature (12)..(12): n is a, c, g, or t
  misc_feature (33)..(33): n is a, c, g, or t
  misc_feature (85)..(178): n is a, c, g, or t
aaagctggggcncatgctacctaatcccagatntctttgtccctctaagagttgattgctgtatattaaaattgaacatcatctnnnnnnnnnnnnnnnnnnnnnnnnnnnnnnnnnnnnnnnnnnnnnnnnnnnnnnnnnnnnnnnnnnnnnnnnnnnnnnnnnnnnnnnnnnnnnnagaacaaaactccatctcaaaaaataaaaatcccaatcccaagtcgaaatcacctcttgttttaaacaagaatgaatcattactgtgtatgttagggtattaaaactgtttcaccagtacagtgaaagttgtttcaacattttaaacaaacagtggttatagactctttctttaaccattgtatattttcttccattcttgtcattggtcaataggggagggtagattagctgctccagaattcaataaagtgtaatatttctaacggtgactttgacctattctgtagtacaactgtaatagctattggtcttcaagtgggtttagatttggtgacatcagtttgatattctcttaaaggaaataaatattcaagaactgaaa

SEQ ID NO: 269238 - DNA, 300 bp, Homo Sapiens
atcatgtggtgaatatgttttcattttcctcctaataatgtttctcttttgttaacttatttatttttcaaacactgagccatagtcttaaatttaaatgctaaaaacaattgtatcatgtagtcgggcagcctattgatactgtcaggggaaaaaaatgggtcagaactcagcatctgtcatgaaaaaaatcaattgaaaaacaagcagattttaaattttgaagtaatcaaaataatggaaagtgtctgttttgtggtgtatatactatgaataaaatcacagcattttctaaaaaaa

SEQ ID NO: 269239 - DNA, 413 bp, Homo Sapiens
  misc_feature (193)..(206): n is a, c, g, or t
ggcagccccctgtgccccctaagcctggccctggttattgctgagctctgtgctcagtgctgcggcctggccgtggctcgtctgttcctttggggggcccgggcgggttgtgggaatcagtcttcacagacagacgtgagcccaggcggaggactcgttccttgcagaggtcagtcctcacctgcaggtgtcnnnnnnnnnnnnnncaaggaggggcaggcacacaccatgtctgacctgaacccgattctggggagcatcttcccgctccggccccacgacctccacagggttacattgtaatatatatgccccagctaacctgtctgatggtggcatcttcctgcagacatttcaaacatgtaacttttatatgaaaaaaaataaacacagatgaaagctgcccaatgcca

SEQ ID NO: 269240 - DNA, 404 bp, Homo Sapiens
  misc_feature (294)..(294): n is a, c, g, or t
  misc_feature (302)..(302): n is a, c, g, or t
  misc_feature (370)..(370): n is a, c, g, or t
  misc_feature (378)..(378): n is a, c, g, or t
  misc_feature (392)..(392): n is a, c, g, or t
aaccagatttattctccacaagctgaagatacctgaggttacatgaggactggcattaaataatttataaatgtatttttgactgacagacttttatcataaggattcatgtgtttacaaaagcaaaatccaacctctccagagctagaaagtggggaaggtgcccgggctgcaagcacagccttgggggaggatgaggccacataattctctctgcccacactctcaggaatgccccaagaagttaggtaggctacacaaagccaagccttgggggggaaaacctggggtccngtggggtntggggacttctcccaaaatgcaggccccaaccgggggcccggggccccgcctttttcccatcttgggnggcacttncaggggcttttctngaaaagcgggcc

SEQ ID NO: 269241 - DNA, 484 bp, Homo Sapiens
tgggcacccatccacaagctgggccacggagctccagcttctcaggacaaagccccgggcgtggcgcatcctgagggtctctgggggtgtttgccaggctcctgggatgggccgctttcagaagccctgcagtgcctccagatggaaaggcgggcccggctccggttgggtctgcattttggagagtccacaccacggaccaggttttcccccaaggcttggctttgtgtagctactaacttcttggggcattctgagagtgtgggcagagagaattatgtggcctcatcctcccccaaggctgtgttgcagcccgggcaccttcccactttctagctctggagaggttggattttgcttttgtaaacacatgaatccttatgataaaagtctgtcagtcaaaaatacatttataaattatttaatgccagtcctcatgtaacctcaggtatcttcagcttgtggagaataaatctggtttaat

SEQ ID NO: 269242 - DNA, 241 bp, Homo Sapiens
cccttttccctttttgggtacagctgtaaaatatttggatataggaaatgttgtgttattcttgcagccttgatattcagggtggattgtaaaatataaatttttgtgagatttcaaagattaagattattttgataacattatttacagatttaaaagatgtggttatcacaagtctcgagggggaaactactgcataaaataactaacttggaataaatattttgcatcagtaaaaaaa

SEQ ID NO: 269243 - DNA, 693 bp, Homo Sapiens
  misc_feature (18)..(18): n is a, c, g, or t
  misc_feature (24)..(24): n is a, c, g, or t
  misc_feature (49)..(49): n is a, c, g, or t
  misc_feature (66)..(66): n is a, c, g, or t
  misc_feature (521)..(529): n is a, c, g, or t
  misc_feature (633)..(633): n is a, c, g, or t
tcccctgaaaattcctgncaaaangaaatcaccctaactttcaacgaantcaacctcaacaaaatncggctgccccaacagcccgggaaggcccatgcaacacggcccagcgcgtgaaacatttcccgtgcggtaacagactttgtgtcatgtggcttaagtgctgatggggcggggtggcgtcaggacggcaggagccccctcactgagtatgggtgaagtccatgggtctcctccccccaggtccctagcctgacttgctggaacctgagacccagggtccagtcctctgtctcccaccaggagggaagaggggccatcttaggctgggatcaccacagggagggctcagccaggagcctcatctacccaagctccctcacccccaaaagacgccgctcaccacttgggtccctgaactcaggctctgtttttagctggagggtctctagaggggtgggggtaggggatgactctgtatttttttggtctaaacttaaaatagaatgaaaagagagagnnnnnnnnntggtgaagcaagatgacaatagaagctgccagcccagccccacagcttcagctggctgaagacagtgggactgagatcagcaaccttggtctgaccttgagagnccacttcagggcccacagaagtatctgaggctggctaattaccaagatgaggggcagaga

SEQ ID NO: 269244 - DNA, 342 bp, Homo Sapiens
  misc_feature (161)..(194): n is a, c, g, or t
  misc_feature (327)..(327): n is a, c, g, or t
ttcaataccctgtataattcatttatggtcattattggtcctataaagggatatctaacaagttaaacaatgaggttatttatctggaggagaggcacagaatgcttaaatcaagagagaaaaaagcccacagaatcacattatagctactctattttgtnnnnnnnnnnnnnnnnnnnnnnnnnnnnnnnnnnggtggggggacagtctaatgagctagattttaggagtaccaagagaaggaaacagctgcttcaaccatcacctcgtaatcaggaaaattatgatttaaaatccttttgattcttttcagatatataatgattnatttctgaaggccct

SEQ ID NO: 269245 - DNA, 461 bp, Homo Sapiens
  misc_feature (15)..(15): n is a, c, g, or t
  misc_feature (39)..(39): n is a, c, g, or t
  misc_feature (52)..(52): n is a, c, g, or t
  misc_feature (75)..(75): n is a, c, g, or t
atttgtgtccaaagnaaaatcgtggtttgaatttcactncagcaggctgacnttccctgatgtgaaaagcaagtngccgactgggggtccgggtgcacaggtcgggggaagcacaggcccacagagcgcagccctctgggggtccccccaaggcacagcatatacagcatggtcgccccttgcccctggagtctgggaacaaagagaggagccagcctccccgcactgcttcagatggaaaagggaggcagggtgggcttccgttctccagatctgtttgctcttaacaggcagaacatgggagaatccttattcctggttaatcactatgcatatttgaaataaaagaaagcgtaagcctctgcaattttaacttctcaaaggatgtctctgaaaagaatcactttaaaccaatgcctataaaaagcaagtctaccaaaataaactaagactttctatat

SEQ ID NO: 269246 - DNA, 501 bp, Homo Sapiens
  misc_feature (31)..(31): n is a, c, g, or t
  misc_feature (39)..(39): n is a, c, g, or t
  misc_feature (447)..(447): n is a, c, g, or t
  misc_feature (455)..(455): n is a, c, g, or t
  misc_feature (461)..(461): n is a, c, g, or t
  misc_feature (466)..(466): n is a, c, g, or t
  misc_feature (485)..(485): n is a, c, g, or t
aaaaaatcattgacgtcatagaatattcttnttcctctnaggagaagacggaagctggagttggacatggttcataaaagccagaaacacaaacccgtgtggactccaggagggtgactcaggtcctccttccatgtcttgagcactggctcacccagggggtgaaaaattcccgcccctgtttgcacgctttcttgcctccgtgtgtaagctccttgtacaacccagacccatcttgtattttgtggcccagaaaactgaacgattattttgttcctccgtagtccaaagggcagagttgcggaaggccgtcggggcttggtgagcaggggctgtaatacagtctgtggggctccttaccctgcagaggctgtttcagctcacacagagttcatccacacaaacccacggctcccagtttgacagttcagtgggattgttcgtctnctttaggngttccngggtngggggatttttgttgggantaaaggggtttcttct

SEQ ID NO: 269247 - DNA, 329 bp, Homo Sapiens
  misc_feature (305)..(305): n is a, c, g, or t
  misc_feature (319)..(319): n is a, c, g, or t
catgcctggcctaaagaatcttgatgtattgaaaattacttcttttgtaattaggcaaatcagaattttaataactattgaataaatgagtgtacaccaatgagaaatattaactagatgttaaaatttcaaactatttgcttccaatttccaggggcctaagtttcagagagggtgacaaaatttatgaggcctaggagctattaaggaaaatacagaggtgctgaacatacaaaacacatcagggcggactaaaatcgtgagaggcaaaggtatttactggaatattttcctctgccgggggncttggttgaggcanttggcataac

SEQ ID NO: 269248 - DNA, 287 bp, Homo Sapiens
  misc_feature (12)..(12): n is a, c, g, or t
  misc_feature (23)..(23): n is a, c, g, or t
  misc_feature (72)..(72): n is a, c, g, or t
ccccttaaattnaaagaaataanccatggcattggacattgatttgatgcaggagacttcagagaatgaaancccaggtctcatccataggccagccctcctttgagcggagagctaaggaccaaggcagtgatgagagcaatgcacatgtactgccccattaagagagagacccccttctcctccttagcacatctcaggtaggagagaccttgagaaacaggactgatccgggctaacatcatgggctttaaatttaacagacctggctgggtgcggtggctcat

SEQ ID NO: 269249 - DNA, 462 bp, Homo Sapiens
  misc_feature (413)..(413): n is a, c, g, or t
  misc_feature (438)..(438): n is a, c, g, or t
tttcctaaaccaatataccaattattgattatgattatgacaatcatttcacattgtatacatacatgtatcatcacactgtacatctcaaatatatgcaagttttatttgtcaatcatacttcagtatagctgagaacaagttaaatggaacaaataaaccatgctttcaaaggagccttggctaccaaaattcaaaaaagaaaaacatgttattaataggaaagtaaattccaaataaacatatatatacttgactactcatttaagccttctgtgaagaaaacccaagaaattatgggagaaagctataaaaatatacaacaaaatgattaaaaacattaaattttcatggtagacctcaaagttatttaactttcttctttgtaagtgtattctaagttgaagcaaggnatatgcaacagcttaaaattttatnaattatataattttttcacagaat

SEQ ID NO: 269250 - DNA, 273 bp, Homo Sapiens
  misc_feature (20)..(20): n is a, c, g, or t
gcctacaaatgcctaattgnaaaatgttgattgaaacctgatgtcacataaatcagtgaaaagagattcctacaggggcctttaagagaaacctgggattggatctacatagatagaggttagatccttgcccagtcccctcatatattaccttaaatagatatcttttattgttagtcgttaattattagggtttatgaaatcagcaaagcctagcagcccagattttcaaggtctgagaaagagaagatagtttggcctggcatggtggct

SEQ ID NO: 269251 - DNA, 695 bp, Homo Sapiens
  misc_feature (66)..(66): n is a, c, g, or t
  misc_feature (95)..(95): n is a, c, g, or t
  misc_feature (604)..(604): n is a, c, g, or t
  misc_feature (654)..(654): n is a, c, g, or t
  misc_feature (662)..(662): n is a, c, g, or t
  misc_feature (669)..(669): n is a, c, g, or t
gtgagcaaagtaccacgctgcagaagacagctgagtacatccttatgctacagcaggagcgtgcgngcttgcaggaggaggcccagcagctgcgngatgagattgaggagctcaatgccgccattaacctgtgccagcagcagctgcccgccacaggggtacccatcacacaccagcgttttgaccagatgcgagacatgtttgatgactacgtccgaacccgtacgctgcacaactggaagttctgggtgttcagcatcctcatccggcctctgtttgagtccttcaacgggatggtgtccacggcaagtgtgcacaccctccgccagacctcactggcctggctggaccagtactgctctctgcccgctctccggccaactgtcctgaactccctacgccagctgggcacatctaccagtatcctgaccgacccgggccgcatccctgagcaagccacacgggcagtcacagagggcacccttggcaaacctttatagtcctgggccagaccctgctgctcactcagctgccctgggggctgctttccctgggcacgggctccagggatcatctttggggcactcccttccttgccccaggncctggctctgccctttccctgggggggttggaagcagggtccaggttttnacaatttnccacttnctgggaagttcaagaagagcagagtt

SEQ ID NO: 269252 - DNA, 410 bp, Homo Sapiens
ggccgggaggaaaatcagggaaactctccctgtttcattgtccacaagacttgcaaggcttcctttaagagaaggggtacacttcccccacccactgacagcaagttttgaccaatagaaagtgagcagaactgaggcatgcggaatgtgagtttggaaagcagcttgtgccagtcatgtacaggagctaattgttaaatttcccaggaacttgcaagccacttgttggactgtttgtagcttgaaatcggccattgtgggagcatttacatcatagaaatagcaaacactacatatctggacttcccccttctccctcaaagttggtttaccagcccagcagggagcatggcccagaaaagttgacctttcagcctggagtgaagaaaactggtggagtactgccaaag

SEQ ID NO: 269253 - DNA, 635 bp, Homo Sapiens
  misc_feature (17)..(17): n is a, c, g, or t
  misc_feature (31)..(31): n is a, c, g, or t
  misc_feature (49)..(49): n is a, c, g, or t
  misc_feature (143)..(143): n is a, c, g, or t
  misc_feature (158)..(178): n is a, c, g, or t
ggccagaaattccttcntaaaacctattaanatatggactgggccacantggttccatgccctggtaaacccccagcatttaggaggctgagtcgggaggattgcttgaaacccaggaattggagaccaccctgggcaaacgngactctgtctctagnnnnnnnnnnnnnnnnnnnnngcaaactatcatagaagttggaacattattagctgctacactaagcagcactgaatagccttccaaatttctgctcagctggaagaacacttgatctcaaaaatgctttggtgcaggagatacacaatgtatgtcaactctgacagacactgttagaggtgcccattatccaattctcatcttcctaacagaatctcaaaatgttaatttggcccatgacaacccagatagaatattacgtcccatccagcttcatggctagtgggaccaagcaactgtttgaaattgaagtttatgtattgtgtgtaacttccaagaagtgttcttgggggtgggggaggtaatgccctctaccagctggctcaaatgccgataggaagtttctagctagagcagctgtcttcaagtaagaactgaaagccacatgttggccaggtgtggtggctcacacctgtaa

SEQ ID NO: 269254 - DNA, 415 bp, Homo Sapiens
  misc_feature (19)..(19): n is a, c, g, or t
  misc_feature (41)..(41): n is a, c, g, or t
  misc_feature (49)..(49): n is a, c, g, or t
  misc_feature (62)..(62): n is a, c, g, or t
  misc_feature (101)..(101): n is a, c, g, or t
  misc_feature (114)..(114): n is a, c, g, or t
  misc_feature (146)..(146): n is a, c, g, or t
  misc_feature (151)..(151): n is a, c, g, or t
cctaaatataaccaaaaancccctaatataactaaggtccnaattaaangtcacctgtttantaaaaggttggttttggcatgattaagtcttgcttgctnaatagatgttggnaggataatttcaggcttaaccttctttggacngctgnaatcaggatttaataccccagatagcccttgaacataagtgccttgcaaagcacctgaaagaaaattaaccatcttaagccccaatacaacacaatgatgctagtcctagatcttggattaagtgttttaatacttttactctaattgccaagttatcttcttcctaaatcttcatgagaaaacccactaaaagaatgctttttcctggtagccttccattgtgatcataaagtttggaagtaaagttgaaaataaacatgtgg

SEQ ID NO: 269255 - DNA, 541 bp, Homo Sapiens
gtatagattagtattaagcaataacgtctgcatcttctagatcatgacattaatgtctgaggacgagagcacgcctaggagcgaaagctggccttcttctacgaatgcactacatagaagatgtgcaaccatatgcgccaccctgccctaacttccggtaccctgagagtcggcgtgtgaccccatctcaatgtgcctcccgtctgggtgggtgtgagagtggacggtatgtgtgtgaagtggtgtatatggaagcatctccctacactggcagccagtcattactagtacctctgcgggagatcatccggtgctaaaacattacagttgccaaggaggaaaatactgaatgactgctaagaattaaccttaagaccagttcatagttaatacaggtttacagttcatgcctgtggttttgtgtttgttgttttgtgtttttttagtgcaaaaggtttaaatttatagttgtgaacattgcttgtgtgtgtttttctaagtagattcacaagataattaaaaattcactttttctcagtaa

SEQ ID NO: 269256 - DNA, 464 bp, Homo Sapiens
  misc_feature (229)..(315): n is a, c, g, or t
ccatttaaaaaaccaaaacctcaagcacagcttgtagcacattgagttattggtagggtcaaatactgaaaatagaacctggcagcactttttatccctaagatggtattccatccttgtgttaggttatttattacccattatgtcaacaaatatttctaaggcattaaaagttcattgtatataaacaaaatacaaacatatgggccaggctcagtggctcacctgnnnnnnnnnnnnnnnnnnnnnnnnnnnnnnnnnnnnnnnnnnnnnnnnnnnnnnnnnnnnnnnnnnnnnnnnnnnnnnnnnnnnnnnctgtttttgttaaaaagaaagataggaagattgtgtatgtataacatgatcacaatcaatcatatggtcattttcagataatatagaccttcacatatacatgactgattacctgtaatgctgtatttctcacctaaaaagagacaaga

SEQ ID NO: 269257 - DNA, 576 bp, Homo Sapiens
  misc_feature (40)..(40): n is a, c, g, or t
  misc_feature (90)..(90): n is a, c, g, or t
  misc_feature (99)..(99): n is a, c, g, or t
  misc_feature (109)..(109): n is a, c, g, or t
  misc_feature (118)..(118): n is a, c, g, or t
  misc_feature (404)..(426): n is a, c, g, or t
aacctaagtgaggggccccgccgccctgaggccaccccgnccccatcagcacctaagcccacatgacacaaagcctgtacccgcacgggnaaatgttcnacgcccccgnccgtgtgcnatggcctccccgggctgtggggcagccgcacctgtgaggtgaccccgtgaaagtaggtgattcccttgccagaacttcagggactgggagcagaggcccctcactcaacgacgtttgtgcgacatagtattgtatcccaccttagtattgtatcgagccttttctgtgttttaatgagaaagcagaacactagtttcctatttaagactttaagggtttgtggggcggggcgggattaacacaacatttggctttgttttctttttcctttgatttccacatcagnnnnnnnnnnnnnnnnnnnnnnngagatgttaagagcctcacaaggaaactgggttattggaggccaaggcggcttacagttctctgcgttcgtcacttaattcctgaatgtttcagagaaacaggaatcagaaaatagcagatatcatgtaggaaagagaggataaacaaag

SEQ ID NO: 269258 - DNA, 494 bp, Homo Sapiens
attcaaaaagcaaattttaaattccaatgaaatagttcatcccgtggttgtgaaagagtgtttttagattgctgcacagaagcatgtttaacgtggaaatcagctcatggttttagttgttagggctacaagaaattgggggagacttcattccaagaaaacatgtagtctgtcaggctgttttcattcctctaaaagagacagttttctaagatgtttttgaaaatgagaaaatacgtaatagatctgcttaagaagtttcaaacttaatctgtgcttattacatgaatatgctaatgtaaaaccaggccttcagttagtgtttccttccttttagaatggtgtatgtaaagcaaaatataaactaatttctgacctgtcaaaggttttttcttaaaatttaaatttataatgtggtttggtttttctttcccactcaaacatgaatttgggtaataccaaaataaagctggatatataaattttatccaaaa

SEQ ID NO: 269259 - DNA, 430 bp, Homo Sapiens
  misc_feature (28)..(28): n is a, c, g, or t
  misc_feature (400)..(400): n is a, c, g, or t
aaacttcagtgcttaaaggcaataccangtactcctacccatggaggttcttgacattatcatggctacttgaaggatagttgctaacactctggctcttaatccctcaatgataagctcaaacactcccatctctgcagcaaaaatctctttttgacactgcaatactactagactttctagtttcttgagaagtcattttcatagccagtttcatagccagtcagctgggatgctagtagaatgaccctcctgatgaaatataagacttttactggttagaagccactttgcccttgagaaatctctgtttaacagacacttcctgggtcacacagacctaattacactctgatggtgcactttcattctttctgtagctattcaacaaatgccaccnaaatgtaaatggagctaaattataaatggg

SEQ ID NO: 269260 - DNA, 482 bp, Homo Sapiens
  misc_feature (14)..(14): n is a, c, g, or t
  misc_feature (48)..(48): n is a, c, g, or t
  misc_feature (99)..(115): n is a, c, g, or t
agctcctaatgganaaacccaacccgggcatgagctctggcaaagaanaccccagattccccatttttgcctgtggaaaggagggtccctttacaggcnnnnnnnnnnnnnnnnncccccaaaatctcttaaaatgaggaatctcttagcagactttggagttccccattctgccacattctgaccatgagacgcggcttgcagtgggggtgaacgcacataaaaagggacccactgacgtcctgctctactctctgctttctatttatttattttgggggtgggttggggagtcagaagaacctggaggacggaggaaaccaggggcaatgtttacaagactggtggacaagtgtaaatatggaataagaacaaacagttctaattaattccttcttctgcagtatggaaacctattacgatgcccttgagtcaagcactgagatacgttacccaattagggaaataaatttgttaataaa

SEQ ID NO: 269261 - DNA, 357 bp, Homo Sapiens
cggatttcaaaaacaatgaaaaaattgataatgcatttggaaattgtagaaatatgagagagtcctaattttgaaaatgaggcactctgatacaggtcagttgtacaaggacatgagtacattagtactttgataccttcatgtttggcagttatagtcaggtacttcttttatgaatttaaaattagtaatttattttatgaccgaacttcaacttttcaggagctgttattgtgaaagtttttttgctactatgagttttatccagtcagaaacaggaaccaattgtaaacaattacttctattgctgcaaacaatttttaaaaacctgccaaatatgcaatgccttgctattca

SEQ ID NO: 269262 - DNA, 392 bp, Homo Sapiens
  misc_feature (35)..(35): n is a, c, g, or t
  misc_feature (46)..(46): n is a, c, g, or t
  misc_feature (149)..(149): n is a, c, g, or t
ggacctcccgtttggtggccccaaagtcaaactcnaaagttggttnggaactgaagtttggtcatctttcctcccatggaacctccctccctccaacccttcccctcctcctagggactcccacccataatttacagtcacagaagccnagcagccctggggactcccacctttctcacacctcaagcacccatggaatccaccgccccaacacccagccttcatcttaattcaggcccccatcactgcttgctaccaattgttacaataattttctaattgtctccattctctacttgctgccagagtgagcattctaaagcacaagtcgaatttgcatctctcttgctttaaaataaagtatgcttttagctatttgccattatttacag

SEQ ID NO: 269263 - DNA, 390 bp, Homo Sapiens
  misc_feature (68)..(89): n is a, c, g, or t
tgtggctgcagtgagctgtgatgtgcccttatgctatagcctgggcaagagcgtgagaccctgtctcnnnnnnnnnnnnnnnnnnnnnntaactcttttgaacaaacagacaaattagctagtagtatggagatgtataccctctattacacacataaaaccgtaacaaaattcattgtggtgtattataattagttttgtgaatagaaaaataaagcacttatgtttaaatttgttacagtgacttttaaaggattaatgttgaatcacattgtcagaattttttcctcctcgctgttcaattttgtagtttttactctcaaaaaatgaaattctcaaaattatatagctttttgttttgtttgaataaatgattcattcctgaaaaaa

SEQ ID NO: 269264 - DNA, 559 bp, Homo Sapiens
  misc_feature (42)..(42): n is a, c, g, or t
  misc_feature (48)..(48): n is a, c, g, or t
  misc_feature (82)..(82): n is a, c, g, or t
  misc_feature (92)..(92): n is a, c, g, or t
  misc_feature (125)..(125): n is a, c, g, or t
  misc_feature (135)..(135): n is a, c, g, or t
cctccccagtgttgggattaccggcctttagccacccgtgcntgcccngaatgtggattcttaaggccatttttttaaaggncggaaatgtngacctcataggtatttcatatctcccctatatngcttatcatnggaaggtatataatagctagttattgaaatgaaatggctatgccttcagtgcttgaaatttcctttcccatatttaagaaagcggaagaaaagaaagtacccttgttccaaaagcactgcctcacattgtcagtaaattctttctgtttagctgaaaaagaaaaccattctgttaatttttccattgaaatagactcataatatgaagacaatacttaaactttgtaatcatgctggtttgaacacaacaaaggaggaagtttgtattcaagggtaaggcttcataacctttgtctctgtgtgtaccatgatggcagctgctgtttagcacaactctggtttaccctaataacactgtttttccaaccatgaaaggtctaaggagcaatcaccaaggcttataaaatggctatagaatcagtaa

SEQ ID NO: 269265 - DNA, 120 bp, Homo Sapiens
aaaaaaaggatggttacatccgtattgaacatgtacagacttttttcttgtcattattctctgaacaatacaagaactctttatgtagcatttacatttattaggtattataagtaatct

SEQ ID NO: 269266 - DNA, 294 bp, Homo Sapiens
  misc_feature (20)..(20): n is a, c, g, or t
  misc_feature (71)..(71): n is a, c, g, or t
  misc_feature (99)..(99): n is a, c, g, or t
  misc_feature (106)..(106): n is a, c, g, or t
  misc_feature (133)..(133): n is a, c, g, or t
caagttgagttaaagtttgnaacaaaaattttaaaatactttctcccattatacaaaaaaaatgtttattntgcatctctttatgaagacccccaatgnagggacnaaagtagtaggtgcaataaagaataanccctagagaaaagcttcaatatatagaatagcggtcagcaaactttttttaaaggaccagatagtaatatttttggcttgagtgcccaagttgcctttgtagtagtcacagacaataagtaaaagaatgagcatggctgtgttcttaataaaactttgttt

SEQ ID NO: 269267 - DNA, 348 bp, Homo Sapiens
  misc_feature (44)..(44): n is a, c, g, or t
ccctgaatttatggcattagtggtggcatttttttgtgtacaanatgtgggtgatggaggggctgtttctttttccgtgtgggtggttaataatcgtcagtctcggagggcgatgctcgtaggatatttcaggtgagtcagggttggatggtcatcggctttcagagggagaccacgggaatgttcagggaaacaatgtcagcttctctgaggaccagaattcatgttcacgggcagtgatgagttggcttatggagtgagtccagtctggaattccgccgtgcattctagcctgtatcatctcatttggacaaatgctggcacgttgaaattaaaatgttaaaaaac

SEQ ID NO: 269268 - DNA, 434 bp, Homo Sapiens
  misc_feature (109)..(109): n is a, c, g, or t
  misc_feature (116)..(116): n is a, c, g, or t
catttcctctgtgaaatctacctcagagttgtaccctcagaaggacgggtaagcaggaggccagggggtccccagggctgaggtggggaagccttcctacggcgaaaancctgccnacccccacaatgaatccaccctgctcccactgcgcgccctctccccaggtctcagctctgggtggggagcagtggccgctaccgacagcgcatgtcccgctcttatccaactcttcccaggccccacctccctgcacccctcccctctatagagcaggggagtgaaggggtatgtcaggcggggaaggggccaaggacacgtcattgtaccctgagcgtccccagggagtggaaatggggaagggggcctggagaggggaggcaggggcccctgtgctctctgaacaagttgaaagtccaaataaaacttacctgttc

SEQ ID NO: 269269 - DNA, 512 bp, Homo Sapiens
  misc_feature (19)..(19): n is a, c, g, or t
  misc_feature (35)..(35): n is a, c, g, or t
  misc_feature (47)..(47): n is a, c, g, or t
tccatgaacactgccctgncccttggaacgagcantcccataacaanggagaaaaacccatgagcctccatgaaactcactcttccaaggctgccttcaaagtccaagttttcctgcctccacagcttgtgcggactgccagcatggcaacgagtaaacatttttagatgcaaaatattcccagaatgtcagcaatgctggcctctaacttgggctgccccctccagtgtactccagaaggtgccactttatcctggctgtctgttctccgatgagcagcattagagcataatgccaggggatgtggaatcacctccagagctgatttgttcagcagctgttaatatagtctgccatatatagagatggtttttgaaggtagataggactattatgaagacatctaaggggtgtctggactaccctagcaaccaacaggtctctatttgagatctatagcccagaagaatccagataagcccaggaagtttcattctccctcttggatatcc

SEQ ID NO: 269270 - DNA, 299 bp, Homo Sapiens
  misc_feature (255)..(255): n is a, c, g, or t
tgcaccgcgcccggcctgattctcttaaaattgaagaggtgctgccaaggccttcagatctaacgcagatgcatagaccttgttcctggtacttgttcagcctgtgctggggagccgtggtcccgagttccctgggaggctgacagggtcaagccaccctgcccaccaccctcccacttcccctcccctttcctctccaagcattaggattcaaagggaaatctgcatgaagccaattttgagggtagacgtgtnggggaaaattaaatcatttattacagttaagacctgggggcttt

SEQ ID NO: 269271 - DNA, 659 bp, Homo Sapiens
  misc_feature (162)..(162): n is a, c, g, or t
  misc_feature (621)..(621): n is a, c, g, or t
ggagaaacagagaaagaccattccccctgcctgtccttgcggccctgtcttctgaggttctctgtctggggttggctctcttaaccctttctctgctcccagcctgcctcaccagggaaggttggaggggcctccctctggcttctgcatctgcgccaaaancatcactgccgttggtctctcatgacttaactggcttccctctgctgctgccttggcttcctcctaatgctcgtgctctcctgtccttctgaagttgctccttggccaaatctccagctcccttcttgttttcctcatcctcctaccctgtactcccaccaaaccatggtcctttaaggcacgctcctgtcctcctcattgcccagcagtagggaggggcaggggtaaggggacctgaggataaagggtggggaaacagggtcccctgaggcctgtggggggctgcaggggaaggagggatgtaccttgtgtctcttttcaagtggccttaaatccgaggccagcagggcctttctgcttggcctggctggccataattgttatgttaggggaaagtgtttctgtgggcttgttttgttgttcaaggaaaaggaggcagttcattcttcaggaattttngatttcccccattcaggccaaaggcaaaaagatgggct

SEQ ID NO: 269272 - DNA, 442 bp, Homo Sapiens
ttcggcacagggagagaaagcttttgattgcagtgactctgggaaatccttcattaatcattcacaccttcagggacattttaagaactcacaatggagaaagtctccatgaatggaaggaatgtgggagaggctttattcactccacagaccttgctgtgcgtatacaaactcacaggtcagaaaaaccctacaaatgtaaggaatgtggaaaaggatttagatattctgcataccttaatattcacatgggaacccacactggagacaatccctatgagtgtaaggagtgtgggaaagccttcaccaggtcttgtcaacttactcagcacagaaaaactcacactggagagaaaccttataaatgtaaggattgtgggagagccttcactgtttcctcttgcttaagtcaactattttaataaattgatgaccagttgtt

SEQ ID NO: 269273 - DNA, 612 bp, Homo Sapiens
  misc_feature (20)..(20): n is a, c, g, or t
tacctcaccaccccaaccangcacttagcagtataaaacctgtgcaaaataatatgtactttttccacttccaaaaatggaaaataataacaagatggagtttttggtacccttactgtaatttataaagctagtaaatattagcaaaatggaatgataaaaccaaagagtaaaagtgccttaaaaaagtaattgcagggtttgtaaagattctttccactttttgtcacattaaatattttataaagtcatatgacatatacatatgatgacttttctgcctttctgcacagttagaaagtcattcaggaaagacaatgataccacaaaacaacactcagagaatgcacattccacagcactgacatgtatcatctatggtcctggtctacaacatccgctgtggtctaaacacacactatggctgttattaaacaaaacatcccatttctacttactttaatcagaaggaggatgaagctgctgctaacatttcgataacatatctgattctatcaagtgaaactacactgaatttaatgggagtactggctgacagatcaaacttaagttctagacagtcttgtctaaaataatagaggtttaaatatc

SEQ ID NO: 269274 - DNA, 211 bp, Homo Sapiens
  misc_feature (75)..(75): n is a, c, g, or t
  misc_feature (141)..(141): n is a, c, g, or t
aggagggagcctgtggtgccaccggaggctgggtctgttgactctgagttgggggagtttcatgaggaaagaggngtgctggagggagatgacgagtaaccagctcatttgaggagctgaggagtttcggtcccagggccngccaggcaaccagagcttggggcacagctcctgggctttgggaaaggttcttggaacctctatttcctaa

SEQ ID NO: 269275 - DNA, 208 bp, Homo Sapiens
atttgattgaagaacaaccaaaaaaagctttggttatgttagctatgtaaagctgtgacccacagagccccagctgccctcttccttttggatgtagattatgtgtaggttatatttataaaaaatctggctgggtgtggtggcttacacctatagtccccaggtaagtggatccatgtgagtagaggctgaggtgagtggattgctt

SEQ ID NO: 269276 - DNA, 965 bp, Homo Sapiens
  misc_feature (130)..(130): n is a, c, g, or t
gggggttcctggaccccaaggtcttctggccagcctggatattgtgacccctcatcatgttctgcctatggtgtgagagctccccatccagatcagccagagttcacccctgtccaagatgagctggaancatggaactgtggggccctggagtctgatagcctcaggagaaatttgaagaccaactgcaagaactcttaaggaatcttgtttgagaaaatgttgttatgtggtttgtatgctacttttggggggcagggctcatttcagcagcctaaatctcctccttggataatgttaatattattattattattaacaaaaaatatatatttttaaaaagttcccttaatctatgacatggtagcaatgatttccctttggtgtcttaatggcatgtcagataatttgtttttccagagaagagagctcaaagaggaattgggaaaaataaattgaactctggaatcttctctctcaagtcctaaaattgaacaaacagatatgattgtgtttgagggaaatatgtccctagcaggaaaagaattcaaagaggttcaaagaatatgtcacttactcctacttgctgtaggaataaccttgctgataagaaaaaaagggacaatattggagaaactacctcttgtttaattgatctgtccaactctgagatcacttggtaactggtttcatgtgtatccaaaaatcagcatttggatttaagctttctgaatttggtagtttaagaaacagatttagtttttcagtggttttaactcatgtgaaataatgattttccaccagctctgatgcaaagagatataattttaatgaacgatttatccagcagtgtgttccaggggttgcctctccttatctacggggattactttgtacatgcagataagttttcgcaaacctatttccattttcttttgtaagcaaataaaactttaaaacaatgt

SEQ ID NO: 269277 - DNA, 426 bp, Homo Sapiens
  misc_feature (17)..(17): n is a, c, g, or t
  misc_feature (28)..(28): n is a, c, g, or t
  misc_feature (39)..(39): n is a, c, g, or t
  misc_feature (44)..(44): n is a, c, g, or t
  misc_feature (66)..(66): n is a, c, g, or t
  misc_feature (73)..(73): n is a, c, g, or t
  misc_feature (78)..(247): n is a, c, g, or t
tctgccctccccggatncaaagtgaatncacctgccctnagccntccccgagtaacctgggaattnacaggcnaaagnnnnnnnnnnnnnnnnnnnnnnnnnnnnnnnnnnnnnnnnnnnnnnnnnnnnnnnnnnnnnnnnnnnnnnnnnnnnnnnnnnnnnnnnnnnnnnnnnnnnnnnnnnnnnnnnnnnnnnnnnnnnnnnnnnnnnnnnnnnnnnnnnnnnnnnnnnnnnnnnnnnnnnnnnnaaaatttggaatgaggatagctcttgttttagaacatgcactttagtgaactgaaccttggactgatggttacaaggagtatgtaatgagctttcaggctatgagtcctaaatcctgaccctgtcctaaaagagaaaggaaatttccaaagtcttcatcgtagcaacgacacccactga

SEQ ID NO: 269278 - DNA, 445 bp, Homo Sapiens
  misc_feature (325)..(325): n is a, c, g, or t
  misc_feature (427)..(427): n is a, c, g, or t
aaaagtgtcaaaatagcactataaagagagctcagaacataaaagaaatgaaggaattcattaggaactcaaggaattaattacacatgccaaatttaaaaccacctctggatatacatcttaggacttttgtgaaatctgcattaatttctactacactaattttgaattcgaaataattcagacatgattgtgttgttactttttcaaagcatttgattttttaaaaaatcgtgtgaaatgtaaattgtttatttgttttaaaagtacatgtgtattacaaatatagatattaaaggaaattttaaagtgtcaaatgagaaantttcttattctggtgggagtgtggaaagtcaacacatcttttgtggcataggaggaaacacattcaatttacccgcttttgtgggtgttgcctcctcttgcntttgtattattgtccctt

SEQ ID NO: 269279 - DNA, 162 bp, Homo Sapiens
  misc_feature (135)..(135): n is a, c, g, or t
  misc_feature (143)..(143): n is a, c, g, or t
ctgagccactgtgcccagcctcccatctacagactttaagcagggtagcaattctattctgaagttcctgcacattatacgggcattaaaattgtattacaaattaaaacaaaagtcatttctaattaaaaaagngcattccnagtaaacaaaaggaggtgg

SEQ ID NO: 269280 - DNA, 376 bp, Homo Sapiens
  misc_feature (33)..(33): n is a, c, g, or t
  misc_feature (38)..(38): n is a, c, g, or t
  misc_feature (96)..(121): n is a, c, g, or t
  misc_feature (128)..(268): n is a, c, g, or t
aagggggaaagctttttaaaaaaataacataanccccnggggccctacccccaagatctgaaattaagaaccttttttaaaatctcctaaaggtgnnnnnnnnnnnnnnnnnnnnnnnnnngaagaannnnnnnnnnnnnnnnnnnnnnnnnnnnnnnnnnnnnnnnnnnnnnnnnnnnnnnnnnnnnnnnnnnnnnnnnnnnnnnnnnnnnnnnnnnnnnnnnnnnnnnnnnnnnnnnnnnnnnnnnnnnnnnnnnnnnnnnnnnnntctaaggtgattctgatgtgtgtattttggaaccactgtctcctagacagaaagcttctgtctcaaagatgatcacattggtgtaaagagcaaaacttgttaagtcca

SEQ ID NO: 269281 - DNA, 188 bp, Homo Sapiens
  misc_feature (11)..(11): n is a, c, g, or t
  misc_feature (50)..(50): n is a, c, g, or t
tggaagaaganaagaagatgtacatggttggaattattagttgctctctnggtttcagtgataggtacatacatacttatgtgtcttttggagatagagacaagtctgtgaattttgaaaagttttagaaatactttattacatcattgtgtaatgatttagaaggctgagtacaagaaggcaaagaa

SEQ ID NO: 269282 - DNA, 420 bp, Homo Sapiens
tttgttttgggctctatgaagggtgaggggatggaggagcccaggggtgagaataagccagtgggtggagtttcccgctgcttagcgcctccttgaggggcccattccatagacatacacagagggcctcctgcatgcctcccatgtgggtctcctcacgctccttctctctgcccccctgcactgaaaggactctgcagggcccagaacttcaggcttcctcatcttggtgcctgcctcccgggagaagccacggctgccttcctgattgataacacagcgctgacaagacaagtgctgctttgggttccagtggtcacaaccaagctattcttatgcttcccctcctcattgtttccactcgttcctaattgcacttacgcagagggctccagaagcagtaaacagacggccttctcc

SEQ ID NO: 269283 - DNA, 777 bp, Homo Sapiens
  misc_feature (44)..(44): n is a, c, g, or t
  misc_feature (131)..(131): n is a, c, g, or t
  misc_feature (155)..(155): n is a, c, g, or t
  misc_feature (159)..(159): n is a, c, g, or t
  misc_feature (225)..(225): n is a, c, g, or t
  misc_feature (228)..(228): n is a, c, g, or t
  misc_feature (230)..(230): n is a, c, g, or t
aactccttgctctgctgacctttcaaagcctgaaacaaactcancagggccatcccgggatgctgcaccttctggctggctccctaccaacgcctttccctgtaccctggcagcttctctcttggccccanagtcacagcactccacttggtcanaaanacttcagagcaataagaggcgtcctgagccttcagcacctcccaggcctgggatatcgggttccanagngngttgcagagcagcatgagggtggctccacccatgaggctggtgacactgacgctggcttggctaagttggctcaagccgggtctggcctgacagggtgcagtcacaccaggagcgcatggcagatgcagcctcagtgatgcctctcttgccgggtaggggctgggagtccccgtgcaccctgtctctggcccatgaggggctgcagcactgtgggcgccagagcacagattaaactctcaaacccacactggctcaggtgtccttgctctcaccttgcattggccagggtgatgccgtctcaccacgggtgggaggactcaaagtagatgggtaactggggttccaactccagagctggaatgccaactgcccactcccagcctggttcagaggaagatgttttgaagaatgagggaaagccaggcacaaagggaagccagggaagcaaagggccctggagtgaagctggtgggctgccgtgtcagagcgcccagggcagggagcagagctcagaagtaatgctggcccgggcgcagtggctcacac

SEQ ID NO: 269284 - DNA, 841 bp, Homo Sapiens
  misc_feature (45)..(45): n is a, c, g, or t
aaagacagggtctcattctgtcacttaggctggagtgcagtggcntattcactgcacccttgaactcctgggctcaagcaatcctcccacctcagtctcccaagtagctaggaatacaagcacacaccactttgcccagctaattttttgtggggatggggtctcactatgttcgcattgtctaatctcctaacaaacctggttatttctaattctgtgaatactgtttttgcaaaattcattattgaataagttggaggcctagatgttttctttttctttctagcaaggatttacatttgattctacaaggaaacttgagggagccagcgatatgatttcactttaatccaattttagttgctgagctttagtccctgtgagggaacaacttactagctaatttatctttactataatagtgcagacttttcagggtcccaactcaagacaaggagacacattcaccatgcatgatccttgcactctaagctgtgatttctcagccctgtgagcctatcaaaattactcctcaatctctgggcaaatacctcaaggggagaaaaaggcccccaccattcttagccccaactccaacccaatcctgtccaataatgctttactatttgctctagcatttcatatagacaatttctgtattttgtgcaggttttctagtcattctcactggtgatccaaattatctagtctgccattatcgggagcctagaccatcataagcaattatatttgtatcaatccgaatcttactgtctaaatcatctgttgctgacctttgaatgactgttgagatcagatttaaaagtgagctttgctagga

SEQ ID NO: 269285 - DNA, 183 bp, Homo Sapiens
  misc_feature (61)..(61): n is a, c, g, or t
ataagatgtaattaaactctccaaaaaactttatgctcttttttcaaaccctgcctaatantcacatgtgaaagccatgtgacccaattgttgctgcaccaaagatatgagagattcttttattaggtgggcattatttaaaacattttttatggaacagtaaggatattaaagtgtaagatg

SEQ ID NO: 269286 - DNA, 371 bp, Homo Sapiens
ccctaaagtgcctgggaattaacaggccgtgaagccccctgtgcccggccctgtccctctccttattgatggttatggtttaaaaatacctgagtccttatgttcctcatttgtagcctaaaataatacatttaaaaggatactttattccaatattttataaatttccttttatagggtagattaaataattataatctggtactatttaagagcctcatatgttcactattccctgaaaaagtgaataaagtctctaagtctacttatgaagtttatggaaacacttaacttgaattatgtggctaggaacaaaattagaagtgtattgttaaaagataatttaaaaataaaattacagtacatgcaaa

SEQ ID NO: 269287 - DNA, 461 bp, Homo Sapiens
ggaaaaacctctattttcctcatggaaccccgagaattattaaaagtggatagatccctctcaaaatctatggctctgttctgttttgcactgcattatctgttttttactttgggggtatcagaaattacttcacattatgagagaactttggtgtgtaatataactaggtaggaaatacatttaatacttttggggatggctaaatggcactgagggggatacttggatctttgtgtgtctggattaagagcatgctcttggccacctgggaaggtatggagatgtcctcacccttccccactgaggagataagactcccatgggggatgggctgatctcagaaagggctgattggctctggggttgcctgggcaatgaaatatgtggtaaaatcattgcactgttgtgttctgtagcgtttctctttgggggatccaggatcaatataaaaatgggac

SEQ ID NO: 269288 - DNA, 442 bp, Homo Sapiens
  misc_feature (222)..(222): n is a, c, g, or t
attaaatccatatttagtaagctggttaaaatgaatatttatactctactttgaaacttgtcaagtgaaataatgagaatacatatttatttttaaatgttagccagaatagttgaggctactgtcatttttggatagtttttcaaactgaagaaattgagaattggaactacttcttcaaaagaatttaaattcattgataaaagaaaaatagcataagtntttatttgggattgggcaccatatatgatgggcagggtttataaattaaatcttgcttgtgggtgggccatcaaactgaagaggaaagcagtgtcatctgaaggccacagccaccaccatttcctgccttctagccactctgttattctcctgggtcctgctaaattcataactaaggtgggcaagtgggtgatttggctcattttccttccatttgggt

SEQ ID NO: 269289 - DNA, 275 bp, Homo Sapiens
  misc_feature (37)..(37): n is a, c, g, or t
ggttaatcaagagtaacctggttaataccatagactnggctcaaaacttaaacttgaaacttaacacaataaattaaaccatctttgtaaacagtagaatttaaagagattcccttaaacattaaacattaggaccttctgtggtgtcaccttattcaaactaccactgtgttacctctttttgactcttaaggctgccagacaccctacttgaaggatcctgttggaacctgtggaaataatacttacaagaacgttgcagctaagctggtccc

SEQ ID NO: 269290 - DNA, 412 bp, Homo Sapiens
aagaatggcagtgtaacaccatgaactgacaaaatttcagccctctgtctttctccatgcttaaagttgagtgcttttgttgattctgttgctcacggcaattataaatgaccacttcataacacatataggtcatactgtaatatttaagaattgtgagcataaactttacatttcatgtgcatatttcctcatgcatcacacgtatctaaagccctgaaaagtagtgatttggacttacccccagtgacttaatgttgcttccccagataaccacgtgataagtgttttaagtcaccaagagacagctttgacagcctgttcaggaattcaaaggtttgtgtcaccaagtgtaggaggaaccaacccaggaagtaccgagggagttgttataatggttccaaatactagg

SEQ ID NO: 269291 - DNA, 532 bp, Homo Sapiens
  misc_feature (40)..(40): n is a, c, g, or t
  misc_feature (84)..(84): n is a, c, g, or t
  misc_feature (362)..(362): n is a, c, g, or t
  misc_feature (420)..(420): n is a, c, g, or t
  misc_feature (424)..(424): n is a, c, g, or t
ggtagggagccagccagaaaggtgcagcatcccgggatgnccctgctgagtctgctgtcaggcctgtgaaaggtcagcagagcnaaggagcaggcaggagagctggaaccccgccccagaaccttggcgagctggtgccctgcccaagtcctgctggcccactgaaagagggaaatcccgggcaaggcaggtgacctcctgggccaccagtctctaacccctaccccagcctagggaaggggaggacaggaagagactggatgctttgtaaaggacttcctgttcttggggacataactctcgtcccctcccagagccctggatgactgacaggcattccttggccaacacatgcttgaagnccgctgctggctgcagggcacctggatgacaggcattccttggccaacacaatgcctntcancgcgctgccggctgcagggcacagaggctccttcagtggaattttgcctacgacacagagcacagctattaatacacttaaaattcaaatccattgcctgacacagtt

SEQ ID NO: 269292 - DNA, 468 bp, Homo Sapiens
  misc_feature (40)..(40): n is a, c, g, or t
cccatccccattcacccttccccttcgcccgggtaataanacaaatgaaaatcgtgggtgacccacagccagccaaaaatggtcctgacaatgaatatgccaataggctgggcatactggttgagtttccaaatatatttcccagcacacaggcaatccttaggcgttaatatgaaatcaagatttggatcttgatgcgaacaatcttatccttcacacagtttcattctattcctgatgcctccctttgaagagtagttgagagtcatctagggctatgactaccactcgggtagcaggactcattcctttaataggatcagcagtgagttggggtacttgggaatggagccatcggggttagggaaagaggaatgccttaattcataagatattcactaatttttacataaagggaaaatacatttttcttcattttttcaaggcacttaataaaaacataaattg

SEQ ID NO: 269293 - DNA, 453 bp, Homo Sapiens
  misc_feature (21)..(21): n is a, c, g, or t
  misc_feature (33)..(33): n is a, c, g, or t
  misc_feature (46)..(46): n is a, c, g, or t
  misc_feature (59)..(59): n is a, c, g, or t
  misc_feature (122)..(122): n is a, c, g, or t
acactgttgtagcttcaaaanggaagcgccaangttaatgggaacngaacggccaaganttctggagtaacttccagcgcttgggagtgaaacattaaaacaattttccccaaaaccctcanaaaaccattgagatacagtaataatgtcagctataacagcagaccaagtcccacccccaacaaaatcaaaaggttcctcagtttgtcacctcctctctgcttctaccactttgagttcaaaaataacatctttgttttgaaatactaaagttaaaataaaattaacatttctaccactaaactggcttcttatattactttacataatagattagtaaatcatttaaaatgttacagggtaatataacatttatattttaatatatagccatgttaggtaaccacatattttaatatttgcttaaatattccaaagatagattaaaatgtt

SEQ ID NO: 269294 - DNA, 623 bp, Homo Sapiens
  misc_feature (151)..(151): n is a, c, g, or t
  misc_feature (487)..(487): n is a, c, g, or t
  misc_feature (600)..(600): n is a, c, g, or t
tgctcctgcgattattcaactgacgggctttcatttccatttcacacaccctagcaacacttataccttgcggaattgtattggtagcgtgaaaaaagcacactgagagggcaccatgccggtggaaaggatgcgcatgcgccagtggctnggaggagcagataaactccaacacgatcccggggctcaagtggcttaacaaggaaaagaagatttttcagatcccctggatgcatgcggctagacatgggtgggatgtggaaaaagatgcaccactctttagaaactgggcaatccatacaggaaagcatcaaccaggagtagataaacctgatcccaaaacatggaaggcgaatttcagatgcgccatgaattccttgcctgatattgaagaagtcaaggataaaagcataaagaaaggaaataatgccttcagggtctaccgaatgctgcccctatcagaacggccttctaagaaaggaaaganaccaaagacagaaaaagaagacaaagttaagcacatcaagcaagaaccagttgagtcatctctggggcttagtaatggagtaagtgatctttctcctgagtatgcggtcctgncttcaacttttaaaaaatgatgt

SEQ ID NO: 269295 - DNA, 634 bp, Homo Sapiens
cctggttctactgaacagcttgaggaaactataaatgctggaagaatggagcatcagcgtaagaaaaatatagaagactgagaggctgcaaagtcaacaggcagagggaagctgagtgcctcattttcatctgacgctccaacaaagtccattcctgtaaacagctccctacgtaaaggttgtaataaatacaggtatttctgactaccctttttgggggggagataaatttggaccaaagtttatagcatcagaacaactgaggtttctattccccgggtaacacccagggaacttcttagaataccacatttataggaaattgaaggactaagagtgtatgggatgaggggagcattacttctgagggctgcagtttgtaccccatgtgtcctggatgtgcctagggacaagtcacaggtttttcagagccatcttcatgaggtcataagccaggctattttatgtgtaataaaaacaaaactaagcaagagtgccttcctctataaacgccgcagggagttttagtacctgtatggattgcccagtttctaaagagtggtgcatctttttccacatcccacccatgtctagccgcatgcatccaggggatctgaaaaatcttcttttcctg

SEQ ID NO: 269296 - DNA, 529 bp, Homo Sapiens
  misc_feature (50)..(50): n is a, c, g, or t
gtgtctcaaagaaaatgcatgagagcaatgcaatggaaagtgtccagttngggaggggagctattttcactaggatgccaacaaaggcttccctgaagactgggcatttgagctgagacctaaatgtgaagatggctgggagctggtgtatggagcatagggttcgctagaggaaaggcagctgtaaagacccaagtcaggaatcaagtgtccttgtgttggaaagcccaggaggaagaccagagtggctgaagcattattagctgtagagagagagtagattatgaagtcaggagattggcagacctcaaggcgtgcagagcagggcagggagtgtggatgccgtggtgttttcagttctttgcaatcaatattttactgcctgcagcccattttcttttacagcctgtcttcttttccttctgctttgactcgagtcttacctcataatgggcattttaatcctctctgtgatgcaatccaatgcttcttgctgggcaccttgctttattccagctcagggcagcat

SEQ ID NO: 269297 - DNA, 444 bp, Homo Sapiens
  misc_feature (417)..(417): n is a, c, g, or t
  misc_feature (422)..(422): n is a, c, g, or t
tgacaggcccatcttggagtcaagaaatattgatttcttccttcagcctggagactctcatgtgacaggaattccagggacagtgcaggcacaagctaaagcgtctatgtattgacttgggtttacatggctgctagaggcaactggcaccatccaccacttcaggagtggctgccactctgtatttgttatgactacggttttccagctactgtctgctgttgacctcccaatgtgacagctaaccaatgcaacaaactaagtaggctaattaatggcagcgagagaagtctccctgccccacctgtgttatacaactgcactggatggtggtgatctgctcttttcaaaagcagctagaagtaaagacccatgtgttcacttgccttcgtactgaacagcagttggaacccagtnagggncagttatttttcttcctgaatt

SEQ ID NO: 269298 - DNA, 625 bp, Homo Sapiens
  misc_feature (100)..(100): n is a, c, g, or t
  misc_feature (425)..(425): n is a, c, g, or t
  misc_feature (557)..(557): n is a, c, g, or t
aaaggtaatctatggtaagtagatactatgagaattttcgtgcccacaaagtttaataatcctcccatgtttgtataatgttatttcccacatcatcttnaaacgaagcaatcacgctgaatacttttccagtgcttgtctgtatattcaatgtaattcccaggagacagttcttcaggaaatgttaaagaaaatgtttctctaccggagaggcccaaggaatctgcattttctcctggaaggaactgaagtggagctatgccaattccaatcaaatgatctttgtgtattttttcataactttcggccaaaacagctttcacacccagtaaatacggtcctttggcagcccagtctctggagtttcctgaaccatatttctttcctgctaaaataatcagtgggataccttctttctggtacantctgcagcctcaaatacatctagcgtctgtcctgatggaaaatgaattgttttaggagctggttttccaataaacttattaaaaagcttgatatttgcaaaagtgcctcttgtcattacagcatcattaacncttcgagctccgtaagagttgaattcacgaggggtaaggcctctgtttgtcaaatactttagggcagc

SEQ ID NO: 269299 - DNA, 565 bp, Homo Sapiens
  misc_feature (26)..(26): n is a, c, g, or t
  misc_feature (37)..(37): n is a, c, g, or t
  misc_feature (46)..(46): n is a, c, g, or t
  misc_feature (64)..(64): n is a, c, g, or t
  misc_feature (79)..(79): n is a, c, g, or t
  misc_feature (104)..(104): n is a, c, g, or t
  misc_feature (109)..(109): n is a, c, g, or t
  misc_feature (148)..(148): n is a, c, g, or t
  misc_feature (173)..(173): n is a, c, g, or t
aaccggaggccggcccgctttccatntggaggcactncagggcttntaaaagcggcccattccnaggaccttggaaaancccccccagagaccttcgggatgcnccaancccggggcttttcccctgaaaacctggaaccccttgccnaagtttgtgaatggggtcccagggncaggccccatgccctcagcacgtgctgacacgctccctccggctccaacaaccacaccagaaccttccgtagaacatttaagtaatgaagtctcaacattacagtaaaaaggtgcaaagggtctcttttacaaatatttatgtacagccaagatcttgttgagttcagtatagccatctgcgcgtacacatacgcagtgtgcacacggattcagggaactgagcggcacactgaagacgagatcacacgtgtgcacacggattcggggaactgacggcacgctggaagacgagatcacacatgatgctattttacttttgatcccatgtgctttcctgggcatgatattttagatggaactttttctggtctgtgatctttggtagaaaaaa

SEQ ID NO: 269300 - DNA, 372 bp, Homo Sapiens
taggatgaatgaaatgtttgcaaaaacaaaggtaactgaaaatccagaggatgaaatctccaaattctaggccaccaggaaaactgttgattaggagcttgaaaataaggaatgaatgaacttatctctgaaaagtgagcctgacctcactccattgtgggaagtatcctcttcctcggaatgccagcctgagcattgttcttcctctgtcaacccacccactctaccactttaccctgtaggaggctcaaatacatgggaaaccaaaggaaagtctgcctatctaaattacccactcctcttatttcccatcccatggacaccatctggctgaggccattaccacaggacacattaccaacaaacaccggg

SEQ ID NO: 269301 - DNA, 469 bp, Homo Sapiens
  misc_feature (366)..(386): n is a, c, g, or t
aaaagaatagaatgcagcccaaagcagatggagggaaatgacagtccgcagtcagccaggcctcaccaaagaatacaggccctctgccaggtccctcctacccctggagaaatcctgagtcttcaaattgcccaactcccctggactggtcctaagtatttttctgcccagcgttggaatccagcctcacaacaattcccctaagcaatttctcagttcctctcacttcctctggttccttctcaacagccataattctttatagaaataagttttgcaaagccttcatgttctgacatgacctagagcctcagacttcatgtttaccccatggctgacctcagaacagccgggggaatcagaatnnnnnnnnnnnnnnnnnnnnntcttcactctaataagtaaaactgtctcagagttgaagccagctgcccaacccacttgaaacctttctttgacagctcaaatg

SEQ ID NO: 269302 - DNA, 450 bp, Homo Sapiens
  misc_feature (28)..(28): n is a, c, g, or t
  misc_feature (366)..(366): n is a, c, g, or t
  misc_feature (373)..(373): n is a, c, g, or t
ggcagagaacagacgcaccctgctattngcaagcaaagcacagatggagtgaatttaaagagtcctttactaaaggactttgtttcaggacgaaagcagcacagagcccacagggtgtgggagatctgagatctggaactgggatctctgggctctgaacttgttctgttgggcaatctgctgatggagaccttgtcttcgagtgtcaggatgcacactgtggtcagctccccctaggttgcaaagggcattctatctgggacttgtcttccctgcccatctgctctccttttcaacagcttcttggttcttttgaaacctatgctgtcttcccaaagccctacctcctattgtgttggcctcctngtaagcncatgctttcatctgtccagtcctgctcttggtgggatgaacgagaggccttctacagatctcaaggtggatgaagta

SEQ ID NO: 269303 - DNA, 482 bp, Homo Sapiens
  misc_feature (32)..(32): n is a, c, g, or t
  misc_feature (49)..(49): n is a, c, g, or t
  misc_feature (70)..(70): n is a, c, g, or t
  misc_feature (143)..(188): n is a, c, g, or t
gagtagccggggacctaacggcctcaaggccnactaaaccccggcctantttttgggtttttttggtaanaagaatgggggctttgccccatgttgccccccggttggatcttggaatcccccgggccccaagtggatctgcnnnnnnnnnnnnnnnnnnnnnnnnnnnnnnnnnnnnnnnnnnnnnncacccatccccctggccaagaaacaaagttttaatttcaaaaaaatctacaaaaacaggataggcattgtctttcaaatgttcagaccccagtttattaaaggatacttcaaatagttggctaaattttatgatctctcccgttgaaaagtaggtgatgattttaatgtgacatgcacaaaaaatccttgccagtttacttctgcaatttaattttagcctttactaattacccacttctgtttaattccaatttttaacagcaggtacataaagcattatgtgcacaatggaa

SEQ ID NO: 269304 - DNA, 480 bp, Homo Sapiens
  misc_feature (71)..(73): n is a, c, g, or t
aaaaaacctaccgattaaactgtgacacaccattgattgtaagacacaccctgattggtgaggtgtaaaannnggggaaagtggctctcttagaatgaaatatcttagaatgaatttgtgtgagtcaggggcaggtgaaagtcattttgcaggattctaatggcttctccatacacctctctccgaagaaagaaaggacttggggtgttttgctgactcctggcagcattcttggcccaatgtattctggggtttgctcttccccgttggagagcccttttgccagagaacagccgctggctttgttgagccaggaagcttaccatgtgagttgcagcttgtgtctgaagaggctgggccagtacagataatacgaatcacatttcactggcttttttgatcggctgttttagctcctgggcagcttgttcccagcatttcatgttttgctggttgagtagggaaacacaaagaacctcg

SEQ ID NO: 269305 - DNA, 339 bp, Homo Sapiens
gcttgttcccagcattcatgtttgctgtgagtaggaaacacaaagaacctcgtcttcagaacgagaaagacttggggctggattcctagctgtgcccgtggctggcttagtgcctcatgattgtggccctgtgcagaccactttgcctccctcagtctcagtttccccacctatcaaaacggatattcattcctgccttgaatgtgttatgtaatgattaaggaaaataaaatgcaagtgttgaagttgatacaggatctttatttcattccagaaaactctgtaaagtttcctcatttaaaaattccttccttctgtggccgggtgtggtggctcaca

SEQ ID NO: 269306 - DNA, 400 bp, Homo Sapiens
  misc_feature (178)..(179): n is a, c, g, or t
  misc_feature (181)..(181): n is a, c, g, or t
  misc_feature (239)..(239): n is a, c, g, or t
acaagtaaggtttcagagcaacacacatgagaaagagagtaacccggaattgtacttgtcaagcaaaatctatactcctattggagtggatgctgatgaacatcgaacatatctacttcattagagcagaggctatttttctgcattcttgtccctataacagggatgcttaattttnntnttaacttagagttttaaattgccaaacatgggaacagccttgaataggataaattttncagagggctgcctaaaatattttatttctagcatcctgattctggacttttcattataattctgagcaggaaatttataagaaattgaaagagcagaaggaattacagccctgttcacatgttgcccagcactccgccccacgccgagccctatgcagtct

SEQ ID NO: 269307 - DNA, 419 bp, Homo Sapiens
  misc_feature (15)..(15): n is a, c, g, or t
  misc_feature (42)..(42): n is a, c, g, or t
  misc_feature (52)..(52): n is a, c, g, or t
  misc_feature (62)..(62): n is a, c, g, or t
  misc_feature (68)..(68): n is a, c, g, or t
tagagatgggggttncccccatgttggcccaggctggtctcngaactccctngaccctccanggtgantctgcctgccttggccctcccaaaagtgctggggatcccagggtgtaagcccacccgtgcccagccctaaaacgtatttaaaatgttattttgttcccttaaaaatacttattatttttgcttagtgcaaagataatgtgtgtttatgatgaaaaccctgaaaatgtagacaggtataagaaatagtccattaactaatcacccagaaataaccattgctatgcattttcttttggccttttttctaagtacatatatttaaaaaataaaattagaatgctattgtattttttaacttcatgttttgtatcatgagcaaattccctcctaataaaagttatacatatttta

SEQ ID NO: 269308 - DNA, 533 bp, Homo Sapiens
  misc_feature (15)..(15): n is a, c, g, or t
  misc_feature (55)..(55): n is a, c, g, or t
  misc_feature (510)..(510): n is a, c, g, or t
gattccgaatttaantcggactcacctatagggaatttggcccctcgaggcccanaattcggccacgagaactggagataccaatgaggagtgaaatatatagtccctctctgaaagcttgtgcatcatacaaaacagtgcagataatggtaaatgcttttgcacaaaaccccataagacttagaggcaagcagaaatgacgcaagtatgaaactcaagctggctgcccgctgtgctttgagtaatgaagtcccttgtctctgatccaggaagctcctgtcttctgccagcatctgtcagcaggctaatttgtcagcttgcaaatagggagacatctcaggcttgtcacagttctttacagttactagcctcatgtggctatttccaattaaaattaaattttcaagtttaaaatggcagttcctcagatgcactcatttaattaaggcgggccgcaagcttatttcccttttagttgagggggtaatttttggcttgggcactgggccnttcgtttttacaacgttcgtgga

SEQ ID NO: 269309 - DNA, 578 bp, Homo Sapiens
  misc_feature (142)..(142): n is a, c, g, or t
  misc_feature (532)..(532): n is a, c, g, or t
  misc_feature (550)..(550): n is a, c, g, or t
  misc_feature (561)..(561): n is a, c, g, or t
cctgtgcctgccaaggcgaattaagatggggtaaacgccccgggttttcccccagtccacggacgttgctaaaaacgaacggcccagtgcccaaggctaaaaattaacccctcaactaaaagggaaataagcttgcggccgncttaatttaaaagtaataatcacattttttaaagttccatgtcttaggacattataatcaattttactcttcatgaaaaaactgttacataaagaaatgcactctaaaaccacaacagtgaagtacctttctcgcctagtaagttgggggaaggagaaaacagcactaatacccaatctaaaagaatacagtgaaacagtactagtaatactatccttttgagaagcaatttaaccacatttcaagattaaaaaactctcatatcctttgactcaaaaatcatacctggggaacctaccttaagggaaataactaggaaatatgaaggaaatccatatactccaaaggtgttttctggcactcgtgccgaattcttgggcctcgagggcnaaatttccctattggtgngtcgtattaanttcgtaatcctggtcct

SEQ ID NO: 269310 - DNA, 464 bp, Homo Sapiens
  misc_feature (122)..(130): n is a, c, g, or t
ccccagcagaagccacctaagaagcctcccaaccctatcaccctagccagataaaacctatggggaaaaccttaaaatccggtgccataacatttccgggatggcatttaccttatcctttnnnnnnnnnggaatccctatgacctgatttggccacaaaaataatcttgctgtacaatacaatctcttggaaattaagagatcctatggatttgatgactggtattagaggtgacaatgtaaccgattaacaacagacagcaataacttcgttttagaaacattcaagcaatagctttatagcttcaacatatggtacgttttaaccttgaaagttttgcaatgatgaaagcagtatttgtacaaatgaaaagcagaattctcttttatatggtttatactgttgatcagaaatgttgattgtgcattgagtattaaaaaattagatgtatattaaaaaaaat

SEQ ID NO: 269311 - DNA, 429 bp, Homo Sapiens
  misc_feature (271)..(271): n is a, c, g, or t
  misc_feature (353)..(353): n is a, c, g, or t
  misc_feature (401)..(401): n is a, c, g, or t
  misc_feature (413)..(413): n is a, c, g, or t
tgagtgaccttggggatatataagtatttgatacagacttaatatgaggtggatgcaaatatcactgataggtgagtgtgtgctgcaaaacgatacagagtccatctgtgtttgagtaatgataattatcaaatctcattggaagtttttcagttattgaatggaataatatgcagttcttctcttaataaaattaattcaaggcatactttatattaaacaatatatttggggaaggaacactaccaacaaatttaccaaaacaaaaaanataatgtcacaggctctcggggggtgccagcatttattggattacacactacatgttgtttacatacattcatttatataantgctcattttaaaaaatcttgggcggatattgttggggctactgcttnacatttcctccnccggggggccttacct

SEQ ID NO: 269312 - DNA, 423 bp, Homo Sapiens
  misc_feature (13)..(13): n is a, c, g, or t
  misc_feature (45)..(45): n is a, c, g, or t
  misc_feature (181)..(181): n is a, c, g, or t
tcctacaaaaaangaaagtaaatgaaatgcctagtattgtatatncaaaaatatgccatattgacaatgtcatacgatttgaccctaacaaacccattccattgtgtatgttacttaaatctgcaatttgaactgataattcagaagaggaaggatcttttttctaaatttttttggtctnccaaatgttaagtcacaaaaacaaggaactattagtaacatagtattgtgagctaaaatatgtgctatatatatatatcatgagaaaccctttaaaaggttttcttttcagcaagtggattgttacagagcatttaaaataatttagaattatgtttaaaatttatctgatgacaagttctttccttttgattattttattcctttagatttgattaattctgtccaatacttgtttaacct

SEQ ID NO: 269313 - DNA, 643 bp, Homo Sapiens
gcaccagctttcagtgtgcatgttccttggacacctgcctcagtgtgcatgttcactgggcatcttcccttcgacccctttgcccacgtggtgaccgctggggagctgtgagagtgtgaggggcacgttccagccgtctggactctttctctcctactgagacgcagcctataggtccgcaggccagtcctcccaggaactgaaatagtgaaatatgagttggcgaggaagatcaacatataggcctaggccaagaagaagtttacagcctcctgagctgattggggctatgcttgaacccactgatgaagagcctaaagaagagaaaccacccactaaaagtcggaatcctacacctgatcagaagagagaagatgatcagggtgcagctgagattcaagtgcctgacctggaagccgatctccaggagctatgtcagacaaagactggggatggatgtgaaggtggtactgatgtcaaggggaagattctaccaaaagcagagcactttaaaatgccagaagcaggtgaagggaaatcacaggtttaaaggaagataagctgaaacaacacaaactgtttttatattagatattttaaagtaaaatatcttaataaagttttaagcttttctccaaagaaa

SEQ ID NO: 269314 - DNA, 550 bp, Homo Sapiens
  misc_feature (34)..(34): n is a, c, g, or t
tccccacagtacccagaagaagaaagacacagantgaatgtggcagctgccctgaagtcctacttttggaattacagattttaacccttcatggaaacccaaacaatacctcccagctcttggtgtagaaacactccctatgtctttataatgttattttctcatgtaagatagtttaagtaggtttctgctgcttacaagctgacgtatcttgttgaatacagagatactttaaaactcctcccttaacacacacatacacagaaattcttgaaatttgcaggagtttggggtgaggagcatctagcaaggaacatggagttgggaatggttgaagcattgctgctgggatctattaaggctctgagctctccatgaaaagtattggctttctctttgatggcctttgctgtattggataactcacctacaaaaatgacttatttttaatgtagaactgtgataaacttcaacattttgatgattatcatgctttaaaatgagaataaagatagctattatattttttaatttgacagagtagtgcagg

SEQ ID NO: 269315 - DNA, 436 bp, Homo Sapiens
  misc_feature (22)..(22): n is a, c, g, or t
  misc_feature (29)..(29): n is a, c, g, or t
  misc_feature (47)..(47): n is a, c, g, or t
ctcaaaggccaaccctcccccnggaccgngtccccaccctggccctnccccctcaggtggatgtccaaagagcgttcccctagcaaactccccccaaatgcccaatctcccagccttagattccggctttctggggaaactgaactgtgacagttacctaatacaaagaatcaataattttatgtcacattatacttagatagcttgaaatatatatgctcatccccacctcaatatttcagccttctggatctagttacttaatacattattaaaaaactttttactatatcaaaaattactttttaaacgttttagtaactgtatttcaagataattttctgtgttatcctatgccttttattttatgcatcttaaaacatcattctgagaaggacctataggctttatcactgccaaaggagtccatggcaat

SEQ ID NO: 269316 - DNA, 716 bp, Homo Sapiens
aaccgaaattcagtcttttcttcaactgtgaatgtaggcagcaagcacagtggaacttgcagaacctataaatttgtcactgtgattgatgttataatgttacacctagatcttctttcagaaatgaggacttaccccagctactatgaaagctgttggcagagtgccctcagctggcagccccagggaaatggcctcagttgcagagagccacctcagctgggtaataaacacctggccctctttgattcagggcacttctgaagggtcatataatcttcagaccttctgtaaggttggctgaagcttcctctcagacttcatcacagctcaatgtcatccttctctgaccagttccaccttggccttccctcatgttgatgtcaagagcgttccctagcaaactcccccaaatgcccaatctccagcttagattctgctttctggggaaactgaactgtgacagttactaatacaaagaatcaatatttttatgtcacattatacttagatagcttgaaatatatatgcatctagttacttaatacattattaaaaaactttttactatatcgaaaattactttttaaacattttagtaactgtatttcaagataattttctgtgttatcctatgccttttattttatgcatcttaaaacatcattctgagaaggacctataggctttatcactgccaaaggagtccatggcaa

SEQ ID NO: 269317 - DNA, 448 bp, Homo Sapiens
  misc_feature (46)..(46): n is a, c, g, or t
  misc_feature (161)..(182): n is a, c, g, or t
aagccacagtgggcaccctgcccctgtaaacccccagcctactccnggagggtgaagccatgaagaaactgccttgaaccccgggaggcggaggttgcagtgagcccgagattgtgcccactgccctcccagcttggacaatagagcaagatttcgtctcnnnnnnnnnnnnnnnnnnnnnnccattattttgcaatagcccaatgttataatctacacaggcacagactatcaatgctaaaaatcatttaaaagacatccttaggggtaattacagaaatttgaatatagaacacatatgtaataaaattcattttcttaggtatgattacaatattcttgttatacagaagaaaaaccttattcttgggagatgcaaactaaaacattatgggttgaactgtcatcatgtgtatggttttcagatgctcaacaaaagtgtgtgaga

SEQ ID NO: 269318 - DNA, 517 bp, Homo Sapiens
  misc_feature (20)..(20): n is a, c, g, or t
  misc_feature (124)..(124): n is a, c, g, or t
  misc_feature (435)..(435): n is a, c, g, or t
  misc_feature (445)..(445): n is a, c, g, or t
  misc_feature (451)..(451): n is a, c, g, or t
  misc_feature (504)..(504): n is a, c, g, or t
cgtccctcccccaaagtgcnggggttaccaggtgtgagcccactgcaccccagcccaaaatgatggttttcctgattcctagcatttccttttataagattgcctatgtaaagcacagcttttnctttttttagggaaaaatgtcttttaacagctgcaaaataaatattctttcaatggaatgacaattattatttttgccatatatttattttaaaaatttatgtataatggtaacctgagcctgcatgttattcatgtgtggtgccatactgatctttaattttaatgtgaagcaagtactaatatagtaaagcataaattatataaaatttgctttatattttggattgcaaattaattgctgtactttatagaaaagtttcccaaatccgttttacttttttgtatttggaaatttaatcacaggtgggnatcttaaagngggccntttagggggatattggtaaaccgggtgttattaaggggcctaatggttaaccnaccttgaggaggg

SEQ ID NO: 269319 - DNA, 476 bp, Homo Sapiens
tggctgtatatagctttatttttagaaattaattcacacaattgttggggttggcaaacttcaaatccatagggcagactagcaggctggaaactcaggcaggagtcgatggctatagtcttgaggcaaagtttcttcttttccaggaaactgcagtgtttgttcttgaggcctttcaactaatcaggtgcagctcacccaaattatttaagtaatctctttcacttaaagtcaactgattgtaggatgttaatcacatctacaaaataccttcacagccacacctaggattactgtttgattaaataactgtgtgctatagccccaaccaaactgacaaataaaaccaaccatcacatccaccaaatcaaaactccaggaacaaatgtttaaattacaagcattaagattcttcactctgaagaagctttcttggtgcatttagcctgtttccctttgcaaaactttcatgtgca

SEQ ID NO: 269320 - DNA, 446 bp, Homo Sapiens
  misc_feature (434)..(434): n is a, c, g, or t
gtcccctccctcctctcatgcgatccaggtaattatgcagttagtgccacagtagactagcctagcaaagggtttgctccttgctgtctctgactgcaccacacagctattgatggcagctgaaagaaagtggatcatgccttaattttaaatattcctgtcctctggttattattttaaggaacttcatcatgttaaaatgacagcattcaaaggtgtaccacaatcaatttatcaaggaaataaaggctattgtaaccagagatttaatgcattcttctaaatgtaaatttaaaatttgccctttaaaaaagtccactttccccatatggcaaatgttaatagggtttttatggggggttaaggaggcgggcaaaactacaggaggcaggatttcaaaggtaattttaaaaaatacacacccgtttttaatncaggggaggtgt

SEQ ID NO: 269321 - DNA, 544 bp, Homo Sapiens
  misc_feature (430)..(430): n is a, c, g, or t
  misc_feature (439)..(439): n is a, c, g, or t
  misc_feature (532)..(532): n is a, c, g, or t
agccacccaaagattagggagtaagcctttagtttaaatgttcaatttaagtattgtcaagcctaggctaaatagaggactgcattttcttagagtgtggaatacaacttatttatttcatttttgtttctctttatcttgctcttctttttgtcagcaaaaaggggaaaagctattcaattaagtacaaaggaaattccctgtaagggttaaaataaaaaatgaagctaccattcaagggaacttctctgtattcaaccctaatgtcagtgggtttatcactgagttggaattaagtgaatcaaagtctctatcaagcatactccacctaggcataccatctgtacctgtaattcatttagagcccagatgtgtgcagttcacacctaaatgtacttgttcaagccagtcacttgagggtttgagggtntttgacctngaaacatctgaaccatctcctctgttgggctgcctcgttaccactggtcaccaggcttgaggatgctgcttccccccgccaggaatattttcntcccaaggggtt

SEQ ID NO: 269322 - DNA, 228 bp, Homo Sapiens
  misc_feature (182)..(182): n is a, c, g, or t
  misc_feature (193)..(193): n is a, c, g, or t
  misc_feature (206)..(206): n is a, c, g, or t
tccgctcagatcactttttaattgagttgttttcatgtcattggggtttcaagagccatttatattgtttaggatatgtgtcttttatcaggatttatgttttgcaaatattttccccagtctgtgggtttgtcttttcattctcttgaagggtgtctttcaccatttaatatttcaaacanggaatctaggncataggacctttnctttttcccctaaaaatttaac

SEQ ID NO: 269323 - DNA, 123 bp, Homo Sapiens
atgaaccactgcacccttttcaacaatcttaatgatgtcttttgatgaatggatgttcttaattttaataaaatctaatttatcagtcttttcctttaaagcttatgctttttgtgctccact

SEQ ID NO: 269324 - DNA, 506 bp, Homo Sapiens
  misc_feature (15)..(15): n is a, c, g, or t
  misc_feature (25)..(25): n is a, c, g, or t
  misc_feature (40)..(40): n is a, c, g, or t
  misc_feature (50)..(50): n is a, c, g, or t
  misc_feature (83)..(83): n is a, c, g, or t
  misc_feature (90)..(90): n is a, c, g, or t
cgggaaaaagggtgnggctagcatnccccttggagtccangaggacgganggtgtgaaaacccatcctaagtttgcctttggncccatcnaccctccccagtagcaatttgcctttccataatcccatttaggcaatcccaggcctctgttgaaaagataatatgagggagaagggaacacatttccttctgaacttacttccctaagtcactttccttatgtatcatctaatacaatgatggttgagtgaaaatacagaaggggtgtttgagtattcagatttcataaaacacttccttggaatatagctgcattaacttggaaagaagcctgttgggccagaagacagaaactccaactggcaaaaaagcaagcatctaagaaaaaaaaccaccaaagttcttgaatttactatatttaaatgcattggttaagtttattttgctaaataaagtgaactgctttttgtctctaaaatgatattctaaataaaaccttaactttc

SEQ ID NO: 269325 - DNA, 616 bp, Homo Sapiens
tagtatgaacacaactgtaacatttacctggtatctacatccttacctgcattggaaaatgtttgctacctcacaacaaccatttgcctcctttaagaacactgatggcctgcactttttggatagaaatagaatttgatttcagaatgtatgcttggtgagtctcagtgcccaggaacacttttggaataatttatcagacattgaacttctgtgattaatcgcttttatagatttactcagtctttaaaattcgtctctgatttgccagagaaaaacggtggtagccatggaaatcgggagtgaaggagcactgcttcattgtggctcagcccttcctaggggcctctgccctttgatgtccttgagctactcttcagctctggaagttgtggacaaaccgtaggaatgtatgtgtgcgtgtggtggagtgattgtctgtgaatgacaggccctggctattgattgatgttgcatcaatttagcaaattcatttcctcattcttgatggcctgaatatatgtctgcacttttaatgctcctcttaaccagttgtaacatcttaccatttccctaacaaattgaattagtttaataaaatcttttgacacatgtt

SEQ ID NO: 269326 - DNA, 322 bp, Homo Sapiens
  misc_feature (35)..(35): n is a, c, g, or t
gctttgttaaatgtttacaagtaaatagtttgaantcagtaaatattatgggctgttgtattgatcaatggcatgttaccccattcaaccattttatagactaccaaattcttttatgttaactagaatgcttttgttaaaagttatttgttcattatttgtgctacccctttgattatgcagacaacctcatcagctgcctaacttatccatctttgaacttctgactacttgttgtatctgctggatatttagttcaactgtatagttttatttacttctgtatgtgtatttttgtgaagtattcacaaaggttaagtta

SEQ ID NO: 269327 - DNA, 333 bp, Homo Sapiens
  misc_feature (308)..(308): n is a, c, g, or t
  misc_feature (320)..(320): n is a, c, g, or t
ttgctacagttttgttataattagcaaataacttggatatctcttagacttctcatattttccacatagtttccaacaaatctgcatccatattcacaaatttgtaatgatacaaatccctgggctgatacatttgaaaaggaagtctgtgcaaaatcataaagagaataggattgaatattcctatcacactgtattggaggggattgattaacacatttagaagagattcttacctcttctaaaacacaaggctgatttttcaacataagtgggatcaggaaatccctgttgacctcttacccgtntttaaacacaancccttttggaacc

SEQ ID NO: 269328 - DNA, 507 bp, Homo Sapiens
  misc_feature (421)..(421): n is a, c, g, or t
  misc_feature (472)..(472): n is a, c, g, or t
tagagtcctcataactcaatcacttcttagagggcccatctctcaatactgttacactgggaattatctttcaacaagaattttggaggggacaaacattcaaactatagcactgatggaagatgttttcatcatgtcttctaatctttagatgtatgccttttattacagtagtcacttcttttctggtacgccatacttctcagctaatgagattttggactctatcttgaactgcaatgggttgagatttgggggacctcagaatgatacattagtttcctgcggctgctgtaacaaataaccacaaactggggggctttaaacaggaaatgcattatcagtctgggagggccaggaagtctggaaattcaaaggtatttaggcaggggacatactccctctgggagggcccgggganaaggattttgttccctggcttctcaatcatccggggggctaccgggccttncctgggcttcttcggtttgtgggccacatcactcc

SEQ ID NO: 269329 - DNA, 424 bp, Homo Sapiens
  misc_feature (42)..(42): n is a, c, g, or t
ctccccccgggtgtaaaagctgcctggccccctgccccctgncccctgccccttgccaaaagtcccccctatgtcctgaagccccccagtgcccttcctgttcgggcccctccctttggtggggaaaagcagacccctgacccttgaatggttgtccttgactctgtgctgctgccttctgcagagaggcaccctaagctgtttaaagagccccagtgattgtggctgctcctcctagaggtgggagggggcaagaggcctccttggtcagtgtccatgctttctgggcagggacttggttttttgttccaacagtggccttctccgggcttcatagttctttgtaatatgttgaagttaatttgaattgactgattttgttgaactgtgtgtttaagctgttgcattaaaaagctttcttcta

SEQ ID NO: 269330 - DNA, 339 bp, Homo Sapiens
  misc_feature (32)..(32): n is a, c, g, or t
  misc_feature (43)..(43): n is a, c, g, or t
  misc_feature (53)..(53): n is a, c, g, or t
  misc_feature (117)..(117): n is a, c, g, or t
gcccaataccacccaggcagccatattatccngaataaaattngataatgtangtaccaaggccggaaccacagccaccctgtatttaaaaaccatattccagcaaccgagttaccngtaaccgcctgtccattgaggcccccttccttcctaaaatgagatggcccatcaccttgtaaaattatttttaaaagatatatttttaaatgaagaagtctttttatatgtcaaataatttactttagatgtttaaaatagtatagctcacaaaaaatgttggctcataacaacttctactgagtatgtaagaaaatggttttgaagttcaatcttttttta

SEQ ID NO: 269331 - DNA, 445 bp, Homo Sapiens
agatgatcaggggatgtgtacaaacctatggggaaaagtgcccagtggtagtaactgtgtaaagtttctaattcacaacattaattcctttaaaatacacagccttctgcctctgtatttggagttgtcagtacaactcatcaaagaaaactgcctaatataaaaatcatatatatggtaataatttccctcttttgtagtctgcacaagatcccataaaagattgtatttttattacctatttaaacaagtgattaaatttagtctgcacagtgagcaagggttcacatgcattcttttatactgctggattttgttgtgcatcatttaaaacattttgtatgtttcttcttatctgtgtatacagtatgttcttgaatgatgttcatttgtcaggagaactgtgagaaataaactatgtggatactgtctgtttatattaaaa

SEQ ID NO: 269332 - DNA, 530 bp, Homo Sapiens
  misc_feature (108)..(108): n is a, c, g, or t
tgggcaacattcagaaagttagtcttcctatgctcattttcctgggctgttacagaagaagactggaagagcgcgcagggaccatgtcggcggagacccgtagtcgcncccacagaggaccaggtggaaatcctggagtacaacttcaacaaggtcgacaagcacccggattccaccacgctgtgcctcatcgcggccgaggcacgccttttccgaggaggagacccagaaatggtttaagcagcgcctggcaaagtggcggcgttcagaaggcctgccctcagagtgcagatccgtcacagactaaggagattggcaggcattgacagcttcactccatgaaggccatctctgtttctctcctccgcttaaccaagctgttgtggtttttcagcatagtgttgtatgttccattgctagctgtcctgctgtttaacacagtgttgtattttttttctaaatgtacataattaggaaaagaaaataacaatagggaagctatgtgtatctttctgtgttaaagcagtggg

SEQ ID NO: 269333 - DNA, 491 bp, Homo Sapiens
  misc_feature (352)..(366): n is a, c, g, or t
  misc_feature (419)..(419): n is a, c, g, or t
  misc_feature (425)..(425): n is a, c, g, or t
  misc_feature (449)..(449): n is a, c, g, or t
  misc_feature (467)..(467): n is a, c, g, or t
  misc_feature (480)..(480): n is a, c, g, or t
tgaactatttgcccctgtcatccttctaggataggcagtactttgtgaaccagctacaacagaatcagctgcagtgcttgttaaaagtctggattctcaagttcactccaaacttattcaatcagtttgtgagagtatgtcccaggaatgtatatttttaaagaagttccttgtgtgattctaatgcatgcaactaattatattgttatagttaattgtctaatcaaccaaagcatcctattcatcattactttatctgctgttaatgtcatattttatctttacttttcagacatattgaaatcctttgaagtataactgactttgaccattttcatatatccctagtggnnnnnnnnnnnnnnnaatagtctatcatgtaggctcttcatccacctcacaggttgtaatcacaccanttcggnttttcggtttcccgatgggtggangttccacaattttacccncttaggtacctantcctgtaatta

SEQ ID NO: 269334 - DNA, 464 bp, Homo Sapiens
  misc_feature (349)..(349): n is a, c, g, or t
  misc_feature (392)..(392): n is a, c, g, or t
  misc_feature (428)..(428): n is a, c, g, or t
agataatcactttaaatttccacaaaaggacatgaaagaatgaagactgaatccactgcgtgaggccatcagatgtctcccataagcagatttcaaacactgtcataagtgagtggccctctaaggttcagacttctagtccacaacaatttccatttaggtaatgtataatttttccaacaggggcacaaaggcattactattagaaaatgcgttcctgggcacccctcctcaacattcaataaatacggaactcagtgacctcttatcaccgagcctcaaagctgaccatgagaagtggacatctagtataaacttccttcaggggtgaagctcccctctgtaacancctttcccagaagctcttggttgaaccctacagtaccctgggngctcatgagacagcttatttccttgttagtaggttntaattgttcaaaaagttctttttgtgtttctactca

SEQ ID NO: 269335 - DNA, 935 bp, Homo Sapiens
  misc_feature (18)..(18): n is a, c, g, or t
  misc_feature (548)..(804): n is a, c, g, or t
  misc_feature (864)..(864): n is a, c, g, or t
gcactgccactgactaancctgtgaccggggcacccttttaatagccctgcatcagcctgtttccccagctgtaaaatgctgaaagtgaaaccgagcttaaatggctttcttgaggaatagaaaagaaaccacgtataaactatctggtacatagtaggtgctcagcaaatgtccaattccctttctctgttgtacattcctcttttgaagttcagtgctttaccaaggcatttcctctctgctgtgacttgctttaatccaccatcctgttcaccggatgttcggttgagggagaagaatgcaaggcactgaggaaaattctggcataaaaacctttgtttacaaataacttaggaacctgcttagaggaaaacttgtatgactttgagatcacattatttaacgttcatatggtatttgcaatttttccagttatttctatttagtagaagagaagtaatttagtttataaaaaaacaagaattcaaaattatttttaaaactaaccctccagtttattattttttatttttcttcgagacggagnnnnnnnnnnnnnnnnnnnnnnnnnnnnnnnnnnnnnnnnnnnnnnnnnnnnnnnnnnnnnnnnnnnnnnnnnnnnnnnnnnnnnnnnnnnnnnnnnnnnnnnnnnnnnnnnnnnnnnnnnnnnnnnnnnnnnnnnnnnnnnnnnnnnnnnnnnnnnnnnnnnnnnnnnnnnnnnnnnnnnnnnnnnnnnnnnnnnnnnnnnnnnnnnnnnnnnnnnnnnnnnnnnnnnnnnnnnnnnnnnnnnnnnnnnnnnnnnnggcgtgacatccttcggcctgggccagccattccagttttataaactgggattttaattntggccagttaaatgttattcaagtaaatattgtgaattgatggcataaaggcagttgatttattcaagtgt

SEQ ID NO: 269336 - DNA, 553 bp, Homo Sapiens
tcccacctctacccatctccatgccacaccttatccagttagacacatacataccaatcattagaagaacaagtttagaaggtgtggaacttgtgcctggctggctgggtagtcagctgagcctgttgctgagcccggtggtctggattggagtatggccagggcaggagtacacagaatagaatttagactgtcccttgagtagaatccactgattttctgtggctccagtgagaacaaggctttgaaactgaacaagataacttctagaaatgaactgtactaatccctttccccagattgtatcatgagtagaatcaggttcacgtggtgcttcaaagccctgagaagaatatttctttggaccccaggcactaggggccacctgccctgggagtctccctgcctcactcctctaggcaggggagtgatgcttcaggacgttgacaggctgttctaacatgtgtctacctgaaggctagttgaaggatccaggagtattttccttcttggggtgggccctgaacaaagccaaaaatttgtagaaaccatt

SEQ ID NO: 269337 - DNA, 418 bp, Homo Sapiens
  misc_feature (14)..(14): n is a, c, g, or t
  misc_feature (114)..(114): n is a, c, g, or t
tgccccctctgacnggaccatccattgcccattaactttccttccgggcatccacggcaatgtccacgatgccccagacctggagcaaggcaaccctgggagtcagccccaccncataaaatatgggaacaccccattttaaaatttaaagttttgtcccttaaagacaacttcagtggttaattataaaagttgtgttacttcgtcctaaattaaattgatagaaagatttaaaaatgtgttttgtttctactattcagaaactgcgaactagggaaaggttggtatgaaaaaatgtctttccttttttcaatgtacatagttcaactctttctttgttacatttaaactatatccatggatatcagtctgctttggactcctctgctagtgttacagatggaaataaaaccattaa

SEQ ID NO: 269338 - DNA, 453 bp, Homo Sapiens
  misc_feature (318)..(318): n is a, c, g, or t
  misc_feature (406)..(406): n is a, c, g, or t
  misc_feature (423)..(423): n is a, c, g, or t
ccaataacacatacaacaggtatcatttgctaggaagcatcgggtccatcgatgagaacccaacagcaggtctgagaggtgccggttgcccagagcctctcaaaactcaggttctgacccagcaagtctgaggtgagacctgagattccccccatgttgtggtccacaggccacactttagtagcaagatggtggctgacattgtaacatttttacaaagggaaacgccagtgccagttagttaattcaggggatcaagtgggaagtcaactggggaaagtgtccacaatgatactttcaacaaaaaaagtaaggganaagggaaaggtgggaagatgaggtatgtttaacttcctcattttttcctaggcagggagttacacgggtactgttcttcaggcattcntttcaggaggtaggttntctccatttttttgttttaaaatccagtgg

SEQ ID NO: 269339 - DNA, 381 bp, Homo Sapiens
agtgaattaatggaacatcctggagataaacccttgataatcctattggtgaataacatcctaagtcatcccagtagataatgtttcttctgaaaggttatgtgacccaaccagaccctacagattttgagaaaacatcctcctcataattgcactttgttttagccatgaagtccaatatgcaatagaaatagaaaaacaaaaatttcagaaagaataccagtgaaatcaggttatacggcagtatgttagcttcgtgttcctactgtgcttaagggaagcattaatttcctcaataatttttctccttggcttagtgctgaaatggcacaaaataggtggaggtctgattctgatttactattaatgccacaagcattt

SEQ ID NO: 269340 - DNA, 439 bp, Homo Sapiens
  misc_feature (60)..(73): n is a, c, g, or t
atcatgttagtaattaaactctctctcctcttgagactcagtgagagccttccccttacnnnnnnnnnnnnnngaccatagcttgctgccaaagcggatctgaccacgcgtcctcatcactctaagagattaaaataaagcctcctgcagtccttttctccaaatacacaaagaagtggctgggctgaggctcaagggcacagttccagtccctgttggcaagagaagggcagggctctggttctcccaaagggtgcaaaggacaagaatgtttcctagaaaagaaaccagggaaggagaccaaagtagacctagctgatatggagctgttatgtgaaaactgaaagctgcttcgatactacttcaaagccagattattctgggaactgaagggagactgagccttcaagtaatatgactagggaagtcaagtacaaaa

SEQ ID NO: 269341 - DNA, 295 bp, Homo Sapiens
  misc_feature (45)..(45): n is a, c, g, or t
  misc_feature (59)..(59): n is a, c, g, or t
  misc_feature (106)..(106): n is a, c, g, or t
  misc_feature (124)..(124): n is a, c, g, or t
  misc_feature (138)..(138): n is a, c, g, or t
  misc_feature (141)..(141): n is a, c, g, or t
  misc_feature (147)..(147): n is a, c, g, or t
  misc_feature (177)..(178): n is a, c, g, or t
  misc_feature (180)..(181): n is a, c, g, or t
  misc_feature (193)..(193): n is a, c, g, or t
tgcctgacagcccatacctaaggagtaggaaacctatagcacagnacagtatgaagaangtgatttcatttttgtttcccccaaatgggcacttatttacatgganagcagctaaaggacaggnaaatatatttaacnagntgttancaagtatggtggagttataggtaataaaannanntttttttgcttngttgtagggccttcaatgaacatgtattatttggttatgacgggaaagtaaaatgtttcttaaaaactagtctttattgtatcataaatagatgtcagaaat

SEQ ID NO: 269342 - DNA, 567 bp, Homo Sapiens
actcctgcttctgtacaagaggctcatgaacacagctaaaattgagaccatgagcaaagtgcaccaaaccacacacgaggtttgtaaacacacgaggagtgccacatcatgctagatttcagtgagcgcaatggcagccacacgagaagatgttggggtgggaagaaaatatcccaccttgctgtttagaaccactgtgctgtgagcgctgagacggcagaagagaagccatcccacgcagcacttgcaaggcgatccgagcaccctgtcactcttgtaaactagaaagggcttcttttacttgtgtgaccttaccattcttgaaaataaaaagggagaagagaagggaactaaagtgcaagctaaaagagaaaagctccaagaagacaagcctaccttcaaaaaagaagaggtaaatatgattgaaaagtaatgatcgtaaagcaacagaaaaagcagtcagtgttccaagatatctcaggtctgatgatctcaaaattgtaacctcatatccagtgtatttcaagccatgactcacagtccactgaatagtgagatcagcttaga

SEQ ID NO: 269343 - DNA, 1005 bp, Homo Sapiens
ggcacgagaaaatacaccagctcatttggctgctcagtctaactctagaatggatgcttttgaattcatttcgatgtcaccacttttcgctctttaaaaacactgggtcaggtgaggacttgtttcagttcctataactaagtaaagggcggctttctcataacaaaggaaaaagtcttccccaaagatgaatttaagtctccacttttttctatacagaaaactcaaaactcaaagtttcaaagaaccaaaggactcttcctctgggcaccacaaacttccccttcctccactgagaagactgtctctcccgcaggaccctgaattattgaaatcgaaggctgacttcctttctggcagtgaagcccaggggctaatgttattatcctgtcacacttgcaactagttacttttgtttagtgatagaagatttggggaggacccaaaggactcagaactttctctccatacctccttttactcttttctttctgtgtaatgtatcaacaactgtttaatctcccttctaacaaaccttgatataagctttctgatatcaaagtatattgacagttaacccttactgattttaaacttgactatccagtctgttaattacctaagattttgttttcatttcatctctaattgttttgatcattggcagagaaagagtatttgaaattcatatcagttttgctccttattttaatctctttgaattaaaaataaaactttttcaaaatggaaatttgaaattataagtagacttcaattatctttgctaatcctctctttaattagtcagctagttaaaagttgttatattcatatatcctcaaccctctttttgcctttgtagcttttaatttcctgaaagaagaaaatgagttgttcgtttttggttctgaggatgtgatatccgtacttactgatactaaagccaaatttaaattctaaaattaattcttgggtatccaataaacaaagaactatttttctaaa

SEQ ID NO: 269344 - DNA, 228 bp, Homo Sapiens
aaatgctgggattatgggtgtgagccactgcacctgggccttaaacctgtctttctgaatgaaactactattgctcttttaaattataaaattaggtgtgtgagacaaatgggattaaggacatatcatttttgcttacatcataaatggggtcaaattctggacaaaaacatatttattatactaggacagggccaaacctcgtggccgatttttggggctcgaggg

SEQ ID NO: 269345 - DNA, 251 bp, Homo Sapiens
aaattttttccttttaaagctttggtgtctggtacaatgtgagtttgcccaaattttcttcatctgctacagattaggtatgccattgttgctgccatgtggcgtgcgaccccgtgcttcttaaacgcactgactggaggtttatcgcatcacttgttcacatgcacggagcctggtaacagcctcatctgtatcttgttagcttcattttcttatttttaaaatttcattatttataaactcaacgatag

SEQ ID NO: 269346 - DNA, 605 bp, Homo Sapiens
tattgttctgtctagtacagtcgtgactagctacagttggcgattgagcagttgaaatgtaccttgtggtctgtggcacagttgccatttcccgggtaagatgtctgcagtctgtgtactgaggacctggagcaggaatgctgggcagctgatttgtttcactgttttccaacatgtagtaatgttcatgttttgaagccaaattatgtgtgtttctttgattatccttcattcaagtatagtcatccacataactttctgaaaacaattaatgctgtatgtggacagcttgttcagttcagattctcagacactgaagaagggattagaaaagtaactgttaatgttatgtaaaagaaggagatacagtgtctcagtttgataacatcggtaaagttcaaagtgataaagcttctgttaccatcgctagtccttatgatggagtcattgaaaactctagcatagtctagatgatattgcctatgtggggaagccattagtaaacatagaaacagaagctttaaagggtactgttaatttgttttaccaaattgattattgtccaccttttgtcattgggtctcaattaaaagtgacctttaaaa

SEQ ID NO: 269347 - DNA, 127 bp, Homo Sapiens
gcttcctcttcttcttttctattttttataaatatcatgcacaactataacctatgggaatgatgtagtaacacagattattcatcttgttagagttgtattaaaaataaacaagcatttcaaatta

SEQ ID NO: 269348 - DNA, 551 bp, Homo Sapiens
  misc_feature (21)..(21): n is a, c, g, or t
  misc_feature (24)..(24): n is a, c, g, or t
  misc_feature (46)..(46): n is a, c, g, or t
  misc_feature (76)..(76): n is a, c, g, or t
  misc_feature (78)..(78): n is a, c, g, or t
  misc_feature (81)..(81): n is a, c, g, or t
  misc_feature (84)..(84): n is a, c, g, or t
cagaatagttcatggtaaacnttncaattacagatgatagtgaaanaaaaccccagcgacgcaatcgtagccgcantncgnctncaggggtcaggcagaagatagacagccaggtaacttgagtcgacctgtggacacccatcaggtcacaagcatgaaaaaaatgtcatatgtctgccttctaaatatattatacttacatgtacacatgtgtgcataaacattcaaaatttgcattgccataaattgtttattcaactaataagactactactattaagaaaatgcattcttccttcacagtgtgttagtaacttgtctaattgaactaatgttgtgtcctaattgtttacatggaaatactgttgagaagaccattttgttcacttggcagtttcttcacacttgagatggggcctgccatccgagggactgtgttgtagattgtgatcaaggttgattggcaaaactgggcagcttttgcatggtgcctgcttactatatctgaattcagcacctcatttttgtgggagttgtaatacccacaatta

SEQ ID NO: 269349 - DNA, 635 bp, Homo Sapiens
  misc_feature (471)..(471): n is a, c, g, or t
  misc_feature (494)..(494): n is a, c, g, or t
caagattgaacttggacaccaaggatgaaaaatgccacacaggcctcctgagaagggcccagggtatgcctagtcagcaggattcagttcagggtaccagatttttacagatattttaataatgactcttaaattattgaaataaatatagacaaccccaaaccttggacactgtatataaaaagaaacctaagaagactctgaaaggtagaaagaagacagacaggccagggaccttgggaaactgaagaaatgacacactggtgagtcccctggggttttccctcttggctcagatatccccagacttggagctaaagaaactggagaccccagaaacacccatgaggcctgagcagacaaacggagcccccaacaaaagtccactctttctagccagagggaccaggggaaggggcagcctagcaagacagaaaactcgagacagtagctactttcctccagccaaanacctctgcaggaactgtagccanacccccacccaccactccagcggaggcccaatgaggggcctagacagtgacaaggtacccagcaccccaacagggtggtgtcaaagggactgtcatcccattggggataatgagctactaagcttttcaatggaggctttt

SEQ ID NO: 269350 - DNA, 447 bp, Homo Sapiens
gcacacctgggtaaagctctgtaaggttactcttgcccctccatgtattccttaagtgtaccatatcacttaatggtaggtaatgataagtagggcagaaaacatcaaaaggacagcaatattcagttgggcatgtggtccatccataccaaggaccttttcctagtagaagcaccagaggatggtctgtgggaggaagtacctttttctgatttcaatctatatcacctcacatggggacaaatttccctaatttttgagccatatattgggatgcagtatacccagtgtgtctttgccgtacccatcaggatttccctagactttgatgatattttcccatttctcaggaatttttaggataagaactttttaaagttcacttaattgcccagtcctgttgttggaaatgttgtttaatttaaagcataaaatatgctggggaga

SEQ ID NO: 269351 - DNA, 413 bp, Homo Sapiens
  misc_feature (176)..(210): n is a, c, g, or t
  misc_feature (393)..(393): n is a, c, g, or t
aaaaggcaaaactatagtgatagattagtagttactaggtgccacaggtagaaaaaaagtatttgctggcaaggtggcgaggaattttgggggtaatagaaatactctatatcatttttgtgatgcttacacaactcgtccatctttgtcagaaatcatctatcctcccaacttannnnnnnnnnnnnnnnnnnnnnnnnnnnnnnnnnngatgattttaaaaaacaatttatttttgcttttcagggtcagtgccaggggttgttcaagcctacgtttagtaccacctattcatctattatattccctggtcagcttgagagatacagtcaggggaagcacctaaaaatccccgcagtggtttccaggcaccaaataccccggggcaaagcnggggcaagtttttgttccta

SEQ ID NO: 269352 - DNA, 466 bp, Homo Sapiens
  misc_feature (412)..(412): n is a, c, g, or t
  misc_feature (430)..(430): n is a, c, g, or t
  misc_feature (445)..(445): n is a, c, g, or t
agcttccatagggggaaatttaaattttttttacaagttgtttaattataatgtgctttaaaaacactttagcatatcataaaccttcaaaacaaaatgagtaatcatcttctgagatccatagaaaatgtttcttaaatgtcactttcaattaccacttctggagctaacttgcaaaacaattgtgtttccaccaactgaaatatgttttcaccaaatttaagataatctgtggtcagtgtgagctttgtcttgatttaggaggaggaaagcaaagttccatttatgaatactttgaaaattttcaggaaattctcctaaattgtttcaggcaaccggggccaaaagagaggcctgggaatccccaaggtgaggagggaaacttttaaaagttacacttttgggccagggnacggtgggcttcacaccnttaatttcccggcantttgggggactggaattgggt

SEQ ID NO: 269353 - DNA, 381 bp, Homo Sapiens
  misc_feature (39)..(39): n is a, c, g, or t
  misc_feature (48)..(48): n is a, c, g, or t
  misc_feature (76)..(76): n is a, c, g, or t
agtcagcctatccacattggactgtgtaggtttaagagncctttggangcagtggcttagcaacaaataattcctnctgatccatcaagtgacctttcaataaaaatgtttaaatccagggtgtggataaataggaaaactgttatgtcttttttcaagttacaggagaaatattaaggctgaaatagcttgataaagcaaaccaatacttgaagaactatcaatttatgaatggaatcaaggatatttaactactttttcaaaaaagtattttatggccggatgaggtgggaggattgcttgagcccaggagtttgaggctatagtgagctatgatgatgccattgcacttcagcatgggcagcagaacgagactctctt

SEQ ID NO: 269354 - DNA, 506 bp, Homo Sapiens
  misc_feature (13)..(13): n is a, c, g, or t
  misc_feature (24)..(24): n is a, c, g, or t
  misc_feature (33)..(33): n is a, c, g, or t
  misc_feature (46)..(46): n is a, c, g, or t
  misc_feature (70)..(70): n is a, c, g, or t
gtaggccaacagnaccaaagaaanattacccanggataatagaaantccctcctccaaaataaataaaanggaatgaatccatcaaagaaacaccctaaacagtccctaaaacatttaaatccactgaatatggcttgaactgtgtccccgccccaaacctcatcttgaattccccatgtgttgtgagagggacccagtgggaggtaactgaatccatggcggcaggtctttcctgtgctgttctcgtgataatgaataattatcatgagatctgatggttttataagggggagttcctctgcacaagctctctctctttgcctgctgccatgtgagatgtgcctttcacctttcgaaatgattgtgaggcctccccagcacgtggaactgtgagtccattaaatcctttttcctgtataaattgcccagtcttgggtatgtcttcatcagcagcatgaaaatggactaatacaatcacctaataaagaacttcatggccaagcgc

SEQ ID NO: 269355 - DNA, 414 bp, Homo Sapiens
  misc_feature (21)..(21): n is a, c, g, or t
  misc_feature (27)..(27): n is a, c, g, or t
  misc_feature (43)..(43): n is a, c, g, or t
aaccccccaaaaatttaaggngtaggngcacttccctggggancagatcctcaattttccagatcctcaagggacccctgacctttaaaaagtaaagaactactactttaaggggctaggtgtgttattttatttatctttatgtaattatcacaatgacaagcacaaagtaaagtatatgattaatggataaaactacaatttgaattttccaaacctacattttgtcttttattactttatttcttgcatatctttatcagcgtaatcaaatcccgacactactggttaaactgttcaaatcttagtatactaaaaatactctgccaatttttaaagtactttaaaactaaaaaataataatgtattacccaaggctatataattatcacatgacatgtttgtctgaattcc

SEQ ID NO: 269356 - DNA, 357 bp, Homo Sapiens
  misc_feature (260)..(260): n is a, c, g, or t
  misc_feature (347)..(347): n is a, c, g, or t
aaaagaaaaataaaagggaagtaatttataataaaatttatttcagtatttaatgatgtggcacaactatgccataaagcataagatcaagtgtttgcatctatctgtaaatagaatcatcgtgtaatttagaaagtatgtctgctgcctatacagttgtgtgcattgttgactcatgttgtgttgccattagtggtgtaatttcttcctgaaattgcagacaactcttaggaaagctctaaacaaagaattaatcaatnactttctgagttgggaaaagattttttaaagtcacttagtagtccaagcactcatcttattgaatcaagatatattccctgtttatncataatttca

SEQ ID NO: 269357 - DNA, 229 bp, Homo Sapiens
  misc_feature (15)..(15): n is a, c, g, or t
aattgactactgggncctaattaaactaaggtagtttctgcacagcaaaataaactatcaacagagtaccatagataccctagaaaatgggagaaaatatttgtgaactatgcacctgagaaaggtctaatatccagaatctataagaaactcaagtcaacaaccaaaaacctaacaaccccattgacaagtgggcaacgaagaacaggcacttctcaaaagacacaga

SEQ ID NO: 269358 - DNA, 152 bp, Homo Sapiens
cccccttccattccttctcccctcttgcattcaagattatgaaactttgctatgggccctgcacttcctttgcttcctcctgttcaccctggtggtgtacggatgaggcggggaggtgggacccccaaatatatatcagcccaacagcccta

SEQ ID NO: 269359 - DNA, 476 bp, Homo Sapiens
  misc_feature (23)..(23): n is a, c, g, or t
  misc_feature (58)..(58): n is a, c, g, or t
  misc_feature (91)..(91): n is a, c, g, or t
  misc_feature (93)..(93): n is a, c, g, or t
  misc_feature (114)..(114): n is a, c, g, or t
  misc_feature (131)..(131): n is a, c, g, or t
  misc_feature (137)..(137): n is a, c, g, or t
  misc_feature (146)..(146): n is a, c, g, or t
  misc_feature (171)..(171): n is a, c, g, or t
  misc_feature (182)..(182): n is a, c, g, or t
  misc_feature (208)..(208): n is a, c, g, or t
  misc_feature (251)..(251): n is a, c, g, or t
ccccgggcctaaaaggaaccctncgccctggcccccccgaagtgttgggatgaccagncgtaaagcccaaggcacccggccctctgaatgngntcctacatatgtggcacctgncttgttaaatgtgttgngcaaanctgtcatanctttactaacttttgtctgacctantaataattganaaaggtattttgaagtctcctactgnaatggtagatttgacaatttcccctcttttatcagttttaacnttatacattcctattgagtgaataaagtgtggaagtcttgtgttgccccggtgagttgaactcttcttgttatgtagtgacttccttattgctaatgctttttgccttagcaaataaaaatctgttttctgttatctcaatatagctttggttggtatttagtgtatatctttaaatccttttacctcctacgtgttgatggtttagttttgtctcttgtaagtc

SEQ ID NO: 269360 - DNA, 438 bp, Homo Sapiens
  misc_feature (38)..(38): n is a, c, g, or t
  misc_feature (71)..(71): n is a, c, g, or t
  misc_feature (89)..(89): n is a, c, g, or t
  misc_feature (152)..(152): n is a, c, g, or t
ccccagaagtaccacctagagcccagcgatacctttanttggtagaccaatccaatttggaatcccatatngttattaccgggcagatngataccatgattaccagttcctgaatcctgtaaccaccttacaaaaggaaaccccagagcagncttgatgagtttttgtttcctgcctcgttccccgggagtcagtagaaacagcagttgtatgtggttatgttagtcctcaagatacttaatttgttgaccttacttcagaaaaattttgtatgtattatatttgtgggaaggtaaaataatcatttgagatttttatcaaatatgaagattagttatttatgaaaaacaaagaaatgtctatttttctttgttcccaattaatgtagataaattttaaaatgcattaaagtaatggtaaagacaataaaaagatgcc

SEQ ID NO: 269361 - DNA, 583 bp, Homo Sapiens
gagagatttggtgacttttgatacgggtttggtgcaggtgaatttattactgagccaaatgaggcacataccgagtcagtagttgaagtccagggcattcgatactgtttatgatttccatatatgtatagtgcctatcccatgctgtagtcactgttatgttaaatccagaagttacactagagccagcgatactttatttgtagacaatcaatttgaatccatatgttattactggcagatgatacatgattacagttctgaatctgtaacacttacaaaaggaaacccagagcagcttgatgagtttttgtttctgcttcgttcctgggagtcagtagaaacagcagttgtatgtggttatgttagtctcaagatacttaatttgttgaccttacttcagaaaaattttgtatgtattatatttgtgggaaggtaaaataatcatttgagatttttatcaaatatgaagattagttatttatgaaaaacaaagaaatgtctatttttctttgttcccaattaatgtagataaattttaaaatgcattaaagtaatggtaaagacaataaaaagatgctgt

SEQ ID NO: 269362 - DNA, 431 bp, Homo Sapiens
  misc_feature (72)..(72): n is a, c, g, or t
  misc_feature (77)..(77): n is a, c, g, or t
aaaaccccacccgaaaacccccgtttaacctaccgtgtttgaaaccctggggaccatttatggtccaagggncctgnccaaagcaaccctattaatccttgtttttaccctgatggatcatggagaaaaataatggattcagttatgagaaacagtaatagatttttttaactgcccataaatttctctccctgtattaaataaaaggatcagggaaagataagttgaattttcctacaatgagccagctcttcttaaatttacctcccataaattgtagcaaagcacttttcatataatgttttatttatgtaattcagttatttggagatggtggtgagggatgtgagtacatcatttcatgttgtatttcaaatctcttttgacagaaaccctaagaatttgcaataaagaaaattcaatgttccaaa

SEQ ID NO: 269363 - DNA, 370 bp, Homo Sapiens
  misc_feature (201)..(201): n is a, c, g, or t
  misc_feature (210)..(210): n is a, c, g, or t
tcggcagagctgcatagggctcggcgtagaaagaaaaaaatgtgatggtttaagtaaatgccacacatcttaatacctctatctgaatcttcaactccccatacaaatacataaagctgaacttgcttctataattgagatgggttacacagaaacttactattcccaatgactggataaattatcttggcacaaagaggntctgacganagtatcaagtccaagaatatcttactgaagccctttctggaagtaaactggccattgtgggctctgtataatacttaggcatcagaaaacggccacaaccctattacgggtcaagtaataattccttcccaattaataatactacagatgcggttttaac

SEQ ID NO: 269364 - DNA, 430 bp, Homo Sapiens
  misc_feature (287)..(287): n is a, c, g, or t
  misc_feature (312)..(312): n is a, c, g, or t
  misc_feature (320)..(320): n is a, c, g, or t
  misc_feature (324)..(324): n is a, c, g, or t
  misc_feature (355)..(355): n is a, c, g, or t
gcacaccaactgccgtccatctgcaggaccctctccattgggttcaccattccagaataaagccatgcccatcagacagccagcttgatctctcctcttcctcctggaagccacaagattaggccgagagccgattcagacaaacaacctacaacccttaagctcctggcagcgccagccaaggccatgcttccatgcaacactccttccaaacggccatcccagcatgcttccaagcaggctttcatccgttcctctggaccctcatctcttaagacctaccgccntattaaaaaggattatatcttgagnaccctatncctnttaaaattttttccacacccaaaacaaaaanttttggggttcaaaagtcttaaaacgcttagggctgggcaaccattcaggttccttggccctgggtgttccttgg

SEQ ID NO: 269365 - DNA, 341 bp, Homo Sapiens
  misc_feature (14)..(14): n is a, c, g, or t
  misc_feature (23)..(23): n is a, c, g, or t
  misc_feature (49)..(49): n is a, c, g, or t
aaaagtgtgtaatntccaatcanccccttgccaacagtaacccaaatcngtaatatgattgggttaaatatggaaactagtccaattaaaaagggaaaaagccctcattcattatcctgaaagcccatgactttcacaactggaggaaactttgcaagagttcatttagttgcaataaagtattatcactgaatattttatgttgctctttaagctacatccattgtagcttatcactgcatattttatgtagctctttaagctacatccattggtcttcattctacttaggagggtgtacattttaaaaaagctaggggaggccaagcgcggtgtctcat

SEQ ID NO: 269366 - DNA, 436 bp, Homo Sapiens
  misc_feature (91)..(91): n is a, c, g, or t
  misc_feature (404)..(404): n is a, c, g, or t
  misc_feature (410)..(410): n is a, c, g, or t
  misc_feature (417)..(417): n is a, c, g, or t
attcggcacagaaaaagttaaagagaactgaagcttcaagaaattaagaaatttgtccaagtcacacaagcaagtgtatggcagagcaggnacataaaccctgcttatatgattccaaaaactttatccttaagtaataatagatgctgtaaattataaacattgagttaaatgaagtaatgaaggataagttactcagcgtttgttttgtaaagtctctcaagggaaaaaattaatctaagttggagggcactgatggcagctgctgcatttcatgaggactgtaggcagtaatctaggagatgaacatagagggtggatttaggatattataaagtagtaaaatcaataggaactgggatgataggattatgtgacgcctgaagtgggatcccaggtagggnccatcnttgcatncgttcccgttgcttccaga

SEQ ID NO: 269367 - DNA, 459 bp, Homo Sapiens
  misc_feature (35)..(35): n is a, c, g, or t
  misc_feature (44)..(44): n is a, c, g, or t
  misc_feature (49)..(49): n is a, c, g, or t
  misc_feature (63)..(63): n is a, c, g, or t
  misc_feature (107)..(290): n is a, c, g, or t
gtggctgggggaagccctcactaataatggtggtnggctaaggnggagncaagtccccacctnacatggatggcagtaggcaaagagagaatgaggaggatgcaaannnnnnnnnnnnnnnnnnnnnnnnnnnnnnnnnnnnnnnnnnnnnnnnnnnnnnnnnnnnnnnnnnnnnnnnnnnnnnnnnnnnnnnnnnnnnnnnnnnnnnnnnnnnnnnnnnnnnnnnnnnnnnnnnnnnnnnnnnnnnnnnnnnnnnnnnnnnnnnnnnnnnnnnnnnnnnnnnnnnnnnnaccatatgaactctttgggtctgtagaataaatagctattgttttttaaatctagcatgatcccagttagctaggattgctaatataaaagaaataaagatagtgaatatgaaattaattatccagattttcagttcatagatttttatgtaaaccactgtccttttgt

SEQ ID NO: 269368 - DNA, 719 bp, Homo Sapiens
  misc_feature (13)..(13): n is a, c, g, or t
  misc_feature (109)..(109): n is a, c, g, or t
  misc_feature (167)..(167): n is a, c, g, or t
attcggcacagtntggaggcgagtcacagagcgcagtgagaggaagcaagtttattggaatctactccgttagagagtgcaagtcctcagactgcaggaggaggaactnccgtccttcggtagtgtcactacttataggcaactgtgaggagctgtgattaatcgtngaatgtgctgatgtgcccactaaagatgcctggtaagcagtggctcctctaacaagtgggcagcttggaactgggaacgagagagccaccgaaacagaatgagggagacaaagaagtgggcatcacccttaactccacaagggcttcccaagggcgctgtaccgtacgcaggcccaggacgaactttatttctcgccccagcatcgctgtccttgtcggtgagaccctggctttagggcagacaggaccacgtttcataagttcatgctgtcccagcagaggaataacgccagaaagtgttccagtacaaccagagaaagagagtccatgagaaatctgcccttgtgaagttggaatcccctcaacctcaccccgctgacttgaatgaagcgactgagacgggctatgatggagcagatccggttgctcgaccttctcccttgcaccaacacatgtagttaatagttactggacatgcatattcagtgggttccaggtaccaaacttgtattgaatggtatgtgccagacaccgtcttgagatctggagaat

SEQ ID NO: 269369 - DNA, 367 bp, Homo Sapiens
aagatatcttgcaatatcagtgtctgtgggccaaatcagacatcctttttgttgttgttgctgccaccatccccactctccttccctccctagacgcaacctagtacctgcctctcagacactgtattttgcagaaacttaattgataagtaatgtctacatgagctgttaaagggaattttcaaagaatattattattttcttcatttactttttaaaggttagttagatatgtattatagagactgtgtttaggttttttctcttggaaattttacattctaggtttaataactacatttattgaaatttagtactatagtaataaatatggagtataaatacctggacttctaaatttaggatt

SEQ ID NO: 269370 - DNA, 544 bp, Homo Sapiens
  misc_feature (18)..(18): n is a, c, g, or t
  misc_feature (44)..(44): n is a, c, g, or t
  misc_feature (335)..(335): n is a, c, g, or t
  misc_feature (345)..(345): n is a, c, g, or t
  misc_feature (354)..(354): n is a, c, g, or t
  misc_feature (386)..(386): n is a, c, g, or t
  misc_feature (428)..(428): n is a, c, g, or t
  misc_feature (441)..(441): n is a, c, g, or t
  misc_feature (482)..(482): n is a, c, g, or t
  misc_feature (492)..(492): n is a, c, g, or t
  misc_feature (507)..(507): n is a, c, g, or t
  misc_feature (518)..(518): n is a, c, g, or t
  misc_feature (533)..(533): n is a, c, g, or t
ctcaaccatttacaaatngtataaatcactcttagccttcaggncacacaaaaacaggtgctgggctcggatttggcccatgagctgtatgtagtttgccaactcctgacctaaagcaaaagcaaagaggctgcagatgggagatttctgtcagtcaggttcccaacagcccatattacccacaaaacaaagacccagcacatgggacagcagctacacccagagtgcccgctaacaatgctggtctctaaacacttgaccattatctctgcttcctttctcccctcaatcttgaagagccagagtctacaagggccttgggggcgggaaagggnagaaggggantcaaagggncaggaaacaggggaattcaacttcacttccgncttgtgccgaatttttggggctcgaggggccaaatttccctntagttgagtcgtntttaatttcgggaatcctgtcataggctgttttcccgtgtngaatttgttntcccgttacaatttncccacaacttngggggcccgggaggnttaaaggtttt

SEQ ID NO: 269371 - DNA, 522 bp, Homo Sapiens
  misc_feature (325)..(325): n is a, c, g, or t
  misc_feature (350)..(350): n is a, c, g, or t
  misc_feature (400)..(400): n is a, c, g, or t
gcaaaaaagtggcggtcgttttaatcaagtctcattacaacggcagaattaggaatgagtcccacctagcttccacatgcgtgggcagcagctgtcacacgggcctgtcgtggcactcagcccatggcacagacatatgtggctcagggcaagaaccagtggatggggctctgcacaggaacgctggcctcgggatgggagacccggcctgcccaacactgctcagagcccctcccaactctgacaacaggctcgggtcaggactccccgaaatcaggcaccctcctgccccactgctgagatccccaacggcccagacctagcnttgggaaactttcttccacctggcntgggccagggaaggcagcaaacagagatgatgacttcggaatgatgggcntattcggaaatggctagggaaacaactgtttccctactgtcctggcgggacccaccctgggctaacgggcttcccaaggaagtcctagtggctctggggtcctgaagtccccaaatgggaac

SEQ ID NO: 269372 - DNA, 207 bp, Homo Sapiens
tttttttaaagaggcagagtctctattgcgccacgacgagtacagtggtatggccacagctcattccagccttcaactcctgggctcaaatgatcctctcaagcagctcccaagtagctgtgaccacaggcatgtgatactgcacctggctaaattttaaattttttttgtagagataggttctcactgcgttggccaggctgtact

SEQ ID NO: 269373 - DNA, 671 bp, Homo Sapiens
  misc_feature (13)..(13): n is a, c, g, or t
  misc_feature (384)..(384): n is a, c, g, or t
  misc_feature (592)..(592): n is a, c, g, or t
  misc_feature (608)..(608): n is a, c, g, or t
  misc_feature (630)..(630): n is a, c, g, or t
gcttggagccagngcagagatgagagacaaagtcacagcttcctctagatcctaaagacccaggaacagaacttcccagaagaagtaatcttgacttcctgttccactccagcccatcagcaaagcttgtccgttctatctccaaaacaggtcttaaagctgccgcctttccctggctttcttactgcccccagtggaagctcccttcatctcccccagggctaccccagtagcttcctttctttgccctgaaaggctttctatatacagcatataaaagaatctccttcaatcataaatatggtcacagcgcttcctcgcctaagaaactcatgggccaactcctgtgtttcagataaatgctaaactttgatttgtgctctnaacccactagggctgctgtgacctggctgcacctggcctggacctgctctgccctggatcacgtgatacccccaggctcactcttcttttcccagtttctcaaacacagcaagttctgtcctaactctgggcctttgcataccttccctctctactgggaaccctcccccaaccttttctcactggagggccaacttctgcatagggntgcaggcttttgcttnaaatgtcacttctttggcaatnaccttatcacactgggacctttttccccttccagggctatt

SEQ ID NO: 269374 - DNA, 817 bp, Homo Sapiens
  misc_feature (238)..(238): n is a, c, g, or t
  misc_feature (383)..(383): n is a, c, g, or t
  misc_feature (667)..(676): n is a, c, g, or t
cagaaagcggggccacactaggttttgcacgaatcagactcgtgtcacagagaagtagaagcccgttgacagcctttacgggacccactatcaaacccactacagggtgtagaccgggaaatatccttaaattccggcgagacaataatatacctattcaatcggagtatgtaggaagccatgcaccatcaatcctaccatctcagcgaggtccctaagatcgatccctattagtgcntaaactaggagctctgagtgaccatctctgacgcagaccactgtactacattccttttcaccagactactaaaatacaggtatggtccaacatcttccatgaatatgcgctcagtttgcttaactaacaaaagaggcagatttantctagtacacttatgagaactgcaaagctagaggaggagaataaaatttgtttatctacaaggaatgttctgagttagaatcaatgtgaaatgatatgacttgaaacaaatctaaactagtgttctcgacatccaccctctcaccccaatgcatacaggctactaagtaagtcctgttattttgctaaacagaaaagatgcagcaatcagaatacctaaaattttaaaaaaaatttttcccattatagttgatcagttgatatttcagcattccctagtggttnnnnnnnnnngtctctcctgcaatattaccaccaactgtcagaaaatatgaaagctcctattgtgcaaattttaaaacattctaagcttgctaaacatttaccacatttactcatacatctcattcacctaaaccttgatttttcttagac

SEQ ID NO: 269375 - DNA, 450 bp, Homo Sapiens
tgatgtggctctcttttcagttaaaactacttacctggaaagagtgagaaggcaaacagtgccctgggaggtgtcagaagctctaagtagcattagggagaatgttctaggatgccggatatggcagctacggctaactgataagaagacaatttccttctctctcctgaaagccgcctcctcttccttcttctcgaagaccctctatgcaatccctttagcctcccacttcctccccatggcctgggtgccctgggttgatctctggtgatggccattcacccggctgggcccaggcttcctgagggtctcccattgaacacagtgaatttgccatgttgacttgcacagggaaaatttggacagaatttcccaaagaaaggactggagcagtttacactcagattaaaaacacagaacacaatcctttaatccggtaacaatcacttg

SEQ ID NO: 269376 - DNA, 557 bp, Homo Sapiens
  misc_feature (163)..(163): n is a, c, g, or t
  misc_feature (179)..(179): n is a, c, g, or t
ttggtggggagcggcgagggtgattaacttgtccccgtgtcttaacagaatgtttaaagaccctacaccgtgaaaacagacttgtgggcttgcagataaacagatgggcaaccagttcagtaaattaaaaaacatctctaaccttaaggtgtcctgcccgccnagaaagaaaccaaaanctttgcccactggtcttgcttcaagccacacaaagtcccaggatcccatgtggcagcaggggtgttttcttacctgcatgcaaatcggagttgtgtgtttgcttttgaagagggtgaaatggcttaacacttggggtgggaaaagacaggaaaagcgttctggatgagttttgtcccctgcaactttttctgtctgtaatccctccatgagcagccaccctcccacactcccctccttcatgtaaaagaggacgatttctggcctgtgatgtctgagtgtctcaactcaagttaagttaaaaccacacaaatgtacccagccctggatcccataagagccccaggaaaagtaagtcgggtttgtggaattcagctcta

SEQ ID NO: 269377 - DNA, 458 bp, Homo Sapiens
actgcatagggtcggcgtgggcacttcctgctggaagggaaaagtggggatgaggggagccactttcctcctctagtgcatagcaacctcgaacaaatacaatcacacatattgggaggccaagaaatggggcctttaggtgtcaccaaccatgctgtccttcaaaaggaaggatactgatgtaattgtcattaggcacattaacagtttgagaaaggggccttaagtgaatagtaccccatgcaataaagcaaagagggtgtgataggtcagaaacccaagtctaattgaaggaccattgacaactgcaattacatgccatctacagttcgaagagaagggcttaatattgattagcactctctgctttgataagtacaggagtcctgataaaaggcacaactgtatgcaactgaaaatgtgtatataacacctaagattatgcacgctaactttac

SEQ ID NO: 269378 - DNA, 415 bp, Homo Sapiens
  misc_feature (218)..(218): n is a, c, g, or t
tcaataaaagtttagaaagaaaaaagtgatgcctgatctttcaacagacatgtggggctctgtagctgccactaccacagatgcacacaaaaacagcaccctcatttccagggggagcctcaggccccgagataaatgtgctccatggacctggaagcgggtagttccaggtccaaaaagttcctcctgaggctgctcaaaaaaaagctgactatagnctaaagctatggctcttggggtttcagtctcacactgagccatctgactctggctcccaaggggtgcaaagaacaagccctgggactggcatacacagggcatcctgctagcccataagcttggccatataggacccaggtcaacacacatatatattccctaacttgaatctctctcggccaggcacattggctca

SEQ ID NO: 269379 - DNA, 449 bp, Homo Sapiens
  misc_feature (26)..(26): n is a, c, g, or t
  misc_feature (78)..(78): n is a, c, g, or t
  misc_feature (200)..(200): n is a, c, g, or t
  misc_feature (210)..(210): n is a, c, g, or t
gaaattgtaactaagcatagcaaacnggcctctgtctaactctcccaacagaaatcaataaatcattcccacatcccnctgctccaaccatactgaaattcatttgcagttctctaaaaacatcatattcttaaaccccagggcttttgcacatactattcctttgcctgaagcaatgttttcttgctcctttacctcantcttactcantctttggatatcagcttaaatttcgtaagttgaaaatgcacttaatacacctaccctactgaacattagagcttagtctaacctaccttcaacatgttcagaacacttacattagcctacagttagttgggcaaaattatataacacaaagcctataataaagaataagatattgaatatcttatattcaatatgtaatttcttgaatattatactgaaagtgaaaagcaatggttttg

SEQ ID NO: 269380 - DNA, 550 bp, Homo Sapiens
  misc_feature (20)..(20): n is a, c, g, or t
  misc_feature (27)..(27): n is a, c, g, or t
  misc_feature (35)..(35): n is a, c, g, or t
  misc_feature (55)..(55): n is a, c, g, or t
  misc_feature (67)..(67): n is a, c, g, or t
  misc_feature (95)..(95): n is a, c, g, or t
  misc_feature (100)..(100): n is a, c, g, or t
  misc_feature (133)..(133): n is a, c, g, or t
  misc_feature (177)..(177): n is a, c, g, or t
  misc_feature (190)..(190): n is a, c, g, or t
  misc_feature (199)..(199): n is a, c, g, or t
acaactacccacacactaanggccaantggggttncctgtaccacaacaaaaccntagcaaaaaaanggacctgtactccgccgggttaaaaaangtccngaccccctttgaatccctgaaaactttcctgantttaaaaaacaaacccaacccaacccaaacccagggggtgaaangggacacgtccangataaaaangctggaataaaccccagagactttctggagtgggaaacatgtaatgggatgttgggaatgcaggcccttgccagcccacctaggtggggaaagcttctagcagtggttgatgcaaaaatctattctaattttaaacagttgcagggagggggtgtttaacggctgtatagcaccttgtaccttctgggcacttacagatattaaatgatggtgatgatgaatggtacacaactctgtaggaaggtttataaaaacaattacaatttgttaagaaatttcccaagagttctttaaacaaacctatttaaactaccatatctctttaaaaaaatcttccgctctcagtattat

SEQ ID NO: 269381 - DNA, 858 bp, Homo Sapiens
  misc_feature (11)..(11): n is a, c, g, or t
  misc_feature (183)..(183): n is a, c, g, or t
  misc_feature (598)..(598): n is a, c, g, or t
  misc_feature (637)..(637): n is a, c, g, or t
  misc_feature (845)..(845): n is a, c, g, or t
aaggccatgtnatgtgttctccagcccatggagaataattttaacacagtcaatgaaatttctacacaacaatgttcttgtctcaaatccaagaatgcctcctacacctcctataatactggctttctggtgagtaaagatgccattctcatgtgtaatcaggtggcaaatggagatatgacnaaagtaaccacctgcctacactcataaccctgtacacactcttcctgtgtcgattcaattcaagtaccccttttgatcacttagcaaatctgacctttaaaagggttagggtttttatatccatgtaagtttctgtattgctttggaagtctctggttaaattaatactcttttaatagtgacctgtgattctgttttgatcaagtgttttcaaacttgacatctttgatgggtttctccagtgtcaaaatcctaaatcaagtctttttggcttaaaactaactttgggatttttttcagctgcatcccttggggagtctaaagaatgtatctctcatcttgtagaggtattaagtgattcgatttatttggtagattaaatgggcaggcattgtgcaaatgtggccgatactgncatggggagggcactgttcaagtgaggtgacattagatncgcagctcagttgatgatttatggggtatgttgttgatatgcgtgttccaaaaattgcatacatttatacaaatttaatatgatttgtaattttgatagttatggctaaatatttgcttaaagttatatttgtattaaacatgtcacggatgggctggggcacggtgggccacggcacctgttaatccccgggggtactcccgagggntggagggccaggg

SEQ ID NO: 269382 - DNA, 132 bp, Homo Sapiens
aaaatatcagtcggggagtaggactgaatgaaatgaaattattttaaagttttacagtgtaaaattcagtctaacaatagctgagagattgatttcagaaatactaaaacttactacaaagctgctgcaatt

SEQ ID NO: 269383 - DNA, 637 bp, Homo Sapiens
agttgcaccctaccctgtaatgcccaatatcattgccctttgtcttcctttcattttgctgttccatatctcagaggaaaagggaaatacttctaatttctccatatctctaaactctgagttccaactacatttgtatatagtaattagccaacactttatattcatggaagctaaagaaacttagaaaacacatttccttctcccaaagcctggctttcaaaatcatgatcttgctgcgtgctccagaaattcagctttgtgagtaaagctgatccatcacacctttgctggaggcagaactgtcctactgtcccctggggcaagaggcctcatggctcagcctcagaggtggaaggctggaagggaccatgataccaaagcggattaaagtgcattgacttcacatcttcaaaatattaccaacaaatatgtacaaaaaagccctccttaggggtataaacaagtgtaagtaaactctccttgttcctttctctgaagctgtcttccttgcagtctaagaatcctgtgctgtatttggtcacaaatttccagtctataattttgttgtagccctttttaatttttgcagccagagtgggagagactcaagcttatcaacattttgcatcttgac

SEQ ID NO: 269384 - DNA, 643 bp, Homo Sapiens
gattataggcgtgcacgcacacctgaccgcaagatacttcttacacagaggctgccatcgcagaagcttgtgttgtactatcgacccccattttgggtcattttttatcagaaagatgagttgttctgcagctacagattgcgtgtataatcctggccagcatctctaaagcttgtcagctgcttcacgagtgagtacccctgttcacagaggagatcaggtgagtgtgcaggtctgaacttactactgccaatgggaaggtccagctcagagagcattaactttggatacagatgataacacaacaaaactattaccctcatatcctacgtcgctatgagcagactgggaatagggtaatagtgcttggagttgggcagaggtggcaacagttagatggccatgggtgctgcttgggaagggcctaaggatacagttgttgaatgattgtaagaacaagagaaaggtggagtctcaataaggcagccgtacaatatgtttatcaagccttcaataggtttagtatatactcctttggcgcatgcttacaagtttactgaactataaccaaacatcccactgggaaatgttttgaattgatgtgagaatttgacattaagtagcaacttgggacatcagagac

SEQ ID NO: 269385 - DNA, 543 bp, Homo Sapiens
  misc_feature (17)..(17): n is a, c, g, or t
ctaggggaatttgcccncgagcccaaaaatcggcacgaggcagcttgagccccccaaagaaggagaaggcggacaacccataatatcattgagaaacgatatcgctcctccatcaatgtacaaaatcatcgaattgaaaaacctggtcatggggacagacgcccaaggtgggtgccaagcaaaattgtgttttatgttccaccatctcccctctacctgtttttgcctcaggagcctagagaagtcccaggctcaaggtaagtgaatacaagaccgagttagaggtgcttttttattaaagcatcttggtgtcatgtcaagattataaaatattaaaaaacataagggactggtgagggttgataaggcagtgacccgctgagacctttgactcctttggctatgctctgcagtgatggggactccactgtcagaggcagagaaagatgcctgccactcagtagttccagatacaggactgtgtgtaccttggagtcagctgatggcatagttttagctgtgtttaggggttaccttttaagg

SEQ ID NO: 269386 - DNA, 347 bp, Homo Sapiens
aagagacagagtcttgctgtcacccgggctggagtgtgcagtgtcaagagcatagcttactataacctgggccgaagcaatcctcccagtcggccttccatagtgctgggattacaaacattaatatttcttaaacaagcaaacatcagtttacaaaacaatcaggattgtctcagtcatacttcttccacagttaacaagtttttaacagtcctacgctgagccatacttttaaagaggctgggctaataaatatctacatattctaacactcaaaaagtaaatctaaggccagctcagggagttcaaatctaggccgggggcaccataatgaggactccattctc

SEQ ID NO: 269387 - DNA, 379 bp, Homo Sapiens
  misc_feature (362)..(362): n is a, c, g, or t
tccccgcaccaagcgcttaacctcattggggtggaggagaaggcggcggctctctggtccgcagcggcaacagtaacgaaaaacagggctaatggactgctgaattatgaagtatttcagacccagtagtagaacatcactctgccactcactcctttatctcctactagttatttaaattgggacttttaatatcctaccagctgctcttcagacacacatgggtgcattgttgccattccccagattgcatctttgaaacacaggctcttaggtaaccttcagcgaacaaagagggcaacctcccaggatacggtctgctggggaggggagtcatcggtgaactgccctctaggcttttnctggggatctggggatt

SEQ ID NO: 269388 - DNA, 430 bp, Homo Sapiens
ggtcatttatagctatttccaaatacatcataatcaattttttaaaattatagtgctatgtatagtgctatgaaccctgtttatatctacttgtacaaaacacacaggatcagtgtggtaggaccaaggcctgaaactgcaattaaggctgactgataatgcacgaaaagctctctcagatatgctcagtgagccggcaagcaaagccacagtgtgctgtcctcgacgtgctaaaccaccccccaacctgccatcaacagggcacacagctgggtattttaacacatattgcgtctgaactgcagtggggctatgctttcaacagaggaggagagggcaagcactgtcccagggagctgaggaatacagcagtcaggcaaaagggccctcaaaaaccctgttctcatggaacttacatcccagtgaacca

SEQ ID NO: 269389 - DNA, 427 bp, Homo Sapiens
  misc_feature (26)..(26): n is a, c, g, or t
  misc_feature (365)..(365): n is a, c, g, or t
acaagattaaggaagtgacagctttncctaattcactgaaaggcatttgggactaaattgtagcacagtataagtaaagtatcctaaggggaaaagaaaactccatattcatgatccttaatctattttattgattaaagatttagccaaatacatcactcctgcttttgtccctgtaacaaccaatgctgtgttatcaggaagagataaaaccagacctgatcggagctactcaatcacttggggcctgaatcactcgcttttcacccaaaggtcaacaggtcttggattcctcatattttaggggggttcattggtaatggtactgttactggtttggcatacagctggtcaggtggcaaaancattttttctttttggaacacaaaaatcggggttttggcccccaacacccacccctttccgg

SEQ ID NO: 269390 - DNA, 458 bp, Homo Sapiens
  misc_feature (365)..(365): n is a, c, g, or t
  misc_feature (375)..(375): n is a, c, g, or t
  misc_feature (408)..(408): n is a, c, g, or t
  misc_feature (436)..(436): n is a, c, g, or t
tcaagtgaaaaaacacaaaaaccatcgtatgctcttcctttccctttgttcccctcccctcacatattataagcccctagttcctgctattattaatgtcattaagttctcctaaattcagccatgacccttcccttctgtctcttagctcaaggcttcttccggaacctcatagctgattgtcttcttttgggcattgcttttctcaagtcattttgtacactgcaactagagtgaactttttataaaaggcagcctgatcatctgtcctacttgaaagccccagtaggcttcccatttgctcttggggatgaagtcctaggtgaaggggttatatggctcatctttaggttcctctaaacagncttcccctgnacccctgctggcatcttctctggataggatttngggtgtggccctttttataaaggctccntttgtggctttcattacggtac

SEQ ID NO: 269391 - DNA, 593 bp, Homo Sapiens
aaaccctttccaaagttacctaaatgcaaactgccccaaagagggaacaatgtccaaaaaccattgtccttcaattaagaaggaacggctgcccccaaactgtgaagaaacactgctgatccctaaaaataagtttacttttaaaagggatgtgagaattaatttgaccttaattcccagatgtgcatgccctcaaaaagcaaaaatcccattctccttccttttggggagcacttttggtggcaccaaggctggtgtggggtagtggagagagcactgagcttagagtcacaaccagatgaaactgctctggtcttcactagctgtgtgacttgggcaagcagcttgcagtctctgagcctctgagatccctgatggacgaggagaacaatgaccccctccccaggctgtgctgagagagggaattgatcttggatatgaaaatgctgccctggcacagaggtaggagctgagcaacactgctggatgaataaacacatgtaatgcagggtgaacagaacatttcatctgcaacagctgaaggcacagcttacctatgcccatggaaagaactgcgtggaaaattcatttgt

SEQ ID NO: 269392 - DNA, 443 bp, Homo Sapiens
aatcggagatggcggtcttgccatgttgcctgggctaatctcaaactcttggcctgagagcattaaaacactttacaagtaattatctgggcttctgatattaatggtattgaaatttctggttttctttttctgcaccaaatctctaatattaccaaagttaataattttctacttgtatttttcaaattgttccttctttaaaaagaaaataataaaagcagctcattgactcactgcaactcattgagacagtgcaattacacggcacttaagtgtctcaacaaattttcataggaattgtacagaatacatacttttgactcagtgcaactacatgccaattaagtattcaattaatcttcacagggaattgtacagagtacttattattcctattttacagatgagaatactgagctggaagaaggaaataacttatc

SEQ ID NO: 269393 - DNA, 423 bp, Homo Sapiens
  misc_feature (59)..(59): n is a, c, g, or t
  misc_feature (362)..(362): n is a, c, g, or t
gaaaataaacctggggcccccaaaacaactaggctaaaggggaaagtcaagctgggaanggcttaagggccaacctgcccccatcctactcaaaatcaccccctgctcactgagataaatgcatatctgattccccctttggagaggctcatcagaaactcgaaagaatgcgaccatttgtctctcatctacctataacctgggggctccctccttgcttcgagttgtcccacctttccagactgagccaatgttcatcttacatatgttgattgatgtctcatgtctccctaaaatgtataaaaccgagctgtgtcccaaccaccttaggcacatgtcaggacttcctgaggccatttttncttgcgtgcattcttaactttgggaaaataaacttcctaaattgatctggctcagattttg

SEQ ID NO: 269394 - DNA, 304 bp, Homo Sapiens
  misc_feature (156)..(246): n is a, c, g, or t
  misc_feature (282)..(282): n is a, c, g, or t
acattcataggactggcaggcaaataattgatggtctcaaggatgaatcagagtttagtcattcaacaagcacttattatcacctgctatttgccagggaaaagtgatgcaggtccaaaatcctttatccaaaactctttattgagagggagtttnnnnnnnnnnnnnnnnnnnnnnnnnnnnnnnnnnnnnnnnnnnnnnnnnnnnnnnnnnnnnnnnnnnnnnnnnnnnnnnnnnnnnnnnnnncctggagcaagctgggattacaggtacccggcctcnacacctggctaattttttgtat

SEQ ID NO: 269395 - DNA, 682 bp, Homo Sapiens
  misc_feature (153)..(153): n is a, c, g, or t
ggctgcaaggaaggttcacaacatgcatctaagtgttaaaataagtttttccttcaaaaatacatttgacttcctctccatttaaggtctggaaatcaagtgggagatcttgactttaccttggcacttgagacagaactgttggcccagaangtctttagttaaggtcattactaggccatatcttaggggcgtctggcctttttcattcctgggacccacagctcgaggtctggtttccatgccctatcccttacgatgagcgccctattttgttccttctgtctatctctgttgctgagatcagggagcccacgttcacagcagctctttcaagcagcctcccaggccttagagaggaaaatcagcagagcctcgtgaatgtatttctcgtggcaagaagggagctcatcttctgggtcctgccagagggcagtgagggggttgatgggctgggtgcatgccagggacccaatcaagcatttttatcttctgaaatctttgaattcctgcctttcttggatgtttggtcttttgatataatttagcatgggccaacatttggtccagatttgtattagccaagccctcctaaaatagtaataacagtatctggcgatttgagcttttacgtagaatgtagaattctctggtgagtgaacatatcaataaagacaacctg

SEQ ID NO: 269396 - DNA, 592 bp, Homo Sapiens
  misc_feature (22)..(22): n is a, c, g, or t
  misc_feature (67)..(67): n is a, c, g, or t
  misc_feature (73)..(73): n is a, c, g, or t
  misc_feature (81)..(81): n is a, c, g, or t
  misc_feature (88)..(88): n is a, c, g, or t
  misc_feature (132)..(132): n is a, c, g, or t
aaaatcggcacgaccccctgtnattgtccccataaagtcagttttcggggaatcccaaacgaattgnggcctncgtgtatntgaaaanatggttgtgatccccccctgatgacggggttattgcctcggaanctaaaaagaggccccctgggtataggggattcagtcatgaggtttctgctaaacaagggatccccagaatcctcaccccattcccagttaaaggcataacgaagaaagcaatattcacaaaggaaatgcggaaaggaataaaagcccatcaagcccacaaaaataatgtgactaagaggcaggatttgcagaagtagagatttaatgtggttgcccttacccacacaagaaaaaggatggaacagatcatgagattcgactgttctgctgagcagcctccacagggcactttgtatgtccctgtttctcaggctgtagatgaaaaggttcagcatgggggtgaccacagcgtacatcactgacgccatcacaccattcctggggggtggtgacagagctgaagtcaagtacacgccaatgcctgttccataaaatcagcaaacaactgctaagagaatca

SEQ ID NO: 269397 - DNA, 591 bp, Homo Sapiens
aaaggctgaggctcatctgaatgtgtcctggtgggatggggaaggattatctatacctttttttcttctaatgaaaagggtgtgggcagaatggaaactgaccaagctctgctcaaggagccagggtagctgtggtttagagaggctggacgaaggtcccccttccctcgtcaacttgtctgcattttgtccccaaacaatatcatgttttcagaatctgctaacaaggccttgaagtttaaagctggttttgttatttgggcccctcccatcttcctctccttacaagggacttgatatgagacctgttaaaatcgtggaatttgcagactttaatgcaatgggccattctcatgaccggggcgatgcaaggaacaggcagtgtgctgacacgcccttctctgttttttacagctatttgccgacaaggctgcagtcctaagcatgggtcttgcaaactcccaggtgactgcaggtaaatcaactggtcttttgtgagatttcttttaattttcctttatgtaagagaggaactgactttattgtgactatgcctcttttttccttggagaacaagaaagcttttttaaa

SEQ ID NO: 269398 - DNA, 332 bp, Homo Sapiens
gacttatctcaatatattgccattgcagtaacatatgctctcaaaccagcctgggtggcaacaaggcacatgtatatgtcctgacttgtgctaagcacttttacatgcatgatctcactgacttctcacagctaagattcagagaaggaatgactaggacttccagccagaaggtacaaaacctagagtcaaacccacatctctgtctctagaactcacagtctcaaagcttcagcaggggagatggccaggtagaaggaataggtgggctagtagacagaacattccagacaggcccagaggtaggggagaagcacggtcctgtagggact

SEQ ID NO: 269399 - DNA, 757 bp, Homo Sapiens
  misc_feature (182)..(219): n is a, c, g, or t
cctgctaaattcggtgtcctctcaccttagcctcttaaagtgctgggattccaggcctgagccaccacacccagcatcagtgactttttcttgggataatcattctggcgtctttggctacaatgtaagaagtttggttgccctgaggccctcgatcgttcgaaagaccaaatgaaaagctnnnnnnnnnnnnnnnnnnnnnnnnnnnnnnnnnnnnnncatagacatgccaaggttttccagccgtttcagcccagagctgtttgagttttccccgggcaggcacatgtgaatggagaaggctttaagagagcctgaccccagctatcatctgactgcagcggccggagagaccctgtgatggttaatttttggtggcaacttgactgggtaaaaagggctgaacagatagctggcaaaagtatcatttctgggtatctttatgagggtggttctgaaagagacttaggactgaatcagtggactaagaaagatctctcacccaatttggacaggcactgtccaatcaactgagcacccagatagaacacaagacagaggaaagcaaatttgttctcttctggggttgggtcaccatcttgtcatgtccttggacatcagaactccagcttctctggccttcagacttgaaccagtgcccctgcaggatcttaggccttcaacctcagactgagagttaccactgtcagattccttggttctgaaattctggacttgaactgagccgtgctatcag

SEQ ID NO: 269400 - DNA, 310 bp, Homo Sapiens
cctccttggccagtcgccatgacagcacacctgaacaaaggggcacgagagcctttattcctgaagcaagtgcgcctgtaccctttccccattggctgggttcaggccgtaaattctaaactaatcccggttggctaaacatttgaactttttaaagataaggtgggcacataagggagagaggggaaaggggaaggggtgtctgcaatgagctagagagcatttccaaataaggaaaggaatgtgagctagtactgataacgcctggtactgtggcatgtctggacatgtaacaaagacagaaaggaag

SEQ ID NO: 269401 - DNA, 428 bp, Homo Sapiens
  misc_feature (35)..(35): n is a, c, g, or t
  misc_feature (145)..(145): n is a, c, g, or t
aaacctgaaaccttcccttgccctggtccttaagnaaaagcattcaatccctgtgttgaccctttcctaaaaagtttgtttatgcaacctgcaaaagagtggaaggcagcctcacacgcagacatgcagaccgtgaatggagagnatggtcacgagtgtgaccccagctctatccccagttgagtgcttaaagagcttttctctgggcaactgcttctctagcaccccataattagccctggtctctgaattgcatatagattgagtggctgggggaagaggagcaagagaatagctctagaagcaaataaaaattatgcagctgtctctagcaagaaaaagagagaatcaccaacagaaaattgggaaagaactgtgaccatacacagctttaaattctctttcacaaatctcaatagattgagcaa

SEQ ID NO: 269402 - DNA, 443 bp, Homo Sapiens
  misc_feature (18)..(18): n is a, c, g, or t
  misc_feature (27)..(27): n is a, c, g, or t
  misc_feature (62)..(62): n is a, c, g, or t
aaaaaacccaccggggangtcccgggnccctgccttaagtaaaggcaagagaaagttgaacnccttaacaaattaatttggatcccatcccattggcctaatagtttgtaatattgttcccccaaccaaaacctcatgttgaaactgtaatcccctaatgctggaggtggggccctggtggaaagtgtctggcttatgggggcagacctctcatgactttgtgttgtcttcagatggttagttctcatgagatctggtcatttaaaagtgtgtggcgccttctccccgaccttgctcccattctcaccatgtgatgtgcctgcttgccttcgccttccgccatgattggaagcttcctgaggcctccccagaagcagatgccactatgcttcctgtacagcctgcagaaacataagccaattaaacctcttttctttataata

SEQ ID NO: 269403 - DNA, 565 bp, Homo Sapiens
  misc_feature (321)..(321): n is a, c, g, or t
  misc_feature (364)..(364): n is a, c, g, or t
  misc_feature (386)..(386): n is a, c, g, or t
  misc_feature (427)..(427): n is a, c, g, or t
  misc_feature (454)..(454): n is a, c, g, or t
  misc_feature (498)..(498): n is a, c, g, or t
  misc_feature (500)..(500): n is a, c, g, or t
  misc_feature (504)..(504): n is a, c, g, or t
  misc_feature (517)..(517): n is a, c, g, or t
  misc_feature (522)..(522): n is a, c, g, or t
aattaaaatacatttaataaaaataacccatagttttacatattttacatgtgtagaatatttacaaactcacttctacagcatttacttaatgtttactatttttccattatttgcctttttggctatttccctcagtagtaaaatgttgtccagtgttctctttaaaaaattagtttcttgggcaatcctccttgttctaaggcctctgttcttttcctttttattgccaaagctgggatttgattgctcctttaagggtttccactgggacagtttgggtcttgggcaggctggacatccggggtgttgggcccgggnccgatttactggaaatacttcattttcaggtgcctgtgtgggnccgtaattcgaggcacaggggnttaaataaggaataaggccttgtatgaggtctaggtaaggncgtctcccgctggcactgaaggatgtngatggcaaagggatttccggggggaactcttaaatgtcacatantngggnggctacacatgtnccggncactgttccccagttggggtgccccaaggtttcaaatattcct

SEQ ID NO: 269404 - DNA, 420 bp, Homo Sapiens
  misc_feature (92)..(92): n is a, c, g, or t
tggggccccaggggtctcaggtaccctcatagatgctgctgtagggctgcacggggttctgttcctgctggcgcccagaagcactcgtcccnaactccctgcgcctgcctcacctgcgtgctccctgtcccagctgagagctgcagactgagtaagtgaggcacccttgtctcaaggcctgtgaaggggtcaaagagaatttcccatctgggagatgggaatttcccatttcccatctctctctctctggtagatggtcaataaacatttgttgcttaactaaatggacatgataaacatgttgttcattaaggagtgagtgttggtttccagagtagtcactggggattcttgtttactggacttgactgatgaatttccaaatgaatttgaaagttatcaaaaatcaaattcattttg

SEQ ID NO: 269405 - DNA, 446 bp, Homo Sapiens
  misc_feature (408)..(408): n is a, c, g, or t
  misc_feature (433)..(433): n is a, c, g, or t
gtcattcttcaacatttaatggtgccacagggttaaataatggccttacttttttggcctgaattttgccaaaattagcttcaaactctttttttgatccatttagatttgctagatgtccatcctttattctgtagcctgaggaattcagtttccttatcctgtactgtactatctgtggtgttaattcaagaaccattggcgtctctcttatctgagctatggaaattccttctctcaataatccttgcattctctcttctaaaactgggaacagaataatataaaagggcaggacatttcaaaactaattgcttcagggtcatgatctgtgcatttaaaagcatttttagagaaggaaatactattctgtatacttcttggggcaaagttgaaaaagggaatccntttgagtttgggataggaagctggnggaatttcaaagc

SEQ ID NO: 269406 - DNA, 550 bp, Homo Sapiens
aagtactttagaacaaggcctgtttcttttctgccatccaatgagagcagagaatctccaatgaaactgactagatttatgaatgttttttatatgtagagaggggcagaaacatgttcattttcccatgaaggaacaagtaccaagggtttatcatctgcctgaaggcactgctaacgaatttgtcaaatcctttatccagcacagctttaccaagcagctgcacagtcaggcctttgcacttctcattctcataggtccagtttaagatctcattcagtcctgaactgcttcggtcctttgcattcctgctgtcttggcctccacctagaccaagtcggcagtctccctacattaccctacattcagctgcatcctatgctccaaggcctttcaccaggggccagaaatgctcccacaaccctcaatggtctcactacaacagttccgaatcttattccaaatgctatagtatctgaaacggttcaccaatagggataatgtttctccaactggagaccttcaataaaacacttcaataggtgcttta

SEQ ID NO: 269407 - DNA, 663 bp, Homo Sapiens
  misc_feature (364)..(424): n is a, c, g, or t
  misc_feature (574)..(574): n is a, c, g, or t
gtttgtagcagttccaaaaagaaagcagaactcatttagcaatgtgataaaaggaaggaaaaatgcatatgttttaaaagtcattaacgcatcgtgaaagcgctcccaatcaacctcattccctaggattttcagctaactaacaatagtgtctttttaatttgatgtcatgaaaatctggtcacagcaaacacaatgttttctaaagcagatctggcctccgagggaggaaagctctccagggcctccagtgccttgtttccatggtaacgacacaggtcaatagctgaagtcacacctttgccagctttgattctttctcgcaactggggagtctgagggcaagaggatcacttgagcccannnnnnnnnnnnnnnnnnnnnnnnnnnnnnnnnnnnnnnnnnnnnnnnnnnnnnnnnnnnngagaccctatctcttagcatagtccaatcttcctttttcttgagcctctccgatctgtttaatccacaaatctcttccaagaaattcctgatgtaagactacaggagctgagtttagattaaaagtcatggagtcactggtcttttcttnaataaaaggctggacatcagaatttatcttatgactcatggccatgtgcttcccatactgaaatgccatattctgaacctcagcatcat

SEQ ID NO: 269408 - DNA, 426 bp, Homo Sapiens
  misc_feature (209)..(209): n is a, c, g, or t
  misc_feature (375)..(384): n is a, c, g, or t
cgttatgaaaacttcctttaataaagtaatacataaaacttttaaaataaggagatgctatggtaaccactttggtctgaataacatctgtttttttgggaaagaataaaaatcaggagaaatatgcagaaatgtagtcatttttcttctgcatccaagagagaaatccattttgaggccaagtatttgaggatggcctagttttgaangtgtagtcaaacaagtttataacaggagaacaagattcagagaaaggaaatcccctaaaggacagtatgtgcaaaggaagggccttcttgtcctttgaaaagaacaacttaaacagaattattctgacaatgtaaagatggtgattcctgatggacgtgtgtccannnnnnnnnncccatttgaaacaaagacatacaaaatttcttggagaattag

SEQ ID NO: 269409 - DNA, 424 bp, Homo Sapiens
ggccacccggtcacccaggggtgccttctggctgggaggagcaaaacaccctttttcttctcaactgacaaaactcagtctctcattaacatatgaaaacagcagttcaatttctcacacaaatgcacacagaaaaactgaattaacattaaatttgagagaaaaagcaatagggaagagcctttagaatgcatctctgaactagaattaggttccttaacaacttcagacaggaacaaatagcaaaaacaaacacacacacaaaacagcaataggatcactgagcgctccaatggtaaggaggaattacgaccagttagttgttaatattaactttaaccaagacaaaccccagttcagttacttacctagggatgagtctcaggctgaagactggtttctaccagcaagaaagcaaaaaaaa

SEQ ID NO: 269410 - DNA, 495 bp, Homo Sapiens
  misc_feature (34)..(34): n is a, c, g, or t
ggtctattcttgtcaaatatgtcttaagtgtgtntacatatagtttgcctttctggtattttctgcttgcacagacctgatctccacctattttgtgtcaacagttgctgaggctggtgttgggtgattaaccgttaagcacggaagcgcagtacccagagagaccctctctctcctctcacttacatcatcatctggcttcaggctgtgcctacagaaaacaaacagcatttttgagtggttaaaaagtcagcctgaaatattaaaaaatggggcaaatgttgcctcctggttgaatagaacagttttcttgaaaaatggagtggaccaggggctcgggggaaggaagtgtttccgagggcaaacgttggtcttagatccggtctgcattgctccagtgtgtgcacgccgaggagctttctgtagacgctgagggttatgttctgcttcgtttttgattttcaaggggaaagaggacatacaaaacaaaaacaa

SEQ ID NO: 269411 - DNA, 491 bp, Homo Sapiens
gccccctcccctgtaggccccaccctgaatgtgacccgctgcaggtacagcccagactcaagtatgttgcattggtgctgcaatcagtctctaagaaaatgaatgaaaagagcaagaagtcggatcaaaaatacaagccaataacgactttacaagataaaacaagtaattttcaaaattgttggactgaaatgataataatatatacataaacaactctagatatggtctctcttccttttgtccctaaatgctacttttaaattttcttttctgagacccaacctgggcaagacagcaagactccatctctacaaaatgtaaaaatattagctgggcgcagtggcacatacacctgtagtcccagctactagggaggacgaggcgtaaggataccttgacaccaaaagttggaggccaccatgagctatgactgtgccactgcactccagcctagatgacaaaacaagaccttatctctccaaaaaaaa

SEQ ID NO: 269412 - DNA, 443 bp, Homo Sapiens
  misc_feature (58)..(58): n is a, c, g, or t
aagggaccaacttcacagagagaagggccattttgccctcacccctcgattctgctgncctgaaaaacaaacacaacggatggagctgcaaaggaccttctttgcaaccaaggagataaccctgagaaaggaaagtcataagctaaagactgcaacacagaaagataggagctgggtctttgctgaccacatagctgccatatcctgagaggaaaaaacctctatcttgtttaaagcacctttttgtgggggaagaggggaatacagggacctttgcgatgctgccaaacctaatgctaaccaaacacagaaggaaatcggtcaaaatagaaaaataagacaagactcagaggagaggtggtttcatggcttgttctttatcttctgctaactgtacttttgaataggctttacattttttatttaaaaaaaccttttacttc

SEQ ID NO: 269413 - DNA, 231 bp, Homo Sapiens
  misc_feature (210)..(210): n is a, c, g, or t
gtgtgagctactgccagaagtctgattatcagtagagggtaggggtgctggttttgacagaaattggaaactaattgtgaaggaaaagggattcttttgccatacctctgataggcaagtattaaggcttttggttcccttttatggaaggtaggtttaggggttatctaaagtgggggagtttaggatatggaggtttggaggttatcnaattttggtaaaacattttta

SEQ ID NO: 269414 - DNA, 574 bp, Homo Sapiens
tacacttgaatgaaaaagaatgtacaggtgcacatgaatacagtttgattgtgggtgtatattatatccttatgacctaatttctctttttcatttctcccacaaatgatcctgttctcagacacattctcccttgggccacaatagagctgccactgctcctcataccctctcagcttcaaatttatgaactctcaaatgcaggtttcattggttcccaactaggtaacattcctcattccctaaatcaatcccccgggaaatgcaattcagtaatgggtttaagtctggtcttaggttccgcacctgccgtatggcagtggggtgatggctatccatgcttgaacattccctggaatgttctccaagcaaaagctcagagaaatgaaggtcatgttcagggaacagtgaggtcagaataaaattgggatgaaaggcgagggtcagattaggaaatatctgaaacttcagcctaagtaatgtgccttcaaggaagctatagattgtaaaaattaaaaatatataccaggataaacaaactatggtacatccatacaatagaatattactcagc

SEQ ID NO: 269415 - DNA, 427 bp, Homo Sapiens
  misc_feature (95)..(95): n is a, c, g, or t
  misc_feature (130)..(130): n is a, c, g, or t
cggcgaccctgccctcccgaccctcatgttcgaagagcctgagtgggccgaggcggccccagtagccgcgggccttgggcccgtaatctcacgancctccgcctgcggcctcctcgcaaaacaagggctnccaagcgccgccagctcttggccacattacgggccctagaggcagcatctctttcccagcatccccccagcctatgtataagtgactctgaggaggaggaggaggaaaggaagaagaaatgccccaaaaaggcatcatttgccagtgcctctgctgaagtagggaagaaagggaagaagaaatgtcaaaaacagggcccaccttgcagtgactctgaggaagaagtagaaaggaagaagaaatgccacaaacaggctcttgttggcagcgactctgctgaagatgagaaaagaaaaa

SEQ ID NO: 269416 - DNA, 331 bp, Homo Sapiens
  misc_feature (33)..(33): n is a, c, g, or t
  misc_feature (47)..(47): n is a, c, g, or t
ggctgttcagtatatgccaaacatgtgttggtnaaagacataaaaanaaatgtgttggattctgaggtgatatgttcctgaatgtaagcaccgtcaacatcagacacctactcatggacatgtggttgccggattttcttaagatgtttccagaaatgactgatattttatatttatacattttagatgacaaagcttgatatttaattctgtcgcacattttaaagttttctttttgggttgctctgtgtcaagagaggttacatggtgttaaatcggtacctgataatgtacccaaatactatggccagataataaattgtgctgcaaa

SEQ ID NO: 269417 - DNA, 492 bp, Homo Sapiens
gatgacttacttaatgtctctaagtctgtatttcctcatctgtaaaatcgtcttttatagagagtattaaaatgagaaagtatatggagtgtatttattacagcgcctggtgtagactcagtagctcaaaaactggaggttgttatcaatgtgtgaatatattcctgagcagtttcctaagtctcttgggaaacttgaccttgaaagatgggtacccattaagaatttctgagacctgtataggtgaaatgtgaaatgggtcttcataatctttcagttttcttttctgctcctaatttcttgctgggcagtacagaaggaaaaacaaagatgtcataatatttgagggcaaacatccattgttgagtgtacttatatatcataattaaaaaaaagaacctaatggaaaaatagacaatttagaagaaaaattgtaaatgttcaataaataattaaaatagttccacctcactagtaatgaaagaaatgcaa

SEQ ID NO: 269418 - DNA, 474 bp, Homo Sapiens
  misc_feature (56)..(56): n is a, c, g, or t
  misc_feature (73)..(73): n is a, c, g, or t
aaaaacctaagggaattgtcaggccatgtttcctgacttgcctggggatacaaganccccctccctccaattncctttccatcctgaaatgagaatgtcctaccctttaccctgtcacccattgtattttggaaagccagataaacttgtctgttttccccaggttcacagctggagatgaacttctcccccagcatgattcatacctgtaatccttaccccattcttgatttagatgagatttggatttcgagttgatgctagaatgggttaatacttttgaggatgttgggttgggatgaatgtatttcttatgtgagaaggacatgacctttgtggggactgaggaaggaatgtggtatttacttgtgtcagccctggaaaacaatgagaaaagatgtttgccctgttttattaatttttcattgttttataataaagttttaactaatctagttcaaaatgctgccagag

SEQ ID NO: 269419 - DNA, 401 bp, Homo Sapiens
  misc_feature (14)..(14): n is a, c, g, or t
  misc_feature (35)..(35): n is a, c, g, or t
  misc_feature (136)..(136): n is a, c, g, or t
tgctgactggaagnaattagaccccaaaatatgcntacgattttatgccctttatataaaatcctaaatatatacaaaatttagccaaagctaatagaactcaggactggggagagattgagtgggaaagggacanggaagggagcctttcctagagtgacagaaaagtccctatattttgataagtgttcaacagtatgcccttaatttttaaaagtttaatgggtaaaagggaaacacaaattgcaaagtttctggaaaattttgataagaaaagtactacataatactacatacccagaatctgtggaatacatttaaagcagtgagcagaggaaaattcatagccctaaacacttacataaatgaaaataaattcccaattcagaaatgaacaaagt

SEQ ID NO: 269420 - DNA, 558 bp, Homo Sapiens
  misc_feature (273)..(281): n is a, c, g, or t
aaaaggaaaaaagtgctgacattgcacagtatttttgtttaaagtacctcctacttcaaaagttaagcgcaattttgtgaagacatgaaatcataagagtacttaatgtaaaataaaagactgcatattaactctaaagaaaaatgccccacattttaagtaagaaaataaagatcaactctgctctctcaggcttttaaaaagccattcatgtatgtgctttaggtatttttatttctgcgagttggatgtggtaagtgaggagtgctcagnnnnnnnnncctccttcaaaagtctattgaaagtgttggtgatgttaaatgattgtgtgttaagatttgactgaaataacttagccacaaatcagcagtttcccccaccctcattgccccctcaccccaggcaagccccttttatctgaatgtcagaagcagcctgcctcctagttatcatgtctgatgaggtctagctcaggaaggaattccatctattgatggaatatatcccctcaagttcaatagattcgaacacagagagctttgtttaaaataatgcagc

SEQ ID NO: 269421 - DNA, 548 bp, Homo Sapiens
  misc_feature (91)..(150): n is a, c, g, or t
cgaaacatttctcaagatatgacacagacatcaggtacaaatcttacttcagaagagcttcggaagagacgagaagcctactttgaaaaannnnnnnnnnnnnnnnnnnnnnnnnnnnnnnnnnnnnnnnnnnnnnnnnnnnnnnnnnnnggggacctatcaggacagagttcacatccatgtgaaaggccagccaccagttcaggagcacttgggagtgatctaggtgatgctatgagtgaagaagacatgcttcaggcagctgtgaccatgtctttagaaactgtcagaaatgatttgaaaacagaaggaaaaaaataatacctttaaaaaataatttagatattcatactttccaacattatcctgtgtgattacagcatagggtccactttggtaatgtgtcaaagagatgaggaaataagacttttagcggtttgcaaacaaaatgatgggaaagtggaacaatgcgtcggttgtaggactaaataatgatcttccaaatattagccaaagaggcattcagcaattaaagacatttaaaatag

SEQ ID NO: 269422 - DNA, 444 bp, Homo Sapiens
gcagctccaggcaggttttctctcggaaagttaagtcttcccttgaaggcagggaagcaggatggatacacatatatcacacgcataaaacaccaggtgcgggagcagcccagactcaaggctgactaaactggaggctgaataccgtggaggtccacatgcagcttccctggagggcaggccggaagcgtcacccccctgggcttgaggatgctgcaccccgtgggcttccaggcctgcccagatgatgccttcaggcctctgtacctggcggccatcctcaggccgattttgaccagcaatgatagactcttcttaaccctttcaaaataaatttttcagtgggacagaaaggagagttaaaaaacatttttttaaaggtggtaacatctgacccacaaagggaatgggtctgttttatgcaaaataaaagtttttcaaata

SEQ ID NO: 269423 - DNA, 474 bp, Homo Sapiens
  misc_feature (54)..(119): n is a, c, g, or t
  misc_feature (139)..(249): n is a, c, g, or t
  misc_feature (423)..(423): n is a, c, g, or t
  misc_feature (430)..(430): n is a, c, g, or t
  misc_feature (455)..(455): n is a, c, g, or t
caggatctcactgtcacccaggccagagtgtagtggtgtgatcacagctcactnnnnnnnnnnnnnnnnnnnnnnnnnnnnnnnnnnnnnnnnnnnnnnnnnnnnnnnnnnnnnnnnnngatgcaccaccatgcccacnnnnnnnnnnnnnnnnnnnnnnnnnnnnnnnnnnnnnnnnnnnnnnnnnnnnnnnnnnnnnnnnnnnnnnnnnnnnnnnnnnnnnnnnnnnnnnnnnnnnnnnnnnnnnnnatcggcatgagccaccacacacagccagcttttaagcagtcaggaacacaggcatgtatatacactgtgctgagcaactgggcaaacaagttattgacattgaggacttatttgctctaaggatttgtgagctctcctaaaatgaggctgctcaatcagtttaggccccatagntccaacntgggaggtttacatggctattggtntcatttccaaaaattcggg

SEQ ID NO: 269424 - DNA, 396 bp, Homo Sapiens
  misc_feature (11)..(11): n is a, c, g, or t
  misc_feature (366)..(366): n is a, c, g, or t
ttcggcacggngatagcatagaagccaatgtggaaaatgcagaggtgcacgttcagcaagcaaatcagcagctgtcaagggcagcagattatcagcgcaaatccagaaaaaccctgtgcatcatcattcttatccttgtcattggagttgcgattatcagtctcatcatatggggattgaaccactgaagttataaaggagcacactgtcgcactacattgtctaaattatgtaggaagattcctgtaatcatgtttttttaattattattttaaagctattgtataaaggatggttcccatactttgttatttttattgggggggttgggggtggttcctttgggatttaaatctggatattttnctaatactgaaaggttttcctaaatgttca

SEQ ID NO: 269425 - DNA, 438 bp, Homo Sapiens
  misc_feature (45)..(45): n is a, c, g, or t
aaacccagcccaaacctactggccaaatttaaagtagtagtatanagatagctgttctgtcaaggtcatgcagatacgaaaatgtaaattaatccaacagcagtcagctacagttctttcgtcaaggcttcaaacctccttaggcataggccagatttgttcccagagtcaaatataaaaatgtgactatcagtagataaaatccaatgccagattttcaacagatatttcccgtttagtcttagcctatcttcacagtactgtgtaagacagtttccaatacacacaagtgaaaatactggagagatgttgtctaaatcagaatgcaaacattctacatggagtgacaaatttttatactttaaccaattgatgcaaagttaacaaaattggaccactttctttatgtgatctaaccctgatcatttcttccgaaac

SEQ ID NO: 269426 - DNA, 547 bp, Homo Sapiens
  misc_feature (13)..(13): n is a, c, g, or t
  misc_feature (110)..(110): n is a, c, g, or t
aaatacctctganagaccacagatggtcctacattctcccagaacaaaaacaaaacagaaattaacgaggccaaagccccctctccccttcattcctctctcccattgtnaaattggaaaaaaaactgaaatgtgttccacatcaaaaagtttcccttcaaactcctagcaagtgacccacagtaaaaagaaacaagagagccgctggttcccagcaggtaaaatgctgaaaggatgtcacatcgtgggggtgaggaagaaatcagggattaaatacatacagtttggagaaaaatcaggctctatagctaactaatgatgaatggagcagacaggtggcagatttgaggtccggaggagaggaagggctccattttgagccgcccattttctggaggagaggtggtggccgctgtggaaaatggctactcctggggtgcatagggagacaactgacttagtggagggaagggaagaaataaactagggagtcatccagggacacatcgagttagtgagggttttagtttggatgataacaagctct

SEQ ID NO: 269427 - DNA, 461 bp, Homo Sapiens
  misc_feature (283)..(283): n is a, c, g, or t
  misc_feature (361)..(361): n is a, c, g, or t
  misc_feature (423)..(423): n is a, c, g, or t
  misc_feature (443)..(443): n is a, c, g, or t
aaatccagcatctcagcagaaaactgcctgacatgaaaagtcccctgacgaatctgcatctgcgtttcaggggcttttcattttttctccttttttaaagtgtagattgtgggtgcttcctagaggcctgccttcttctggaactggaagtgggctatcaccatgggcaagcccttgggtgcaggctccccacctgcctgggaactctggcagctctcctcagctccttgggcttgagcagctgcaactgccccagatttgctgtggaagaaggggctaagcnctggcctcaccagggcctcccggggcctgcaatttaatgctcaaggagttcctggggcttctcttgaatccctttctnggcaatcagctttcaagttaaagctctgttttccaaacaaactattctcaagcttccctttnggcttcggctgaatgtgttnctgtttcaagtcccgcct

SEQ ID NO: 269428 - DNA, 306 bp, Homo Sapiens
aaagaattcacagttaaatatgtaccacataacacagcaacaatctgtataaagcaaaatctatatgaagtataagaagaaataaaaaactaaaattaggggactttgacacttagcacaagatgtagtgggtaaaaaaggatataaaagatctaaataatataatgtgaatcttcaagtatatccctaataatcaaggaatatactgcttccccccacccccaactctgtctcccgggctgcagtacagtgggcatgatcacgggctcactgcagccttgacctcccctgcctcagggtgatcct

SEQ ID NO: 269429 - DNA, 435 bp, Homo Sapiens
  misc_feature (173)..(173): n is a, c, g, or t
  misc_feature (338)..(338): n is a, c, g, or t
  misc_feature (369)..(369): n is a, c, g, or t
  misc_feature (382)..(382): n is a, c, g, or t
  misc_feature (421)..(421): n is a, c, g, or t
gcacggcaccagcagccccagccccttcatcctctcccaaacatggcctcacttcgggcagtgcagtccccctcctccagccttgccactctacccagaccctgtgaggctcatccggtactcaatcaagtgtcttgaatgtcacaagcagatgcggcgactacatggtcctnggctgaacatttccagaggacaacagaggagacagaggggctggtaagcagaccctcactgttacgggtatcgggcccctggttcacacaggttccatgactgggcatggagaggaaagctcattgatatgggggcagtggtggaatcttatgagtcttagaaangggatgtctgcctgaatatttaagggtttgntgttttgtttggnaaaaaggttttcctggcccatacttgagggtgaaacccnaaattttagcaaag

SEQ ID NO: 269430 - DNA, 422 bp, Homo Sapiens
gggatccaatttcagaagagtcatttaaattgtgaggttctaggcaaaacagcttgaagtcctgttcaattttggaacctgggttcttctttatgacatggattttcagcatgttctacagccgcatttatctcttgctttaaaaaccactttctagacgcatctgaaagagcagaagctttctttgctgatctcaaacggaactcttttccttcagcttccttccacttcttggcttcctcctccaccattgcatttattatctctatttctttccttctgttttccctaaggagtttggctacttcctggtaacatttgtttcgttgtagatcatcacatttttgtttatgtaaagactgaatctgccagtcggtatttaggcatgcttgttcagcctttgccaaattttctttaatcac

SEQ ID NO: 269431 - DNA, 376 bp, Homo Sapiens
  misc_feature (18)..(18): n is a, c, g, or t
  misc_feature (23)..(23): n is a, c, g, or t
tccaaaataaccactagntgganaggcaaacccacaagctgataaaaccaaccgggtttccaaaggtggccagaaagaggaattgaaactgcttctccccgattctccgcacacccatatttccctgtgcatactgcccgatgaacgcaacagtttgccagcaggcttactttttctccaggctgtccatgtattctttcttctttctcctactttcctgagcagaaatctgagagagaggagtgggaggagaatgattaatttccagctctgtaagtaaaccagttaagatgggaggtggttagcgtagaagtcaccaaagccctgcttacttctgcaagctgcttgccatttgtttaagctgctggttcattga

SEQ ID NO: 269432 - DNA, 687 bp, Homo Sapiens
  misc_feature (358)..(366): n is a, c, g, or t
taacaacactttgctctcttgatctttctccacatgtctacagagctagatttcaagtttcttgagggcttataaacactggcttttgacttttctgtctactactctctcctccatccctagagtgcgcagtgtaggtgcttagtgactatctgctacgtctaagggaggtgctgctgttgtaccctaggctggttggactgatgggaaaggtgacactatggagaagcataaatctgtgaatacagaacaaggaggcagctatccaggaaaaataagcagcaaaccaccaaggaaggcttaaactaaattttaaaaagcacaagtcaagaatgtgcacacaaattgcaccaactgnnnnnnnnntaagtttgatactaaaaaaagaacatataattttcaagcacttataacctgaaattattagatttctttgtgatatgaatgtcaaaacaaaaaaagttattatttgtacaattaagctctgctttctatcagcacctgcgagtaatcactcatgaactcagtctgtactaaatcggtattagttgtacaccaacaactattttaaatctttagaaagatagaaaatgatcagctttggcccttaccctttaagaaagataagtacaaaaccatgaagagctttaactataatcacttaaaagactttgtaattcattattt

SEQ ID NO: 269433 - DNA, 369 bp, Homo Sapiens
tccaaggggtaaagtgtgaaccccccgatgctttattctctctctctccccattacctggcccagatatggatgcagttgtgggaagcgtgtggctagagaaccagaaaaggggagacccaggaaactagaaagtactggggggattgcagagaggaggagctcaggaaggtaaccctttaaggtgttaatgaactcccagacttctcgtcatgttgtgggtacccagatctgacgctgagtagcttacgtagacttggagaactcatctctggggatagaccaccatgcagttccctaaactgggccactgggatgggtgcacaggcaggatggatcccaaaaagcgcttcaaaggcttttgaaaaca

SEQ ID NO: 269434 - DNA, 532 bp, Homo Sapiens
  misc_feature (468)..(468): n is a, c, g, or t
  misc_feature (484)..(484): n is a, c, g, or t
  misc_feature (514)..(514): n is a, c, g, or t
ttaaagatgattctagttcttaagccaattaattttgaactgcattctagacattttcaatattgtgttaagaaactctgaattttctctcaacccttgggagaatgttgacgtttttatcttagtaagcaatttatgcagttagattccacacacaagttccagccagccttctgtgagttgtggttcccaagtcagctgttttcaaagcctttgaagcgctttttggatccatcctgcctgtgcaccatccagtggccagttagggaactgcatgggtgggtctatcccagagatgagttctccaagtctacggtaaggctactcagcgtcaggatctggggtacccaccaacatggacggaggaaggtctggggaggttcatttaacacctttaaaggggtttaccttcctggaggctcctcctctctggcaatccccccaggtactttctaggtttccgggggnctccccttttctgggntctctaggccacacggtttccccacaactngcatccatatctggggcc

SEQ ID NO: 269435 - DNA, 348 bp, Homo Sapiens
  misc_feature (331)..(331): n is a, c, g, or t
cttctaataactttccttatatctatgactggatctataactccaagtattatctgtgtctcttctctcaaattttttgtcactgataaaatagggaatggctaatatatacagtattatctatggaatcataaatatgtattaaaagtagacagaaagaatatcaacttcaggttaatcaagagagggaagaggaacataggtattgaaaaatccaactgtagttaatgttctattgatgtaaaaattcttttttaagtttttactgcttttaattgtagaaataaagagctaaaccatagcataactctttttgcagtgacaattctgntcatatacaggggatgg

SEQ ID NO: 269436 - DNA, 552 bp, Homo Sapiens
  misc_feature (55)..(55): n is a, c, g, or t
tttctaagagttacagaatagcaactgcaggaaggaacttgtgcccttaggactnaggaagtaaaaaggagggaaacttggaaacacgaaagagcccttcccctttcaattcaaggtggagactggacctcagaagagggagtgggtgccccgagaactcacagctagcggacagtggaaagggcaggagccggaccaaggtgaggacagtggaactgaaggccgctggttacctctcctgccctccgctggccacagtggagaagacagcccctccctcctgctctgacctgacagtgttcatccatcgccctgtattagcgaagaacaacatcaagctggctagcaaggaactgtatacagggtccagctgggtatcacactggatctcacccaaagcttagatgtgatccagctcagtatcacaaagcagaacgaaaaggatgtgtttgggctgagaggccatacattggtaagtggcacatgaactgtattttctattgagcattgctggtatatggcaaatttgcataaaattatattgaaattgaa

SEQ ID NO: 269437 - DNA, 520 bp, Homo Sapiens
  misc_feature (18)..(18): n is a, c, g, or t
  misc_feature (46)..(46): n is a, c, g, or t
  misc_feature (57)..(57): n is a, c, g, or t
  misc_feature (88)..(88): n is a, c, g, or t
cggcccctaagaacacangtttatggaccacgcccggcctaagaancccaaaagtgncctaaagtcccttaggttcccccaacccaanttgggctgctgcactcattaagaatggcaacctaaaaaattttgggttaaacaaaaagagtaatttgattataccaagatccttgtaaactgaataatttataataaacctacccactgtcctaaaagtgtaagaatcaaaacagccatcctaatttagtttcagaattatagatgaatacagataattataggtgacccaaatccaactaaaaaatccagagttgacaactcccagatatgtagccatgcttgtgtctttctagtcacagctcaacctacccttcagtttgaagcagtgtggtgccatggtgaagactactgattttagagctttgaatctcggttcttattactatgtgacctgtgtgaccttgggcaaggtactcaatttctctacaataatggacataacagtactacttctcaaaaa

SEQ ID NO: 269438 - DNA, 342 bp, Homo Sapiens
  misc_feature (101)..(101): n is a, c, g, or t
cgggaggcggcgtccaggcaaaaacacccgctctccacgattcgctatgggcagacggcttggaggataaagggctggctgatgggtctgttcttgctctnaaggccacatcctagaaaagcagggcctgtctgggtagaaaacatggccaccgaaaccccaactagtgactggattttccagctgacattcagtcgactgtctacctccatcatcctcacctgatgtctaaggctgcgttccttcaaggccttgtcctgattggcaataaaataaggaaaaggtgtgaaaaccagcattcatgatgaagtggtgccctggcagtccccatccttgtctgtc

SEQ ID NO: 269439 - DNA, 503 bp, Homo Sapiens
  misc_feature (50)..(50): n is a, c, g, or t
  misc_feature (90)..(90): n is a, c, g, or t
  misc_feature (116)..(116): n is a, c, g, or t
agccccggtaaagtggccggccccaatggtaaccaataaggccccccccngcctgccagaataaaaggccccaaccttttaattggtganataaataaataagggaccatattttncccctccagattaatggttttaatttcccttgccattggaagtgagggaaccataaaatgggcctgggtaaaagtaataaaatccagtacaatccacctaactttccctttgtacatattattttgcagtatagatgaatattacctaatcagtttgattattcctcagagggtgctgctctttaatgaaaatgaaaattatagctaatgttttttcctcaaactctgctttctgtaaccaatcagtgttttaatgtttgtgtgttcttcataaaatttaaatacaattcgttattctgtttccaatgttagtatgtatgtaaacatgatagtacagccatttttttcatatgtgagtaaaaataaaatagtatttttaaaaataaa

SEQ ID NO: 269440 - DNA, 505 bp, Homo Sapiens
  misc_feature (80)..(80): n is a, c, g, or t
ctattcagtggatcagaatcaaactggtacattgatccacttgagccgttaagggctgcccaatggtacaatatgcccanggcttgcagaataaagccaactttttattgtgaataataataaggacatatttttcttcagattatgttttatttctttgcattgagtgaggaacataaaatggcttggtaaaagtaataaaatcagtacaatcactaactttcctttgtacatattattttgcagtatagatgaatattactaatcagtttgattattctcagagggtgctgctctttaatgaaaatgaaaattatagctaatgttttttcctcaaactctgctttctgtaaccaatcagtgttttaatgtttgtgtgttcttcataaaatttaaatacaattcgttattctgtttccaatgttagtatgtatgtaaacatgatagtacagccatttttttcatatgtgagtaaaaataaaatagtatttttaaaaatataaaa

SEQ ID NO: 269441 - DNA, 484 bp, Homo Sapiens
  misc_feature (11)..(11): n is a, c, g, or t
  misc_feature (31)..(31): n is a, c, g, or t
  misc_feature (43)..(43): n is a, c, g, or t
  misc_feature (86)..(86): n is a, c, g, or t
  misc_feature (94)..(94): n is a, c, g, or t
ccaagggaacnaacctacacggcacccgganggccccccaganaattatgttgaatgaaaaaacccgttccctaaaggtttccacnctgtatgnccctttcctgtaacacctttgaaatgacacagttgcctgaggtggagaacagattagggtttgcctaggggtggagagaagtaggtgtgccctataaagggcaacaggaggggccctcacagtgatgggtgctctggctgtgtttaccatcccatgtccctggtgtgatgtgctgtagttctgcaagatgtcactgctgggggcaatagggtaaagggagcgatggatctccctgtatcatttcttataataagagaatttacaattaccttaaaataaaagtttaattataaagaaattgcaatttgactactacttggcatgtcagtgagagaatgtagataataaaatgatgtaaaaactaagtaatgattaagaaaaattatctaa

SEQ ID NO: 269442 - DNA, 425 bp, Homo Sapiens
agctgcttgtattaaaaacagacctatctcaacccagtagcttagcagtcaggataattattttgatgtggcatattgttgttgttagtagactgaaaagaaatctaacatgttaatataactagaggaaggaaatgagagaaaattataatagaattatcttaatttttgtatattagtgttcagtctttgtgggcatgtttttaatagttattctcctagcaaacatcattttatattttctgttttagcataaacaagtttcattcttactgatgtgtgttaaattgttcccccttttatacttcagcttgttcccagtttttgataatgtagatacaaatttaaggaatatttatatgtatataactttttacttttaaaaaagttgtgacaaaatatacataaagtttatcattaattcc

SEQ ID NO: 269443 - DNA, 391 bp, Homo Sapiens
catttgggaagtcatttcaaagctgatttattaaaagaatatcatgctttttccacttggggctggggccagcatttagcaaaattcagaaaggagacatttttttctttgctattcctcctcttgttcctttttaatgctctgttctggagtggtctcctctgtccctaacttatggttctacagccttggtacttaggagaatagatcccacctcactccttctatcctacttccaagtgcccttaaaatgtactcatccatctcccagcacttagggaatctgaaaaaataatccatgctcccaggagaaggctacagggctttgtgtccttttaccttcttagccgagcctcccagtaaaataataataatgcctccaagcagacag

SEQ ID NO: 269444 - DNA, 514 bp, Homo Sapiens
acctttggaggggatcaacctatggcctcattaatgatatccagtatccataaggtgagttcatcaaggatgtgtgtttattttgaatcatgcctacttaaattattaatacaagacaattaacaaattgacagttaccatttgctttctcatcattctcattaccatttattttatagcaagtctgctatgtgtggaccaaggcttcggcttctgtggttagtatgggaagaataaattgttgaaataaaaatacccagactattcagttcacaagaagccccccaaaagaacagtaaattgtgttgtatgttcatttggaataaagcaatatttttaccactgctaaggtgaactgaaacctctcctgaagatttgtctgtttatttaccctcactttcatgggacatatgaggaaattagtgttcacatatccagtctttttccaattattggtggtgttgagttgttatgtttacactgttttaaataaaaaggcaccgtatttgaaagc

SEQ ID NO: 269445 - DNA, 129 bp, Homo Sapiens
ttacacaaaatctctaagtcagtgactaccttacagaagaatctctgtgatattatagagtctaaacttaagcaagttaaaaagaatggcatagttgatcgtttatttgaacagcaactaccagatatg

SEQ ID NO: 269446 - DNA, 347 bp, Homo Sapiens
atgaaccaccgtgcctggccaaagatgtaatttaaaatagttagaagggacttggcatgggccagctccgtgcatggcattttcacccccagagcttcctaatcctgttttcacacaggaagtttctaggtctttctagaacagctagaaatagtagctgactcccgcccaaggcccaaccttcaaaccctgagctcttcaggctgcatcctctggtgagctatagaggagaacgtggctcctaaactctagccatcctgtgtaggaaatagacttctttgggctgtggcttgcagaacaaactacactttttttccctctattgtttaaattttatttaataaaaa

SEQ ID NO: 269447 - DNA, 192 bp, Homo Sapiens
aaaaaacccttctgccctcaccctcctcaaaaaatgctgggaattacaggccatgaaggcactgcaccctggccccagagtgaaattttaaaatgccatgaactaaaatgtacttttgtcacattttccctgaattactgtccatattttttgagctgcaaataagatattttaaaactaggctatgggcca

SEQ ID NO: 269448 - DNA, 473 bp, Homo Sapiens
cagatcagagctcagtagctgtgtcaaattggaagttcaatcagtgtagttgtccccggggtgatcgcctgactctgccctgtttcatatttcagttgcttgctcccaaggagagaatttcctgagaacaatgggtgttagcaactttaagttactccccaaacgtttgctggcccacattctcatttctaaacatctggatctgggtaaaggtttgaatagatgtagggaacaaaattggtttttccatggtgtagtctaattttgccaaatcacccaagaaagaaagtatatgacgtgtggagtttgcatttcttggatgggacctatcgggtcacccagcccagtcttacagtcataaattcctacctcttagttcctgccaaaggccttcagcctctgtgtgcacacttattgaatgaatgctttgcctaaagtttggccttttgaagaaaaacagcatgtgataaata

SEQ ID NO: 269449 - DNA, 379 bp, Homo Sapiens
ggtaagctgtgaaatcatttatacaaatgaaatctcatgagagaatctcaatatatataagagcttaaagcagacaggctgcttaaagctggaagggatacggaggaagggaggggtctcccttgaggcatcttctggaatcctgggactccacggcacataatatgaaaaccactgacaagttcccctgaatacaaaaagtcaattccacttttagtaaaatacgtctttagaactttaactgaaaccacagaagacaaaatggaaagactaacgatttctaatccctactcctggggagggggtggtgtgtggaatggggggcaggggcagaagtattacaaggggtccttcattcataagcatgtgaatgtctgat

SEQ ID NO: 269450 - DNA, 432 bp, Homo Sapiens
acctataaaaccagaaggccttcaaattgtaacacagtttggaaagtttaaggcaaaagtcatttcttcccctatattttgtcatgccttatctcctgtctctttctgttttacagattagcaataaactcccttaaaaccccaaaggtttgggcttcctgttccctttcacttgcagtcagacatggagttagtggtagaagaaacagaaggggtaacctgcatggtgacagctactgaggggatggataggaaagcaggctgagtccctggggccagtggttaccaaagccaaggagagagcaagggtcacccagtggccctggccatggactgctctggaattccgagtgtgaactttcagccaagaaggtagtgtgaaaatattactgtgaggttttaaaagtacacaaataacaattgttttttgta

SEQ ID NO: 269451 - DNA, 587 bp, Homo Sapiens
  misc_feature (557)..(557): n is a, c, g, or t
gaggggacagttccgtagatgtcttccattgtgttgtaaggaatacaataagaaggaatgattggcttctccaatactaggtctgtattagggttctccagagagagaaccaataggatatgtatatagatatatgagaagagatttattaggagaattcacataagagattctggtggctgaggagttccacaacagtccatctgcaagccagagactctggggttgcagtagcaaagctcagtccagttcctaaggcctcaaccaaggaagctggtggtgtaactctcagtgggagattgaaagcttcgaggaccctgaggggctgcttagtgtaagtcctggagtacaaaggcccctgagcctgaagttctcatatccaaggaagcagaagaaaagtcttgtcctaactctcagagaccaatccattttctgtatttgctctcttggcttctggccaattgatggtgccacagtgaggtcagatcttccctacctagtccacttcagactcacacactaatgttcctcttgaaaacattccttcccagacacanccaaaattagtggttttaacagggttttta

SEQ ID NO: 269452 - DNA, 318 bp, Homo Sapiens
ggaaggaaagccatcccacacccctacaacatatgttctggcatttataaactgcttgattgtgtgcctcaaggggagaaaaagtcaagcaatgcttcaaaggccaggctttctaagcaaatgagtggttcaaagcagtgtttggctcaagggcagtctggttttatggatagggccgacccaagacatctgctcatgaagaaatgtggcatctgttgccatttcctaaactataaggtttagatagattgtcttgaattttgatagcaaatttttttaaatttatatttctgcctcctcgtacatccttatatatgg

SEQ ID NO: 269453 - DNA, 479 bp, Homo Sapiens
  misc_feature (45)..(46): n is a, c, g, or t
  misc_feature (407)..(407): n is a, c, g, or t
  misc_feature (430)..(430): n is a, c, g, or t
tgacggggaaggaaggtaaaaaaggagcgctaaagattggcgggnnttgtgggaaagcaagccaagatccaggccatggaggctaacgtgcagctgagctttgacaagcactgtgacccaaagcagcccaagtactggccggtcatccccccgaagttctgagctcagggcacagggcacccagcctctccctcttccttttggatacacgctctttatctctccttctgtacatttctcagggaaaggggactttgtactgaggtacaggcacgttcaccacagtcccagtgggcctgtcacggggtggatgtactatgccagccacttggaggtcggcaggacatattctgttgccaacatgataaaattttatcctgaacattaaaatgatgaattttgtgatntgattatcactgggttttttatngttgttcagttaaccagtttcaatttcattaaagtttcttgcctagtgt

SEQ ID NO: 269454 - DNA, 636 bp, Homo Sapiens
  misc_feature (308)..(308): n is a, c, g, or t
agtgacttgggtctgatgtctgtcccacagtgggacatccctgctgcatcccaatgccaccccgtgtcctggggacacccaaatgtgccattctctcagtatcacaagtcggggactgcaggaggctcaggtgccaggtgccttctgatgttcatgccacaagctcttcccactgtctctggctccccagacgatgttccaggaggcgggtgtgccagaaggggccacgtcttgcaaaaccaccgcgctgtcctctttgagaaggaagtcttactcaggactggggcctgtgcacacattgtcgcccncttttcagcacttagagattccttcctttgtctagtgctgaagccagggctgaagttggcctccaaatctgggccgtctcagagggcgcgcagcctggagttttccatctgtggccaagacccagtttttgggaggaggccctcatgggtcaagccagcctgtaccaggatggggggagggggttcccaacctagccccagccacccagactcccccacccccactcccttttccactgctctgacctcgggcactgttgaaatatagtttttattgcatttctgccgttttacaaaaatatgacaaaataaattaaaaacaaataaa

SEQ ID NO: 269455 - DNA, 381 bp, Homo Sapiens
catgtatatttgtacaaaaagtttttaaagttatactaacttatattttctatttatgtccagggcgtggaccgctctgccacgcactagctcggttattggtttatccaaaggcactctccatctcccacatctggttattgacaagtgtaactttattttcatcgcggactctggggaagggggtcactcacaagctgtagctgccatacatgcccatctagcttgcagtctcttcgcgctttcgctgtctctcttattatgactgtgtttatctgaaacttgaagacaagtctgttaaaatggttcctgagccgtctgtaccactgccccggcccctcgtccgccgggttctaaataaagaggccgaaaaatgctgca

SEQ ID NO: 269456 - DNA, 228 bp, Homo Sapiens
gagactgcataggcctcggtcgggaccgttcatgtagcagcaaccggcggcggctccggaggcagcgtttcggttttgtttttaaattttgaaaactgtgcaatgtattaataacgtctttttatatctaaatgtattctgcacgagaaggtacactggtcccaaggtgtaaagctttaagagtcatttatataaaatgtttaatctctgctgaaactcagtgcaaaa

SEQ ID NO: 269457 - DNA, 423 bp, Homo Sapiens
  misc_feature (13)..(13): n is a, c, g, or t
  misc_feature (40)..(40): n is a, c, g, or t
  misc_feature (48)..(48): n is a, c, g, or t
  misc_feature (54)..(54): n is a, c, g, or t
  misc_feature (86)..(86): n is a, c, g, or t
  misc_feature (290)..(290): n is a, c, g, or t
  misc_feature (388)..(388): n is a, c, g, or t
  misc_feature (400)..(400): n is a, c, g, or t
cgtcccctatacncccctctagcaatttttaattatttcncttttcgngatttnaaatttttggtttccacccagaattaattttnggtcaaagagttcaatagggctacaatttatttttcccctgaagaggcggacagctgtcccaatataattcactaaagagcccatctttcctctgccaatctgcaatgccaactttactacaatgtctgcaacttaatctcaaatggtagagcaacaaacatatttagagtgtgtgtgtgttgaaattaaatcaaatgtggagnaatgttagcatagcaattattgaatcaagatagtacatttggccttcattacccacgggttctgtatctatctgcccattcaaccaactgcagattgnaaatactctggnaaaaaattttttaaatacaataa

SEQ ID NO: 269458 - DNA, 374 bp, Homo Sapiens
  misc_feature (53)..(65): n is a, c, g, or t
  misc_feature (73)..(73): n is a, c, g, or t
ttcacacccactgcactcccagcctcggtggcagaatgcaaactgtctcaagnnnnnnnnnnnnngtgacagngggaaacaatctttgcaattccatagagcagatacagggttccatattcctaatattaaaaaaaacttctaaaagttaagaaaaaggccaactgccccacagaaaaatgggcaaggagataagaacaagattgttcacaggaagagacacacagatgattattaaaaatctgaaaagatgctgagtcttactcctaagaaaaattcacatttaaactactctgggggctgggcaagtgtgtcacgcctgtaatctcaacactgggagaccaaggcaggaagatcactgaagccagggtatc

SEQ ID NO: 269459 - DNA, 281 bp, Homo Sapiens
  misc_feature (271)..(271): n is a, c, g, or t
gagcgagccaccacgctaggccaaatagtagtttcttaaaggacagttaacattttggaatctgaaaccacatcaatccacttttttactgttaaaatccattgctatatctggaattttcaaaagatcttttgccttggcttgattttgcaacatcatgcattgggtcatttggcaaagcctaggatttactgaggttatgcccatcttccaaataacatatttcattaaaccaaccatttttaaaatattgcagtccttaaccccctgntatccatagg

SEQ ID NO: 269460 - DNA, 353 bp, Homo Sapiens
ttgaatatcagcagactcccagaagtccaataagtaaagccacttgggttaaagatagtggggaatggctcagtgtcccaccttagagtcccctgccttccctgtactgagtcctaagtcacctctgtcgaaaccttagggctctgtggatgacagtttaaatgccacttccctgaggcttaactgccagttctttcccaatccttccaccacatccttgctctttcaaaaagtttggacatgactgttatattcttctacctaaaacaggtaaacatttgtaggatattcctttcctatttgctaggacctgctggatatttataaataaaataatatacaaataaactatc

SEQ ID NO: 269461 - DNA, 308 bp, Homo Sapiens
ttaatataatttccattattccacaaatgaagaatggcaattcccatagccttacttctttctccctaaatttaatgtacaaaaatgtacatggatgatattatcacttgttgcctgtttttgttgcacaatagcacattaattatattaaatattctctttgtgaagttatgcacagaactgtaacactttcctctgcctttttctcttatatgtgggttcatggttcagttgcattgttatgttatgaatttactacttgggtgttctaaatacagtttatcttaaaatatgtagtaatatgaatt

SEQ ID NO: 269462 - DNA, 453 bp, Homo Sapiens
aggcgcctgggatggtcaccgaagagaagcacgctgtccccgtctctccctggcttctgccagaaaatcgaacaagtgcaattaacacactgttactgccgaagcctgaaactcccaggacttgtccttgatccttccagaaaccaccaggtccggcacttggagccccccggagagggacctcccagccgagccctcaaagaactccatgaaatcaggaactgcttgatgaaatgtatctccttgtacctggaagatgaagcccaaacacccacacctctgtctcccccagggctcgggatgtctccagcagcccggccacgcagcttcccaggtgggctcggggaggtgggagcagggaccatctctgtcccctccaccctcactccatccacctcggagaccaccctcccccagccagatacggaataaaactacagacgcagacgtcgg

SEQ ID NO: 269463 - DNA, 403 bp, Homo Sapiens
aaaacaaatcctctacaaatccaaggcaggaaaagtggtggcagagtgactcattctcctgtccctcccatcaggtcaaatcaggaggctgcagtgaatgcctgttctttgaatgtgtagcagttgttcctgtaactctttaaaacttggctataggctgtttagcacagtacagattaaagatacagttacgtaaacagcaaagtaattttatagtgcttcatccatttatcatgctttggtttgctaattttttcacgatacctttttctatcacagtctgttgcttttgtacacatttctcatattggggttcgacaggtaaacacaaactgctatttcagtagaaaaagttattgttatgaatattaaacccaataaattgtataaaggtaaatatcaa

SEQ ID NO: 269464 - DNA, 783 bp, Homo Sapiens
ccctatgtgtgtcaagactgtgggaaaggatttgttcagagctcttccctcacacagcatcagagagttcattctggagagagaccatttgaatgtcaggagtgtgggaggaccttcaatgatcgctcagccatctcccagcacctgaggactcacactggcgctaagcctacaagtgtcaggactgtggaaaagccttccgccagagctcccacctcatcagacatcagaggactcacaccggggagcgcccatatgcatgcaacaaatgtgggaaaggccttcacccagagctcacaccttattggggcaccagagaacccacaatagggacaaagcgaaagaagaaacagcctacctcatagctctcaagccagttgaagaaaccttgccttttcagcttgaccctgcaatataacatgcacaggcctgcttgtgaatcaggactgaatgtgaaagggaagtattgagtgaggacattcccaaaaccaaaggacaactgaggagactgcccagcacataatgaataaataagaaaatgagtgaggagttattaacatcatttggaaaaaagatttcccattcacttgatattgtttgttcactcatttagtcattaaaagtgagattaataaaatctgaaaatgttatataataactttaaaaagccaggtaattaataatctgcactgatattacatccacagtaccacagtatttatgtgtatgaattaaggattaaaagataatgtggataaataaactattgatctatgtctgtgt

SEQ ID NO: 269465 - DNA, 445 bp, Homo Sapiens
  misc_feature (403)..(403): n is a, c, g, or t
  misc_feature (417)..(417): n is a, c, g, or t
tttaaacattaaacaattttaataaaagtttctgtacaatgctaagcagttttatttacacatagaaaatgtaataggagtagtgtttgaaattacagaactccttaaaatttcaatggcaggtaaatctggaaaaaataacagcattccattcacaaatattttcaagcaataaatatgtatttataaatagtgtaaatttacatcaagattagaaacaaaaatcacaaatctgaagtttattccttagtctatgtgcaatccattacctttgtgacttggctgttaattttttaaattttatttaggaaccaaaagtgtaaccatcatggtctcaaaacaagacagaaaaacataaaagcagtaaaaaagtgtcttacctaacttttcacattaaaaaaangttgaccaaagaangacttaaaattgctaactaccttacaaa

SEQ ID NO: 269466 - DNA, 452 bp, Homo Sapiens
  misc_feature (15)..(15): n is a, c, g, or t
aacaattatgcctancctagctaatggccctaggagataattcacataacaattgatttttatatactcatagccctgaaatttcctggctataaagacaaatcccttgctctatgtgtgtggtggcctggccatgccagttctcttaagtaaacagtcactctgtcgttatccacccaattctcaaaatcaagccccatgtaaatagtcatctccataaatcctgtcaagaaaattaatttttagggtacagtcattggttttattgtagtcctcctaatcctgtgtgacatagatcctttggaaagttggtgctaccagttgggaagtgccccagcaggccccgtggttgtctggctttgttgactgtctgaatgcaacacgttgacaatgggttagctgctttggttttagggttattctccttatgcctcatgcaaatgaaaagtggc

SEQ ID NO: 269467 - DNA, 459 bp, Homo Sapiens
aaccagaaccttctgaattttcccctgcattgtgactcacgaaaattgaccgctacacagcaattccctattgggtaccccggaacgcactgcccctcagatctgctggagaatgtgctgtggtggccgttgctttggccctgggtgtgctgggcatcatcgtgggcattgttctcatcatctacttccggaagccttgctcaggtgactgattcttccagaccagagtttgatgccagcagcttcggccatccaaacagaggatgctcagatttctcacatcctgcccaggatctcctcttagggtagaagtctctgggacatccctggggtgtgtgtgtagatttcccacctggggactctgctgtccctgggcttgcatcccagggatcccagagtggcctgcctatcacaaccacatcccttccccccacaaggcaataaatctcatttctttat

SEQ ID NO: 269468 - DNA, 603 bp, Homo Sapiens
  misc_feature (125)..(125): n is a, c, g, or t
cccccgaagaaagccccagctgttcctcggagttccctacgttggccccaccttgggatccagggatcaggctgcaagtgaaagacaagaaagatgagactctggtgtgggaggccttggtgaancccaggaaggaacacccagccagccgtggaacctcaggtgcaacagagacgcccaggagatactagtgccccaagccctgcggcagtaccaatgaagccagagagggccttggtggatgacaaggaggccctgagtagacccgcaggtgggtcctgagaaatgggccttaggtgaggcaggtctttgaaggatttgttcttaatcatatgcgagatgctcaaaaggctggatgcctgcttttgtgggtgaagagcaagaagagaaaacaggttgtacacatacagatgcagatggagagacagagaaaaaaaaggaagaaggcagagaaatgcaccaattcttgagctgtattatctctggaccttgggattgtgggaggctttattttactactgattttgcttacactgttttctcaatttctagttttctacaaagatgatgtgttagctttttcacgcattaagattaaaattt

SEQ ID NO: 269469 - DNA, 446 bp, Homo Sapiens
  misc_feature (57)..(57): n is a, c, g, or t
aatcccatcctgtcctgtaattcaaggctaaagccactggccacctgaattccatgnaccatgaaagaggttccaagtggaagaagcttctccaaaatttttccagtggtaacagtctgtgatgactgtgtttaacatgcagtcattgtagtttttcctttgcagacatgccagtgacagccacaccattgtcaaccagagaatattccccttttcctgtttactcatattgggcttctgaagtaaggttctgtaggttccacagctaggataggtacttgaccctttcttgagagattggttgtcctgaatagtaatccaaaagacaagaaattgaagaaatacaaaaattcttgctgaagaaaagcatgctggtcccctgaggccagatcactgttccaggtccacgaaggcaagaggaagggacctagaaagaatctcgtgcc

SEQ ID NO: 269470 - DNA, 419 bp, Homo Sapiens
  misc_feature (18)..(18): n is a, c, g, or t
  misc_feature (39)..(39): n is a, c, g, or t
  misc_feature (57)..(57): n is a, c, g, or t
  misc_feature (77)..(77): n is a, c, g, or t
  misc_feature (90)..(90): n is a, c, g, or t
ccatccaaaacaaacccnaaattccaatccaaacccatnaattggaaacacatgggnagaaactccttgctttgtanaaaacctctttgncctacacatgtaaaaacttaccttttgttaattgaagcaggcctatctctttcagatagttttatgattcgcacaggtttgaggatgctggggagagggggagggggctgtggtggtgttctgttggttacaagaaagttataccatttaaagctggcaccagagacccgatagggacttattaactatattgaacattttttcctttgcctttgaccctatgtatagttacgatgccagattagatttatagcagcctcaagttgtattaaatgatattttgcttcctgtaatactattataaaataaagtttgtttattctctaaaa

SEQ ID NO: 269471 - DNA, 539 bp, Homo Sapiens
  misc_feature (18)..(18): n is a, c, g, or t
  misc_feature (26)..(26): n is a, c, g, or t
  misc_feature (43)..(43): n is a, c, g, or t
  misc_feature (66)..(66): n is a, c, g, or t
cgaccaccagcctcggcngcatcccngaaccggagggaagggnaggggaaaacttacttccctacnactaaagaatccaggcagctttaaaaccctagtgctttctttcttaacatacccaaattccaatcctttcccattatttgaaacacttgggtagaactcttgctttgtattaaacctctttgtctacacatgtaaaacttaccttttgttattgagcaggcctatctctttcagatagttttatgattcacacaggtttgaggatgctggggagagggggagggggctgtggtggtgttctgttggttacaagaaagttataccatttaaagctggcaccagagacccgatagggacttattaactatattgaacattttttcctttgcctttgaccctatgtatagttacgatgccagattagatttatagcagcctcaagttgtattaaatgatattttgcttcctgtaatactattataaaataaagtttgtttattctctaaacaaaaactcctctatctcaatcacaa

SEQ ID NO: 269472 - DNA, 455 bp, Homo Sapiens
  misc_feature (24)..(24): n is a, c, g, or t
  misc_feature (54)..(54): n is a, c, g, or t
  misc_feature (98)..(98): n is a, c, g, or t
ttgcaaagcccaggatttaacggngttaaggccccatcctcccaaataacatanatcattaaacaacattttaaaatattgcagtccttaaccactgnatatcataaggaaagtcttttaagtactagggaagctgtcaaactcccagctgtcaactttttaaaaattctaattttcacccaaattttatcactggtaataaatactgtcagttgttttcctaaaagtgacaagctcacttcattttcaagaaatatctgccagatactaagtgtgaaaaaccatagtctgctagtcgttctttcaagtaaaaatgctactccatgaaataagccattcattcacaacccaatctcacaaatgcttttccttcatgacaacaatcacacctccctaggcaacataaatgctttatccatgtttatttaatcacaaattcttaaaaatctcgtgcc

SEQ ID NO: 269473 - DNA, 367 bp, Homo Sapiens
gcctcttgcctgtaaatagaagcccgcaaactgtacagatttacagaggcatcgagactgggccctgggagttgccatctgagagccgatggccccagcatcccccaggtgcctgcctggcaccacagtgaccctggcctcagcgtggcaaatgcatgtaaatatttttcgtaggcagcgtggctccagagagccccctgaagacagtgtccctccctcctgtgagtcctttctcctgtacagaacctgcctggggtgggtgggggtctgccattccctcccccaggacttccctgccccttctctcccctgtaacctgtttattaaccatacctgtcctgagttcatggccaaaaccttaaataag

SEQ ID NO: 269474 - DNA, 359 bp, Homo Sapiens
aagtgtacaagaaagccccaagatgttcagggacccaaatttaacccacccagcactgcaatcaggaatcctaaaatgcaggagtacatgcacatttgcatatatgccccacatatatatttgtacacacatgtacatgtgcacacactcacacacaatgggatagctaaattcgaaactcttctatttagccagtacacttgaagagggttaaaatagtcctaggtaaatcatcctactggcttccagaaaaaaataaacaaattttcttctggaggaaagcatccctaaattaggctctctggattcctatacattaagttcaacaaaatatgagcttattaaaaagatttaccaaa

SEQ ID NO: 269475 - DNA, 390 bp, Homo Sapiens
aacccacctctgagaagtagtagctaaggctaagatcacaggccttggattaggcataccttacattagcctcccatctctgccatagatgcatataaatcatttactacaattatggcacattgtgagaactcagcaagtggtagcttttcactaggatctctgggtacatagcagatttaagttgactaaggcaaacactcatcttccagttgttcatagtcagattgtcatgccttgataagttcatgtcctgactgggcctggggagatgctggccatcctgctcatacagcaccaggggcttctgccatgggagttgttgccaattccctcttctttgcctcctacagaaaaatctatctttttccattttattttaggcctctg

SEQ ID NO: 269476 - DNA, 342 bp, Homo Sapiens
  misc_feature (261)..(261): n is a, c, g, or t
  misc_feature (315)..(315): n is a, c, g, or t
ccctaaatatccggccttcaagatcctaagacaggaatccagagggcccagcctcaaatttgcaaggaggggaggtagaccccacccattttatgggtgaatggcaaaatcaaacagaaattatgtgggatgggagatactgatgcaggcatctttggaaacattctacttagctaattttatgctaggctttaggtcaagaaggagagagagagctgacatgctgtggtacacacttattgtcccagcgacttggaaagntgaggcaggaggattgcttgatcccaggagtttgaggtagtgtgcgatgatcgntcttgtgaatagccactagccactgaa

SEQ ID NO: 269477 - DNA, 415 bp, Homo Sapiens
  misc_feature (306)..(306): n is a, c, g, or t
tagtgcccggccaagaatttttttatcgataacatagtgagctctctgcctcttcggaacgatgtccactttgcttatgatcaacccaagcaggactcttctctccctggacgcctctcccctggtctggaatcttccagttctgccagaattggcctttcccagatgctgcaaacttccagttgaacccctttttctgtgtggcccctgggcgtggcgagaccaaaatccatgagttctgtgtaccctaaggacctttgggaaggtgaagagcagggccctgaggaaaagggcagccacctcccnctccctggggtggaacccttgccaccctacttcttcaccagaattgttcagtgggcttttcaccacagtgggttcctttctggcctggaggccctggaatgttcccagg
